United States Patent Application Publication US 2019/0348154 A1 - sequence listing, part 55

SEQ ID NO: 204951 - DNA, 396 bp, Klebsiella oxytoca
atgaaagcatcaggacaattactctacggcgttcctcacggtgacaccattcactatgactacaccgtgacggttccggtcattcgccataccgtcgcagcgctggcggcgacgacggaagctatgggagaagccgaatccccggccgcttccatgtactaccgtgccgcaattatggctgaagtgattgagtcgctgggcgacctccccaaagaggagatcaccgccgagctgttgctcgatggcctgaccgatgaagatatggatcttctggatgccgagctgaccgggcttaaaaaaaagcggatgcgcgtgctgccggcctctcagggctcaggcgagccaccctcatcctcggacgattcggcatcagcgcagaccgtatcgaaggaatga

SEQ ID NO: 204952 - DNA, 624 bp, Klebsiella oxytoca
atgagcggcgatattaaagcagtatttgacagcaatttgtttgcaactcaggcgggtaccgttcaggtatttcactttgatatggcttcccgtgagtttatcggtaccgaggaagtttatattcatgtcggtgttggcctgcctgccttttcatgcctggaagaacctcctgtacaaagtgaatatcaggttgctgttcgttctgacgataattcgtcctggtctgttaccgatgattatcgcggtatcaccgtctatgacattcagacgctggccagccatgttattaccgagcccggccccatacctgacactgtaacgacctctgcaccatcaaccccatatgacaaatgggacggttctgcctgggtaaccgatgttaatgctcagcatgccgctgatgttgccgcagctgaccagcagaaaaaagagttaattgctcaggtaacggcggatatttcaatacttcaggatgctgttactctcaatatggccaccgatgaagaaaaatcccgcctaactgctttgcaggcatttcgggttctactgaaccgtgtagatacatctcttgcccctgatgttaattggccttttatggcttcccaggaggttgataatgtctaa

SEQ ID NO: 204953 - DNA, 1602 bp, Klebsiella oxytoca
atgccttcacagcaagctctggataccatttcggattatatagaaaaatcaactgcctcggggtacgctttagctaactattttccgttcttcattgatggcgctgataacgttccagtctggtgggatgatggttttgcggtatccagaatttcattacctctctatcagatgatttatgatgatgtccatgccaggctaaatgattccctaaattctcgagtagacgacgtatcgaattctttcttccccctgtttattgatgccgggaataatattcctgtttggtgggatgatggttttgatgtgtccattatttctgaaggttttaaaacaaaaatatggacgtacatcaacaacattatcgcaaatgcgcttaaccatcgcataccattaatttcacctgattttgttccaggaatggaggatggtgccgggaatgttctgttctggttccatgatgggaaacttgatgccagtggtgtcgggccaaacattcgcgggaatatggtcagctggtttcaggggcggatgtacacctctgcctacaatatcccactacataccgacgggcgaacgctctggcgctggaaagcgaagaaagcgcagctcaaagcaggaatgcctacacgtccgcacttcatgctgaccggagacagctggacccagaataatgaactggcgacggctattgcgagcttgctacacaatgattacggtgatgctggtctcggctggcgtaccgttaactatggtgctgcgcgggacggttcgaatattttccgctcctccgggtgggatttgtacgactcgtcaccgaccagcggagcgccgctttatggctgcggtatcgacgggcagtccatcaataccacgacggcaaccgcctactttaacgtcactaacgtgcgctgtactgattgtcgtatttactatcaggacctgaacggtaagtttcagtacggctacgacgttggcggggtcacgcaatggactgaggttgtctgtggtaataccggcacgacgaaatcggtgttgctggcgggtatgccggatgaggccagaaccatctacctcaaaaccgatggtaacacagggcgtgttgctatccacggattctatctctggcgcagtggcgtggcaggctgcgtgatgagtaaggcgggtaacgcggggattctagcggaccagttcctgctgttctccgacaaaatcgcggagtacctgagcacgatgcaaccggatctcatatgcattgtcatcgggaacaacgattaccgaatttcagaatcgacagccacattccgtactgctctgcaaacctatatggcttcttgtcgctcagtattgccggacgtcggctttattctgatggctccaccgcacacaaacggcgtagctgtgacacctctcgttgatttccgcgacgttatgtacgacttatctcagacgtttaactgtgagtttttcagcatttatgacctgttcgattcctggactgagatgaacgccctcggctgttttctcgataacctgcaccccaatgccgtgggtagcaacatggttgcatccaccctgaataatgcactaataaaaggctga

SEQ ID NO: 204954 - DNA, 804 bp, Klebsiella oxytoca
atgataaacgaaatctttataccaaaactgggcgacattgttattcctggtagccatcccaaaaaagggcattttatgctgcccgacttgcctgtcactagaggactgaagggtatgcatgtccagggcgggaatgcgactcttagcgtcaggaaccttgcggataactcaactccactaaccatggtcggtaacccgacaatatcgccaacttttggcgccgtgtgtaacttcgctaactgctttgatacggggagggtttctgcccggaaccagacacatattgtcatctgcaaaccggtaaaaccgacagcggccaccgagcagcaacaggcgttcatgatgggtaactacaattactcaggctcacctattgtgtatcgcggtgatggtctcgcatttatgtatgcagcccccaacagcatctatggcgcgttcgttgaagatggcagtgttaccccaacgaacccgataaataatttcacgacaaattatgacgtcaccaaatgggccgcctttgtgtcgttaattgatgctgataacaatattgccaggatcggtggccggcagggaggcgctcttgcatggcaaggttccagggcgctaaccaacaggacggcttataccggcagaacgatcaggattggctctcaccacgctggcgtaggttatcccgcaggtgcagatatcactatgggtatggaactgatttttgaagcagcgttaacccaggccgaagtagcatctgttatcgacagtatcagcgcttatctgaacgctgcctggtcaatatcagatgtctag

SEQ ID NO: 204955 - DNA, 2808 bp, Klebsiella oxytoca
gtgctggcgcataaaaatgtccgcaccgcggaatggcttaagctggtggtccgcgacccgcagctggtaaaagcgctggagccttatcaggcggaaaatttgtttaacgattactaccacggcagcatctggaacgcgacggtgatgcgcgaacagggcgttgccggcatcgcccgcttcgccccctacgtgcacgatgacctgtgcggagaactggtcagcgaggtaaaccatccgcaggcgctgatgcaactgatccgcgtgagcgaacaaggaaaacgctgccacgaacggatgtctcaggccagcctccgcttcccccacgcggcgatggcggcactggccgaactgctgacgcaaaaagaagagaaacgctggcgcatcatgctgatgaccctgctgagcacccatcggcagctggccgggcaaattttgccgtggctctcggcgcgggccgtcacgctgctggaatcctgcctgcagcaattaaaccagcaggccgattgcgccagcgccgatatgctgccagcggtactggtatccccaccatggatagcgaaaaagaaaaaatcccctgttccccagttgagcttaacgccgcttactatagaaccggtctgtatgctgacggaagaagcaagcaagcagctcctcaaacaacatagctggtacgcacatcaggtggagatgggcacaggaaagggagaaaaaaaatacctgagccagttaggcttccagcgctggaatggtcaccgttttgaagacatatccgacgccattgtggatgcctggcagcggcaggactacccggcactgattacggaatttaaaagttcccgtacttttcgccaggaagagtggaatctttatatgctcgccgcgctgcccgctgagcaggcgcttcaggcctggaacgcgctcagtaaagaaccgcacaccggggcggaatatgtgatgacgtacctgcgtcttgccgggctgccgggttttatccattctctttcacgctatccgcaggaaaatttaccggtcgctatctggtttgccgccagcgaaatcgccccgatgatcgcccgcgcctttaacaagctcaaaacgctgcgtgaaggcgcgcgcgagtggctactggcctatccggaacacgccattaccggcctgctgcccgccgccttcggcaaagcgggcgaagcgcaggatagcgcgcgtctggcaatccgtatgctggtagagaagggccatcagccgctgcttgaagaggtcgcgcggcgctatcaccagccggaggtagcggaggccgtcggcgccctgctggcgctcgacccgctggataactatccgaccaaaattccgcccctcccggcgttttaccagccagggctgtgggcacggccgctgctgcggggaaatggcctggctctcccggatacggcgttaaaatcgcttggtgaaatgctgcgcttcccgttagaggaaggtatttatcccgggctgcagcaggttaaagatttctgcaccgcggaatcactcgccgccttcgcctgggatctgttcagcgcctggcaaaccgccggggcaccgtcgaaagagagctgggcctttaccacgctcggtatcttcggcaacgacgataccgcccggcagctgacgccgctgatccgggcgtggccgggagaatctcaacataaacgcgccactgtcgggctggatattctcgccgccatcggtagcgatatcgccctgatgcagctaaacggtatcgcccaaaagctgaaatttaaggcgctgcaggcgcgcgcgggagaaaaaatcggtgagatcgccgaaagccgcgggctcaccgtggaagagctggaagatcgcctcgctccggatctggggctcaactatgatggaacgctcaccctcgatttcggcccgcggcgctttatcgtgagctttgatgaagcgcttaaaccctacgtgcgcgatgaaaacggcagccgccttaaagacctgccgaaaccgaataaaagcgacgatagcgcgctggccgccgaggccgttaatcgctacaaggctctgaaaaaagacacccgtacaattgccgcccagcaaattgcgcggatggagtcagccatgtgccagcgtcgtcgctggacggtggaaaacttcaacctgttcctggttaatcatccgctggtgcgccatctcacccgtcgccttatctggggcgtatacggtgaggaaaacaacctgctggcctgcttccgcgtggcggaggacaacagctacggtaacgccgatgacgacctcttcaccctgccggaaggcaacattcatatcggccttccgcacctgctggaaatgtccccggaggatgcagccgccttcggccagctgtttgccgactatgaactgctgccgccgttccgtcagctcgatcgcaactgttataccctgaccccggacgagctgacggccagcgaactgacccgctgggccgggcgcaagtgcccgagcggccgggtgatcgggctggcgaataaaggctggctgcgcggcgacccgcaggatgcgggctggatcggctggatgctaaaaccgttgggacagtgggcgctggtgatggagattgacgaaggtttcgccgtgggtatgctgcctgatgaactcagcgcggagcagcagttaacgaaagtctggcttttttccggaagcgcccggcagtacggatggggcagcaacggccatcagcaggcaaccttttcggtgctggataaagtcaccattagcgaattgattaacgatattgacggactgtttgagtaa

SEQ ID NO: 204956 - DNA, 921 bp, Klebsiella oxytoca
atggatataatgagaagtgttctgggtatggtggtattactggcaatcgcttttctgctgtcagtaaataaaaaaagaattagtctgcgtacgactggcgcggcgctggtactgcaaattgctattggtggtattatgctctattttccgccaggaaaatggttggcggagcaggcggctttcggcgtacataaagtgatgacctacagcgatgccggtagcgcatttatttttggttcgctggtcgggccgaaaatggatctcttattcgatggttctggttttatttttgcttttcgggtattgccagccattatttttatcaccgcattggtaagcctgctttattatattggcgtaatgggaatactgatccgaactcttggcggaattttccagaaagcgctgaatattagcaagattgagtcgtttgttgccgtgaccaccattttccttgggcaaaatgagatcccggcgatcgttaagccctttattaataagctaaatcgtaatgagctatttaccgcgatttgcagcgggatggcttcaatcgccgggtcgacgatgattggctatgccgggctgggcgtgccgattgattatctgctggcggcatcgctgatggcgattcccggcggtattctgtttgcccgccttctcagcccggcgactgaagtatcgcaggtgactttcgaaaacctctccttcaccgaaactccgccgaaaagttttattgaagccgcggctagcggcgcgatggctggggtaaaaattgccgtgggcgtggcgacggtagtgatggcgtttgtggcaattatcgctctgatcaacggcgtgattggcggtatcggcggttggttcggttttggtcacgcgactctggaggggattttcggttatatccttgcaccgctggcctga

SEQ ID NO: 204957 - DNA, 135 bp, Klebsiella oxytoca
atgtgggtgatgatgaagcttaaacgcactggagaagaggtgtttttccagtattacgacagcagggaagcggctgaaatagcgatgaatgttatgaactccgtagccagcagctgggaattctatatcaaataa

SEQ ID NO: 204958 - DNA, 195 bp, Klebsiella oxytoca
atgattgcttacttacgcgttgttctatcggtggtgattgtcgccagcgtttatgggctgttcgttccgatcctcatttcgatgaaggacacgacagcagttatatccggttttgccctggcgattctgaccccgccgtgcatctacgccatttgtaagggtcttgcacttaccgtaacgaaggaaaagaaatga

SEQ ID NO: 204959 - DNA, 366 bp, Klebsiella oxytoca
atgagtaacttaattactacctatcgccgccgaattttaaaagcagccttgttacgccaccagcgaaagactgggagtagcttacttgtcattaagcttaacaagggtgggattagtactatcgaattaactgagattcttcttgatggattgttgcggaaattcgagcgactggcgctcggtgaatacggaaatgtggaaggtgtgaaagttcttaagggaatttacagcaactctgttgatgttaatggcagcggcgaattcctcacagaaagcgggaaagagttaatcgacgagcttatttctgaactggtggagttcgtcaaaaagcagaaaccagttactgcggagtccggcaatgaataa

SEQ ID NO: 204960 - DNA, 225 bp, Klebsiella oxytoca
atgggtatgcagcgccgccaagatattcagtgcgtcaccattaaggctgagcaacttaacttccttatgcagacaattttcacacatcataaggactttgactgccatcaacttgatggggttttaggtcttgcatatgaccttgctggcgaggtctattcatggatggaaaaagaggaaaagattgtacagcaaaatgaagaacacaaaagaaggggtaattag

SEQ ID NO: 204961 - DNA, 414 bp, Klebsiella oxytoca
atgaaaactccaatccaaatgcttgaagtgtttgtatcagacataatagaaaacactgttcttctggaggagatctataaaaaaagtaacgagaattacgaaacagattgttctataaacagcctaattcgttcaatgcaaaagaccgtagataacatgaacggatatattaagagtcatattaattcagtcaaaccctgcatacctgtagcggccagaaacgatctggcttatgatatattcgatgtgattcttactgctaaaaaacttgaagcactcgcacaaacttatagtgagtctttttttactgacgaggacaatgacaaccccgcgtgccatatgtcagctgtgatatttgactatgctcgtgaactttgcactgatcttaaggctatcgagaataaaataggctaa

SEQ ID NO: 204962 - DNA, 801 bp, Klebsiella oxytoca
atgaacaatatctatatcccaaaactcggtgacgtcgttattccgggaactcatccgaaaaaagggcatttcatgcagccggatttacctgttatcgcagggttgaaagcgatgtacatccacggcggaaccttagagctgagcatgagaaaccgtgccgacaacaatgctccactgaccaaagtcggttcgccatcgatccaggctgatttcggggcggtctgtagtttcggtaactgttttgataccggaaaagtttctaccaaaaaccagacccatatcgtgatctgtaagccggtaaaaccaacggcagctaccgaaacccagcaggccttcatgatgggtaactacagctattccggctcaccggcggtgtatcgcggcgacggactcgcttttctgttttccgggcaaagtctttacggggcctttgtagaggacaacaacgtaacgccaacgaacatgatcaactactacagcgcggcatacgacacaacgaagtgggccgcttttgtggagctggttgatggtgataatgggatcgccaggattgctgcccggcagggagggccgcttaactggcagaactcgaaagcgctggtcaaccgaaccgcttataccgaccgcacgatccggatcggttcacaccatgcgccagctgcataccctgcaggcgcagccataacgatggggatggagcttattttcgaaacagcgctgactcaggctcaggttgcatcagtcctcgatagtgtaagtgcctacctcagtgcagcatggggaatcaccgatttaggttaa

SEQ ID NO: 204963 - DNA, 1947 bp, Klebsiella oxytoca
atggcctttaatccgccgttggggagcacttctccggaggtgctgctcgataatgcaaagcgaatcgatgagctggcgaacgggcctgcggctactgttcccgatcgcgccggtgaaccgctggactcctggcggaaaatgcaggaagacaacgccgcacttgtggatgaaacgcgccagaacctgatcccacttggcaagcaataccagagtgtggaagaggctcaggctgatattgccagtattccagtaggtgccaccacctacgtacgcagtccggatgattccgctctggcgatcgaataccgaaatgtcgccgggacgctgacggcaaccgggcgcaggatgccatcacagagttctgtcgacgcagttatccagtttatcgatgagtttattgccagcggggctgtcagtggtgacttcttccctttctttgtcgatggggccgggaacgtgcctgtgtactgggataacggttttgcggtttcccggattgccacatcgttgtatcagatgatctatgaggatgttcatgcgcggctgggggatgcgttgaatgtgcaggtaacgggggtttcccctctgtttttcccgttattcatggacagcgccggcaatgtaccggtgtactggaatggtgggctggatgcgtcggcaattgcgacggggctgctggaaaaaatatgggcttatatcaacggtatcatcgccagcgcgcttaaccagaatgtccctctggtttcccctggttttgtaccagggatgatggatgccgccggaaatgtcccgttctggttccaggatggcgagcttgatgcgacgggtatcggaccaaacatcaggggaattttcgcaagatggtatcagcggcgtatgtacaccgccgcttataacattcctctgcataccgacgggcgaaccctgtggcgctggaaagcaaagaaagcgcagctcaaagctggccttgcaacccggccacacttcatgctgacgggcgacagctggacgcagaataacgaactggcgaccgctatcgccgggctgctgcatgatgattatggtgatgccggtcttggctggcgcacggttaactacggagcggcacgcgatggctcgaatatcaaccgctctgcagggtggaatctgtatgactcatcgccgacaagtggtgcgccgctgtacggctgcggaattgatggtcagtcagtcaatacgaccatggcgaccgactatttcagggtgacgaatgtccgctgcacggactgccgtatttactaccaggatttgaacgggcgtttccagtacggctacgacgctggcgggatcactcagtggacagaggttgtctgcgggaataccggcacgacaaaatcggtgttgctgacaggcatggctgacgaggtcagaaccatatacatcaaaaccgatggcaacacggggcgtgtcgctatccacgggttttatctgtggcgcagtggcgtggcggggtgtgtgatgagcaaggcggggaattccgggattcttgccgatcagttcctgctgttctccgacaaaatcgcggagtacctgagcacaatgcagcctgacgtgattgcgattgtcatcgggaataacgattacaggatttctgaatcgacagccacattccgtactgctctgcaaacgtacatggccgcctgtcgtgctgtgctccctgacgtgggatttattctgatggcaccaccccgcacgaacggaacagcgataacgcccatcgttgatttccgtgacgtcatgtacgacctgtcacagacgctgaatgtcgagtttttcagcatctatgaccttttcgactcctgggctgaaatgaacagcctcggctgctttctcgataacctgcacccgaatgctacgggcagcaatctggtcgcaacgtcactctacaatgcactgattaaaggttaa

SEQ ID NO: 204964 - DNA, 198 bp, Klebsiella oxytoca
atgaaagcaacagtacgccgctacttacgcgctgccggaagcattcttgatatcgctccgtcaaccgattacgtcaaaatcgccaaaagagccattggcaccgatccactgcgtagtgatttcagacgcattggaggagattttgggcgcgcaattactgtagcaaatgcagcaaaagccgaagcagcaaagcaataa

SEQ ID NO: 204965 - DNA, 270 bp, Klebsiella oxytoca
atgcctaaacttctgctcattctcagccatggcaaaaagtcgttcagcgccgccgggaagaatcctgtcatagctctgcattacttcggggggtggaagcggtccggaataatgagtttcatgcctgaccatagcctgaaacttcccgctaccaagcaagacatcgatgatttctggatttgcctccagttccttctctatcttgccggcttttgcgacaacattgttattgctttgctgcttcggcttttgctgcatttgctacagtaa

SEQ ID NO: 204966 - DNA, 294 bp, Klebsiella oxytoca
gtgagtatcgcatttcattcgcaaaacggcggcggctggcgcttcacgccggcgataaatatcggctatgaacacagtttcagcggcccttcggtacgtactcagggccaggtttatcactatgaagtcgtacagaacgcggccttcgatagccgtgacatggtcaacgctggcgccagtttgagcatcacgcgcggtgcgctgagcctgaaccttggcggccaggctgacgtcgccagcggcggcgacagccacggctacagcggcagccttagcgtgggctacgccttttaa

SEQ ID NO: 204967 - DNA, 312 bp, Klebsiella oxytoca
atgtgccaggcgctaattcttaaatactcaaatgccgaacctgagcagctgcttggcgttatccctatggaagaggttgccgagctgatgcgccaccgcattcgtcagcaggttcgcgacgagatcgagttagaacttcgggaccggatagttgaagcagaggaagaggccagccgagagggaggacgagcagacgactggcagcaggatgccgaatgcctttaccagtccataaataatgcgcttgagcaggattgggatgcagcacaggaaacattacggcaggcacttgaagattcagaagcaggttaa

SEQ ID NO: 204968 - DNA, 195 bp, Klebsiella oxytoca
atgactgagctgaattacaaccccgaagaccccgacaaaatgcagttgccagcaggtaagtcctgcggggattgcgcgcacattcgtcgctgtaaagctattttcggccataccgaaaccgataaatattgcgactggtcgccatcgcgtgcggtttttgaggaggcacaccatgtgccaggcgctaattcttaa

SEQ ID NO: 204969 - DNA, 282 bp, Klebsiella oxytoca
atgaaagaagacgttgccaataaactatttgagcggattaaccatctagaggatgcaatccgtcaccttacagtcagaacagatctgatgactcaacttattgcaattaccgcagcagcctcgcacctacgtcccgttatttattctgagcaccttcacctactaaaaccaattgaagaggtggttggcctgcgcgaagttcttgagaaagaggtttctcacattgaaaaggaactaaacaaagttttttcaaaggttgagtctcttcgtaaaagcctataa

SEQ ID NO: 204970 - DNA, 354 bp, Klebsiella oxytoca
atgaaaaggttggcttttgtcgggttatttctcttgccaggattatcattggctgcgaacaatggcggtataaccttgcaatgcgcaggctataggctggagctaattcccgattcaatgtttaggattaatggggaatacgttacctcacagaaaattaaaacccttggtgatggtaacgggatgaaggcagatatgggtttgatgcccgccaaagacggtaataactacggctttcagtacatccgccgcccaggtagtgaatctcgcttccttaatgtccagctactgcaaaacagcacggatgcaccgaagatcataggttccttcccctgcaaaaaggtctctggctaa

SEQ ID NO: 204971 - DNA, 1155 bp, Klebsiella oxytoca
atgatattacaattaacaggtattaaccggaacgggtccccggagctttcgctgtccgctggcaacagcactgtctttgcctggagccccttcggaggcggcgcactgcgcacaggaaatgcggcttcactgccggggtttaacggcgagcgccaggacccgctgtccagggtgacgcatctgggcaacggctaccgggcatacagcccggccctgcgccgttttacctgcccggacagtgagagcccttttggtgacggcggaataaacccatacgtgtattgtaaccatgacccggtcaacaacaccgatcctagcggtcatgccccgatttccgagcggatacgcaaggtggcctcacagttcgaacgtcaggaaatgaaaactgcggaagagtcaatgccgtcggccttagccacaataggtacagtggagtcaggaacggaacttgccgaccagggggctaccggcgtaagccagaccattacccgggcgagagagaatacagaggcggcccagaatttgggctgggcttcccttgggacgggtgtagcgggtggaatggggctggctgaaggggatgaccagcaggtggtgaatcgcttaagtaggggatggataaatcgtcgtaagaggactcctacatcatcatcatatccgccttctcattcatttgatactttcgatttatatcaatcacctaataaccctaataagagagtgataataactgcacatggtgcgcaaacgctgtttagtaaaagcgcataccttccaaggggaagtagtttgcggtattacagtagtgatggatattctctgtacgatccggggctttttaatatggctaaaaattacaagtacgttacaccaagagaaacgctaaacggcccgggaagaatacgtaattaccaactttcacgatattcaaacgatactccacaggacatcacaaccatagtgagatatacgggcgttgatattatcgcaataacaaaaaatacaacattaaggcatgtactaaaggtattggatcaaaataacttaaactactcaattgtagagggatctttttgccgaaccacaataaaagatattgttctggacactttcaaaatcgctgaagcgccagctcagcatgctgagcaacactaa

SEQ ID NO: 204972 - DNA, 1101 bp, Klebsiella oxytoca
atgaccttacagataaccggtaataacatgaatggttccccggagctttcactttctgcgggtaacagcaccacctttgcctggagccccttcgggggcggcgcggcgcgcacaggaaatctggcctcactgccagggtttaacggcgagcgccaggacccgttgtccggcgtgacgcatctggggaacggttatcgggcgtacagcccggccctgcggcgtttcatctgcccggacagtgagagcccctttggtgaagggggtataaacccgtatgtatattgcgaccatgacccggtcaacaacactgaccccagcgggcatatgcctaaaaagactactgaagaaatggaggccgcaacccgtgccagaatggccgcgctaaatgcgggcaagacgcaagctcaggcgcttcccgctgcactaccacagccccaacgcgccagtggcgctacaggcaattctgctgcacaggtccggcagcgtgcggcccctactgcggcagtgcagggcgcgtcacaacaaagacctcgtctgccggcacaggatatcaaaccaaaagcagccactgattttgaaatggcaccggcctatctgtgggccgtcagtcatgaacacatacagaacgcatcacaacggagatttaatgttagtaaatccaaagagttaatcagaagagcaacacaggatgaggcgttctttgataaaacgaagacttctttgaaatatggtatggatgaattgaaaaataaatcagaagcgcaagtggcagatgaactggatgcccttattgcagaacatggtatggcaccaagtaagacgttatatcgtggaatgccaaagaaatttgtcggaaaaccgggaaccattgttcaagaaaatagattcactgctgctacaaataatagaagtatagccgaaaaatttgccggttcaggaggtcaggtaattaaaattaagggaggaaatcctctacccatatctaatgtgtttatgggtatgcgcggggccggggaatcggaatttttatatgcaaaaaataccagattcaaagttctcaaaagtagtaaaaccggcgaaattgtatacagggcgatttaa

SEQ ID NO: 204973 - DNA, 1107 bp, Klebsiella oxytoca
atggccttacagataaccggtagtaacatgaatggttccccggagctttcgctgtccggaggcaacagcactgtctttgcctggagccccttcgggggcggcacggcgcgcacaggaaatgcggcttcgctgccggggtttaacggggagcgccaggacccgctgtccggggtgacacatctgggcaacggctaccgggcttacagcccggccctgaggcgttttacctgcccggacagtgagagcccgtttaggggtgggggaataaacccgtatgtatactgtgaccatgacccggtcaataacactgaccccagcgggcatatgcctaaaaagactgcggaagaaatggaggccgcaacacgtgccaggatggccgcactaaatgcgggcaaggcacaagctgaagcgcttcctgctgcactaccacagccccgacgcaccaatggcgctacaggcactactgctgcacaggtccggcagcgtgcggcccctgctgcggcagtacagggcgctccccagcaaaggacacgtccaccgcaaaggacacgtgcgccggcaatcgcttccacttccggacaagccaattcttcggcgagcaatctggtaaaaccggctcccctatcagttcttaaaatgaaagcgacggaagatgcaaaagcagcggctcggtttgaggattatcatgatgttaggcatcactttagaatagatattcatgaaggtaaactttggcatgcaggtagtttattaacaacatccgaagatggtggttttaaattcatccaggatgaagatggaagcttgtatggagttgaatcatatgaacatagtgattttcctaaacacacttctcttcttggtgaatcatggcccatttctgccggaacaatgattgtagatagggggcgtgtaataaaaatttcaaatggctctggacattttcatccagccaaaaaaaatctggaatacaccaagaaatttctcgaaaattcaggagttaaggtgagaggggatgatttatttcagaccgaaggcaacccggaacgattaaaggaaaccgtatcgcaatacagagctaaatatttgaatgctgccagtcgctaa

SEQ ID NO: 204974 - DNA, 204 bp, Klebsiella oxytoca
atggcgattgtatcaggaaataatagcgctgatagaaaaggtatcccttggttcggggggattgttggcctggcggtcggtttgacgatgctctattactggtcagagtggactcactggtggccgggcaacctccctgaggagatgtcgccgtatatgctggtcaagggcattgatttgggggaagttccgctccatgcatag

SEQ ID NO: 204975 - DNA, 438 bp, Klebsiella oxytoca
atgtatattacagagaaaatggaacctatgatcgtctttgatgagttgacgtctagtcagacagcattgcaaagcttgtatgaaatggataagtcattggtcagttcgttatcagttattaatgataagaaagagcatttatatagtcttggtgaatttatggagtttgcaacttctgatgcgcacgaaggggaaaacgtagtgccatttgaaaatcattatatttctatctttgatggtgtatatttgaggataaagcaagttgagtttaagacgatatataaaaatatgcttcctgaatttgcaaaggactgtgctccaacagaaattaaaactattgctaaagtgacaaatgttataactggtgaggagaaagagattgaattagaggacttctggtatgaagaaattgatttttctactcaagtaataggttag

SEQ ID NO: 204976 - DNA, 909 bp, Klebsiella oxytoca
atgggtaacgtagctgtagatatatttccccctgcgtattggcaagactttgaaagaataactctcgatattgccagaattcagtggaaagatgactatgccgagagacatggaagagagggacaggcacaaggtggcgtagatgttttgggctacaatcataatgctggagaatatacaggaatacagtgtaaaaaaagatcattcaagactaaaccatcctttgaatccccatccaatacgttaactattcaagagattgatgaggaattaaaaaaagttaaatcttctgaacataatttagatcgttttattattgccacatcaggaccaagggatactgaactacaaaatcatgtttcaaatttaaacagaaaagaaccaaagataaaagtgtccataaaattttgggatgactatgttgattttctgaataatcatcctgagttaatgtaccgctattatgaaaatattttgaagtacagaagcgaatataatagtactcagcattatcttcacttgctttcaatggctttcgatcgaccagcactaagaactccattccactatgaaagcagagcgactgatttcatctctgctatatctgcaacgcaacaagccgtatctacaggccgcttagtagatcgcaataacagaattatagatcaagtacatttaccagctccaaaaccaaaagggctaactagaatatctaacctactccaaaaatgtcgaaatatagcaaccgatgcgttagcaaaaggtataataatcgaacactctacagtcatcgaaattaaagatcaagatgtttgcaaccaactaaatagcattcgactggaagtaataaagctattgaacgatattatggccagtaatggaattgaaaaaattgagtttgaccgctga

SEQ ID NO: 204977 - DNA, 1281 bp, Klebsiella oxytoca
atgacggataaaccagcaggcaaacctttgtcatccaaagcggtcgaaatgatgaagcctggggacaaaaacaaggctgataagggtgagaaccggggcctgcgtgtgacttgcggtgcttctggtatcaagacctttttctaccgctatactagcccagtgaccaataagctgtcacaggtaaaaattggaagcttcccgcaaacctcgctagcaatggcacgtatgaagttgcaagaactcaaactaatcagaagtgaagggcgctgtccggcttctgagctgaaggatgaaaagcaacggttattagaagagagtcaaaaaccgaaagcggcagtgctgacagttgaagggttggttgagttgtatcttaccgagcgtattgaggatcgtaaaacgaaggatgggaggatcattcccggtgccagaaagcataaagggcaagcagaggttcgtcgcactctttatggtgatgccgttaaaaccttaggaacacgaaatgctgctgagattacacgccaggatgttatcaatttaattaatggcattgttgccagaggcgcaaccgtacaggctggtaatgttctgagggaattttcactcgcttatgagtttgctattggccttggtcgttttgatgacagttttgcgaatccggcgttgttagcaaaatccagcttgcgacagagcagaatcaagcttacaaatggtcgtggaacacgggtactggacgaggctgagcttggcaaatttctaaaatggcttccgggttcggcttatacgccaacgatcaaaaacgtgctacgtttgactctctggaccggttgccgtaccggtgaagtctgcaatatggcatggaaggatgttgatcttgaaaaaggcactatccatctgcgagaaaccaaaacaggggtagagcgctacgtacagttttctgatcaagcgattgaatttctcaaggttctacgccttacctctgacaaatatctattcccttcgaaagccactaagaagccaatccagcagaagtatctaactgaaaactcatggcgtttacgtgaaagcggtcaaatgcttgatatacctcattggacgccgcacgatctgcgtcgtacagtacgaacgggcttatctcgtttgcagtgtccaaatgaggtggctgaggccgtattggggcatacacgtggcggtgttgaagggatctacaacttgtataagtatgatgctgagtgtcggaaatggctgcaggtatgggcggattatttggacagtctacaatga

SEQ ID NO: 204978 - DNA, 582 bp, Klebsiella oxytoca
atgcaatttcaattgataccagggtttcttatttttttaggctcctacctaccgcttgcactcatattagcattgcaggatattcctaaggcatggtggaacaagacactatgtacagctcagagcttctctaatggaacctgtgtatttgtcccttttgcgaatccgataatttccacttctttcttgttagtaacgttggttgcaatgctaattgttcggatatcccttaagaagatagattatcctttcgctgttaatgtgaaaaaatataagccgataccgaatgaaattataaattacacatttccttatgtagtgtcttttatgggcatcagttacgatgaaccgcaaaaactaatagggtttttagtttttcttctatggatgttcgcaattacatataagtctggtcagattcttatgaatcctcttcttattattatggggtggaggctttatgaggcaactatagttatcagcaatgtggaaaaagatgtgcgtatacttgctcatggagaattaaaggttggaaatgtcactgctcaaacaatacaagatttttatattgttaaaggataa

SEQ ID NO: 204979 - DNA, 3813 bp, Klebsiella oxytoca
atgtcaattgctaccatcgggcctgcaaaatacgattttcaggattttgtttgtataaagtttgcgctggatttttataaatttgagaatgcaactctcattgttgaaggcgaagggggtgaggatgcggaaatttctgcagacattgacggcacgaagattgtgtatgagattcaggtgaaaggttctgaagagcatttcggcctccctcttttggcagaatgcctcagccattttccagcacatgagcccactcactttttcctagaacgcctagttaacgatccaaatcgttttgccgtcatggtgatgtcggggcgcgcgaatgattctcttcagaagtttataccaagagggaactggcgtggcaaagaacatagcaccatttatttcacacttcaggaagccgaactgctgattgatgcaatgcggagtcatgctgaatcgttgaaaggatctgatcttaaggctgaaagaaaaaaatatctgaatgactacttaacgggtattgacagaaaatccctcaccgcagcatttaaacgactcattatcattgatggcatcaaagatacagacctaagcgaagcttgcaggcaaatcctgcgaagtgattttttggttccagatgatttatttgatgcacagattaatggtctccggtcagtaatgaagattgggagatcttctcaacaaaatatcatggcggaatttattgccaagttgcaggagaaccccgttgagtgtgtcaggcccagaaaatatgccttacgtggagatgaggataattatctcagcatacttaaaaatcaacatgctctgctgctttcaggcaagcctcgtgtagggaaaagcagtgtggctaggtggattgctgctacttatcaaaagcagggataccgcgttttacgcacacaagatgcagatgcggctgagcgttttttactggaccctgtgagcagccatcgacttgtattgatcgatgaccctctgggtggcgcgcatgcaatcaacaaaccgcatgaaaaatggatgctgcttaaacgagtcatagacaatgccgacgcaggcagaaaagtgattgtcgcgcaggggcaagagcgcttgtatgagctcaatggggggcacgaactaaccgccctacagctccttggacatcactggaacgatttgagtgaaacccccgattcctttttgctcaactgctgggcgcagtatgaaagtcatgtaccttatgaattttatcataaaatagctgcgtatatccgtcaggggcttcttaatattgagcccggatgcctgagttatcttgccatgacagactcagggcttgaaacgcttgactcacctgaaaaaattattcgctttgcacgaaaagaatcaagtgacctggctaacggactggtcgctgaagggtataaacatctattacttggccttgcagtatccacaagccatttagaaagcatcagcgatcgtgagttagcctggattttaaatgaagaaagtgaaggaacctatggggtatctaaaaactcattaggttattcttttgggtgtcgcgaagaagatgaagttcttcccttccctgaatacactcccgagcctgagttaacctcaagcgatggtgataatcttgaccgtttggaaaaaagacacattcttcagatagatgatttggaaagaacgaattttacacacccattttatcgttctgccgctgaatcactatttagagaagctggcagacgcgaatttaaaaatattgaacgagcgttacgcaaaggtattttttgtctttcgccatcaaccgccagagcaagcgcaagcaacctttactggatatatcaacaaacatacgcagtttcaaataaagatttaataattaagatggcaatcgatgggttggattcaagctacccttccgtacgcgatatctgctttgattttctcattcagcaaactccgaccttaagtccggatatacagaaccagttgccatcgtggactcacaaagttaacaacaacagccatacagttcttcagtgggaaaatggacagccctggtacccgatgaacagtgaactcatcattagtacgagatggttccatgaatatgacaagcaacacgttgaaactcttctagatgaaattgcgtcaggcttggatgtcatcctcacttccaaagacgcttatgacattgttcatcacttggagacgtcacgggagagactcgatcacaaactcatggctaagttgctgagtgtaaatgagcggtttattcgtgcactggctgcaaaactatggatgcgtattaaccgagaaaatgattttgatattcttgagcgaatattcaatgaaacacacccggctgttgcagaatctgtcttccagtcggctatgaagggatggcatctgtactccgcagaaaggcaacattacgttctgaatgcacttgaacgcatcgcatctcaaccagttctggcaaatgccatcatacaattgctggttatatttgaacgagagcatgctacaggagatacccccccttggcaggtctttgctcggttatttcctatcgcactttcctctctgacagcaaccgtgcatttaagttttgcacgcctcgctcatgttgtcgaagaagctcagcaaaaacttacacctgatgaaatgatggacgtgctgacaagctgggttacattacttgaaaaacagaggttttacagggatagctttgctttaaatgcaactaatgcactgctaggtattgaaatatcagaatcgctgctatcgcgaagactttctttgattgaacgcttgttagcactatgcagtaccaatgacaggatgagaatagtacaagaccttgtttacgcctggaaacaattgacatctgctgaacaagcagcagtcggtgcagtgttaaccaagggaggtccggacaatcggtggatattggcggccattctcataatgtcaaatatcccccgtgagcttgtaaaaaacattttacccaatcatgaaggtaacgcgctttcggtcgcggcaataatatctcttgaacctgcattatttgaggccattgcattggtcgcaacccattctattccatgcgacgtatatcatattaactcagagttacagcatgcattgataaagatgcttgtcatggatgagttaagtccttatgcacctatggcgtttgattatgttctgaggttttttgaggataaggaggaattgctttgtgaggttatcaacgtatcggatgaatcgcgattgcagaaaatttttgactacctattttacttttatcaggattccaatcccgaaaatcttcctctcgtatgggaaacgttgttcagtcgagctactgaagatgtaatctgcgataactggctgccgttgttcggtagatatgccaatcgtatctttaaagattttctcgttgaagaaatggaaaaattcatcccgcaacgctatattcatatatttttaaagaaaattcccgatacgttttattacatgtactcccataattttctgaaaagtgaattttgtgaacataaaggtaatgaaattatagtaagtgaagagatgatgtctgtgttttataaaaacatcaatgaccgaatggtcaaatcacctccagtacaccataacacctatgatcacattataaacacattaaggaagatgcatggttcggaggaaatcattcaggcttggaatgatgcaaggagcagcttgtttgagtatacatcccatgagtctcctttcctccctcctgctttaaatgactggcagaactag

SEQ ID NO: 204980 - DNA, 156 bp, Klebsiella oxytoca
atgccgaatggagactataaaagcgggaaagctatcgtgggcatgagttttggtgcggtcattaccaggcagtcctgcgggattaacagtgtctactgtagcggtaacgatatttatgcgcgtaatttgtttggcttacggagaaaaacaggttaa

SEQ ID NO: 204981 - DNA, 684 bp, Klebsiella oxytoca
gtgcgtgccttaatattagatccaaatgtcattagtcaaaattacttacgatctcagacggaaaatgctgggtttgttgtggatgtttgttcgagcttaaaagaagcatggctgttcatgatatcgaataaaccagatgttatggtaatgactacgactcctcgtgattccgaaagtgtccaggctattcggcgttggcgaaaaatgggagaaaatattaggatcttaataatcagcaatgaagaaaacctgcagcataaagtgcgtgctttaaatggaggcgctgatgattatattgtcaaaccattcaggatagaagaactcattgttcgcttacaaacacttattcgtaggtcttgtctggaaccgacaaaaaaaatggctgcaggtaagattgagcttaacattggaagtagagcattgtttattgcagatgaaaaaataaaactcaccaactatgagtttgagataatgagactgcttattaaaaaaagtggcaagctcatcagtaaatatgaaattatgaagcatttgcatgatgatatatttaatcaaaacaataatactgtagaagtactcattgggcggttgcgaaaaaaaatcgcaccttataaatgtgccagaattgaaaataaaagaggtgatggatattatctggatgcaaaaaattttattgaccattaa

SEQ ID NO: 204982 - DNA, 165 bp, Klebsiella oxytoca
atgcacttaagaatattcttgcgaaataatgaattttgcgatgaagtcaggccacaaaaaaatcaaattcagagcttttcactaccaacaagtgaaattcaaatacttaataataaaaaaaccatgattacatttcttttgaagggttattttgttaaaaagtaa

SEQ ID NO: 204983 - DNA, 186 bp, Klebsiella oxytoca
atgaaaacccttaactctctccctaataaagatttacaaggggtgatagataaagcaaaaaaatgccagcaagcagctactagtagcaatactgataaccctactacgatggtttacttcttagttgaaaaattactagagttaaatctttccaagacagcaactaaaaaaataaatcgagtttga

SEQ ID NO: 204984 - DNA, 1266 bp, Klebsiella oxytoca
atgctcatcgaattcagtgttgaaaattatcggtcgatcaaagaaagacaaacgctttcattaatctctaacaaaagcaatgagttagaaggtaatgtgtataattatgaaggtacagttaacctaggtatcctcaaatcctcggttctttatggagcaaatgctgccggaaaatccaacttacttatggctttcagaacaatgcaacgcattgttactaattcatcatcctccaacttagttgacgaagaactacctgttacaccctttaaactttcttctcaaacaattgataaacctacggaatttgagattatcttcgtaattgaagatatccgttatcagtatggtttttccgctactgcaaaccaaattatggaagagtggttatttgcatatccaaaaggaagacctcaaaaatggtttcaaagagcatggaatgaagaaaattcggactttgactggtattttggtacatcattaacaggtgagaaacaagtttggcaaaaatctaccagaaaaaatgctcttttcttatcaacagctgtacaacttaacagcgaattattgaaaccagtattctcctggttccaaagaaaaatgaagttatctggagtatctggatggtcaaatacatattctgcaaatcgttgtacggatgagtttaaatctaaaatcttagactttctcaaggcagcagatatcggaattgacgatgtcattgtaaaaagagaaaagttcgatcctaatgatgttcctgataacatgcctgaagatttgagaaaagtagttatttccaatatgtcgaataaagagacattgaagatctcaacaattcattctgacaatgaaggcaatgctgtgagattcgaccttgaggaagagtctcatggcactcaaaaattatttgctttatctggcccttggttaaacgccttagagaatggttacattctattaatcgatgagttacatgatgcattacatccaaagttagtttcttttttagtcagtttattcaatagcgttaagttcaacagaaaaggtgctcaacttattttcaccactcatgaaacgtcgattcttaatcagaatgtatttagaagagatcaaatttggttttgtgaaaaaaatgaaaaaaatgaaacaagcatctatcccttgacggatttcagtcctagaaaaggaagagaaaatttagaagcagcatatcttgatggtcgatatggagcgctaccattcgtcagaacgtatgaggtcgactaa

SEQ ID NO: 204985 - DNA, 420 bp, Klebsiella oxytoca
atggagttttacacaccagcagaattacgtcagatcgttctgattccgttgtacagcgacccagtgcaatgcggatttcccagcccggcgcaggattatgtagagcagcgaatcgatttaaacgagttgctgattaaccaccccagcgcaacgtatttcgttaaggcggccggagatagcatgatcgagggtggcatcagtgagggagatctcctggtcgtcgatagctcgcgtaaagcagcacacggagatatcgttatcgctgcggtagatggggaatttactgtaaaaaaactacagctgagaccgaccattcagctcaactctatgaatagcgcttattccccgatcgttgtcggtagtgaagacacgctcgatgtttttggcgtagttacctacatcattaaagcagcgggctga

SEQ ID NO: 204986 - DNA, 879 bp, Klebsiella oxytoca
atggctgagtctatggtgcgtcagttccaagtaatggctttggataatgaagtcccaattatgtccttgttgcgcatggcaaaagctattgcgttcaaacttgagctgcaaaatgtatcagaatggatagaccatgaactaaacggttataacgatacaaaagttcctgagtaccgagtaattaaagggcaactaaaagccgtccatcctatgcatggtttagttgaagcccctgttgctgatagcaagcttgaaagcaaacttgcaactgtttacatcaaatcttcgatcagtgaacttgcttccatacctcctggatcaaacctttcatatcctctttcgactcagttatcgcactcccttcaatcttcacaaccagattttttacgattcagtttagtaaggatagtaggtcataataagctggtaaacattagtgagcaggtaagaaatcgcttgctttattggtcgcttgaattagagcaggaaggaatcctgggtgaggggctacagttttcccaacaggacaaaaatagggcatctatgacaactaataactttaattttaatggcacagttaataatgctggagtcctgggatccgacaaccatgattttaaacagcaaaattctcaacagataacagtaggtgattttgacgcgctgaagagtaggttagagtcttttggattttcaaaagaggatgttcaggagctaaaaagaatattggatagcgagcaagcttctgcgggcactgggagcagaatgcaaaaggtatacacttggcttggcaaagcaggtggtcgtgttcttgatgcaggcatagataaaatggcaccattagctattgaagcaattagccaatatctaggatcctaa

SEQ ID NO: 204987 - DNA, 369 bp, Klebsiella oxytoca
atgtataacgataaaatcactaagctagttgtcacattaaataaattaactgtccaaaaatcaattagctggcaggctattgatgcacatgaaaatcttacaaacggcacacaggacatactccaagtagtttttcatacgacgtattcggaaaagcactttattatttataaccgaaaatatcgccattacttcgatgaacatcaatggtcatgggctgaaggtatagttttagcaattgtcacgccaagttttaaaatactgtgggaaacatatgtgcaaacccaagctctcagggatctttacagctcagtgtcgaagcaagcttcaggcttcgacgatatcgttgatgagttgttaaatatttag

SEQ ID NO: 204988 - DNA, 561 bp, Klebsiella oxytoca
atgggacaaaaaagaatacgtaaaggagccgcagctccttgcgacaagaaacccgctttcgcgggtttttttgtatcaaccttgaagcggatctttcgtatggatattctgacttggcccctttcacaagcagtgactgatgtagcgtcactcactggaatagtcggttttttcctcactgtgaaagtattcttcacgactcgcacgctaaaagctgcactcaaacataaagtcagaatccccgaaattcaccgtgatcttcaaagccaagcatcaatgattggtgaggctattggggagtgggataagcggaaggatttcatccgaaaagcgttttctgattgcgcagtatctgctgagagtcttcttgacaaactaccttctaaggatcgagccaaaattgatatttttttggatgatgtaaaacccaaaaaattttttcgaagaaacgaaatcgttatcaatatcactgatcaagaacaggcttggaggctctatgagaagctgagtatactcaactcaagggtcaatgaactggttaaagacatgcaattggactga

SEQ ID NO: 204989 - DNA, 798 bp, Klebsiella oxytoca
atgcaaaagactcaagagcagttactcgagcattttgatgaagatattcacgatgtgctaaagatcaggcttgatgaaacacaagagcgcttagataaggttggtcgctggttttgggcggtgacacattaccaacttaaacattgtgccaattttgatcatgagcatcaccgtttcacattgctcgaaccagtcaatggattaccagtaggacagtaccaattactacgcaaaagtgttaaccaaaaaagtgagttacagaggcaagagcatcatagttttgcgtatcgcatcaaccatcctctcggtgagtatgtgatcgataacgccaaaaggctagatacggagaaggcagaagttatcttcaattacagtgaccatgcaacgaaagttttcgttgctgagcaactaaaaggacaggcgggttggttgacgctgaacttgcttactgtggatgcgtttaacacacagcagtttttaatctttacggcaaagaccgatcgcgggcaaataatagacggtgaagcatgcaagcggttgtttcagcttgctgcaacaccagtcgatagtgaaaatatgtctgcagaggcgaacacattgcccgatgacctgcacttactcaaaaacagacaaatcgatgcccaacttgctgaagtcatggagcagaacaatgccctctttgaactagaaagagataagctggaaaaatggactgaatttttttttcaaagtctacgccgttttcaatgctgcccaatacactgtctgatgccccaaacacaccatcgaaaagattga

SEQ ID NO: 204990 - DNA, 1860 bp, Klebsiella oxytoca
atgattggtacaactccctaccatgctaaatattttgcgcatgagctttctatcctccattcaaacaatggcgtggatcgtctttctcagtcattgtttgatgccagcgttgatctcaaccctcaccaaattgaggcggcgttatttgctatagagaatcctttaagtaaaggcgtggtacttgccgatgaagtcggcttgggtaaaaccatcgaagcgggattagtactttgccagtactgggcagaaaggaagcgaaaactactgatcatctgcccagcatctttacgtcgccagtgggcaagtgaactaattgagaaattcaacttaccttcacaggtattggatgcaaagactttcagccagctgcaaaaaggaggtgtctataaccctctaaataacaaatcgataacaataatgtccttccactatgcagccaggttagaagagaagctggtagcagaaatgtgggatctagtggtaattgacgaagctcataaactccggaatgcacaccgcgacagtaacaagatgggacaagcattaaaacgcgcgcttgatggccggaaaaaattgttattaacggcaacacctttgcaaaattcgctaattgaactgtacggcatatcgacacttattgatgagcatactttcggcgacccaaaggccttcagaaagcaatatatgcagacagacagtgatatggtggagctgaaagggagactgtcgcactttatcaaacgaacattacgtaagaatgtactcgagtacgtcaagtacacggagcgtaaagctatcacaattccattctatccaagtgaacaagagcatgaactctatgaacgtgttcaaaatctgctggaacgtgaggatagctacgcgctacctaagcgacacaggcatctaacagggcttattctcagaaaactgctttcgtcgagtacgaaagcagttttgaataatttacagatacttaagattcgtcttgagaaactaaagcagaaaggcatcgttgaagatgagctagatatcattcagcagattattattgatgatgatcttgaagatgacatcgttgaagatgacgaaacattaagcgctgatacagagcacaaaacaatcgatctaactgtacttcaggctgaaatcaatgagcttgagactctcatcttcaaagctgaacaaattggtattgatactaaaacaaaggagttactccttggcctggagcaaggttttgcgcagcttgcagaaatgggggcagcaaaaaaagtcatcatctttacagaatcgatgagaactcagcaatatcttgctcacttcttagaaaatcatggttatctgggtagagtggttacttttagtggtaccaacaacacgccgcagacaaacaaaatttatcagcaatggcttgaagaatatcgtggttcttctcgcattacaggatcggcgcagattgataaacgttcggcattgattgaccatttcaaagatcatgctgaaattatgatcgctactgaagcagcagcggaaggggttaacctgcaattctgctcgttgctgattaattacgatttgccatggaaccctcaacgcattgaacaaagaattggtcgttgtcatcgttacgggcaagagtttgatgtggtggttattaacttccttaaccaaagaaatcaagcagatcaacgtgtcttggaattgttgactgagaaattcaatcttttcgatggtgtgtttggggcatcagacagtgtattgggcagcattgaaaacggcgtagactttgaaaaaaaaattcagtccatttttccagcttatctctttctagttcaaagagggcattgttctgctccatga

SEQ ID NO: 204991 - DNA, 126 bp, Klebsiella oxytoca
atgcaaaagttgatacgtgataatccggtcaatatctccttgcaattgaagtggttttactttttcttcaacgctaagattgccttcaagttaagtaatgctgcacaagcctgccgggaagactag

SEQ ID NO: 204992 - DNA, 666 bp, Klebsiella oxytoca
atgaatactgctgaggacttcaaccggctttatgccgacgtagggcgtaacattgagcaaacattagctgatattgcagggcttcatgttgaaaacgaagatggcaaaaagcagcttaatgcgatggcggcgcaactacagattctgcaggatactttcaatcagaaattggcttatctacagcaacatgccgaatgggacaagtttacccttgctttttttggcgaaactaacgctggaaaaagtaccattattgagtctttgagaatcttgttcgatgaaaccacccgccgacagctgctacaaaataatcaaaatgatctgcataaggcggagcaagagttgcgcgaaaacttaacgcagttacgaaaggactttggacgggtctacggcgatgtggtcgataaaattagcagcatcagcttttccgccatgcgactgcagcaaattatcgccaatgaaagcgccttacggttaaaaatggaagaagaggcgagtaaagcgcgcctgcttatcgaacaaaacgaaagccagtctcgtctgcaaattttgcagcggcaaacgcacgtaaaagcgcgtttaacgttattggcgatcgccattgtcagtttgtttgtaggggctggtggcgcggtggtgttgcttaatcagttggcggggcactaa

SEQ ID NO: 204993 - DNA, 1704 bp, Klebsiella oxytoca
atgagcagcacactgtctctagcagagaatgacccagaacggttggccgaggtgtgcaaaccggctatcgatattcagcacttgctggatcaaagcttgtcgcgtcttactcaatctgtcatccgaacggaaaaattaaaaaatacgtcaaagcgcgtcgacggtttaatcattggcactggtgagtcggattttaccaaaggcaacacccactatgacttacatatcgatgataaaatcttccagctgatcgatgtgccaggcattgaaggtaatgagtcccactacgtacatttagttaaagaagccattgcgcaagcgcatctggtggtttacgtcaacggtaccaataaaaaacccgaaacgacgactgccaagaagatcaaatcctatctggaatatggtactcaggtttatccgctgatcaacgcgcgcggttatgctgatgactatgagtttgaggaagatcgtgaggatctttgccgtcagagcggcgctgataatacgcttcgccagaccgttgatgttctggctccggtattaggggcggaggtactgctggaggggcattgcgtgcagggaatgctggcattttcagcgttggcgtatgacgacagcacgcaaagtacgaccattcatccctcccgggagcataatctggcggtatcgcagcaggagtacttttcggtgttcccagaccctctggaaatgcgggcatttagccaaattgatgccgtagcccggacaatcagaaataaggttgccaccttccgggaggatattgtcgaaagcaataaaggcaaagtccgtgagatgctggggcaatacttacaggtgctggaaacacagttagccggacaccgtaccttcctgaaaggtgcagagccagagtttgataagtgccgtgccgcgttccggaatgcgattgctgagtttgaacggcgtattgtgaataaccgccgcaaccgctggaataccttttttaacgggttgaacgaggccagtgacgctatcgtcgaagacgatttcggcgatagcgacgcgatttcgcaacggattcagcgcgagtttaaaacgcgacgcaccggtgttgaagcagacatgctgaaggatacggaacaggctgtggaggtattgcagcagcagatgctgcatgcggtggaacgtctgctggaagatatcaagcatgtggaatttcaacaacgggtcggttttacgcgtagcggcggtctcgattttggcaaggatatggtgttggggtacgacctggggttaggcgattttggctcaatggccttcaaaattggcagctatgcgatgacgggcggcacaattggtagcgcatttccaattgttggaacggcgattggtgccattgctggtgcgctggtcggcgtggtgatgacggtgatcggcttttttaccagcaaagcatcaaaaattcgcaaagcgcagggaaacgttcgtgacaagttggatggcgcaagggagaaggctctggaaggcgttgcagatgaagccagcaagctggtggcggccataaataaggaacttgagattggcctactgaagaaagtgaacgacatgcagagtgccttacagcagccaattaccatttttgaaacgcaaatcacccgaatcactcgattaaaaaaccaattagagaaaatgccttatggaacaattcaagcagttcagtattga

SEQ ID NO: 204994 - DNA, 1731 bp, Klebsiella oxytoca
atggaacaattcaagcagttcagtattgagaaacaggcggccattgattcgctgttacaattgcgcggtatgttagaggcgctgggtgaaatggagatagatattggtgatgatctacaaaaaatatcctccgccattaccgccgttgaatctgatgtgctgcgtatagcgttgcttggagcgttttcagacgggaaaacgagtgttatcgccgcctggttgggtaaggttatggaggatatgaacatctccatggatgagtcctccgatcgattaagcgtttacaaaccggaaggactgccgggtcaatgtgaaattgttgatacgccgggactgtttggtgataaagagcgcgaactcgatggtaagcaggtgatgtatgaagatcttaccaaacgctatatttctgaagcgcacctgattttttacgtggtggatgccaccaacccgctcaaagagagccacagcgacatcgttaaatgggttttacgtgacctgaataaactttcttcaaccatctttgtgattaacaaaatggatgaagtggctaacctgacgaaccaggtattgtttgaagagcaggcggcgattaaaaaagagaatctgaaaggcaaattacagcgcgccgcaaacctcaacacggcggaatgcgaacggttgaagatagtctgcattgcctctaacccaaatggtcgtggcctgccgttctggttcggcaaacctgaacattacgaaagccgctcgcgcattaacgacctcaaaaaaactgctgctgaaattctgaaagccaatgtccccgaagtgctgttggcgaaaaccggcatggacgtggtgaaggatattgtcaatcaacgcgttacgcaggctcatttacagctcagtgaactgaacgcttttgttgaaaaaaacgaagaggatacgcgccgcttttgtcacgatattaggcagagtcgtaccgaggttaaacggctggccggtgagctatttgaagagctgaacctgatggaaaaacagctcatgggccagctgcgaccactcagcctggaagatatccgcccgtttatggatgatgagttgggatatacggaagagggggttggttttaaacttcacctgcgcattaagatgtctgtcgatcgctttttcgatcagtcaacgatcgtcacgcagcgcttatcggatgacattacgcgtcagctgaattccagcgaaagctttttaagcggcctgagtgaaggtgcatttcgttctctgggcggagcctttaagggcgtgtcaaaaattaacccggtaacacttaaaacaaccatttttgctgcacgcgacacgattggcaaattaaccggctatgtttataaatttaagccctggcaggcaacaaaactggccggaagtattactaaatgggctggcccggcgggagcagcgtttacgataggctccgatctatgggatgcctataaagctcacgagcgggagcgggagttggaagaagtgaaagcctcgttagcaaaaatcattaaagagccctttaaagaaatctatgatgtgctgagttcagatgaaaaaatgttcgctttttttgcgccacagattcaaaacctggaacaggtagtcactgagctgaccgcgaaaagccaggttatccgtgataaccagcaaaaactgacgattatccagtcaaagcttgcccagctaacctcactcgcgtcggaatccccgtcagtttga

SEQ ID NO: 204995 - DNA, 1230 bp, Klebsiella oxytoca
atggtatccgcgctaggttggcttgatcacgattcagacgcacggactaaaacgttaaatattcttgcgctctttcaacaaaaagagagccgtgatgaattaggtattggctcgatccgagatagttttgctgaacagttatttccaggaaccagcaccatccagacccgtttacgctacatgctttttattccatggatctaccaacacctcgagaataaacgcatacccgccgcaaactttggtactcaggccgaccgtgaggaacgcgccttaattatcactctctcccggctcgaagaagattcggccggtacatttggtaaaaactcccgcgagaagcttaaacgcctgcccagctccgtttactggtctgggctgcggcgctggggtattcgcgagactctgtggtcgcaggaggaatatcatcggcgtgtggatgaactgtatcgcgcgcgcacggaaatcagcgagcgagaatactatgaaaaaaatcggtgtgatatgggcgacacaagcgcgtataaaccagcccagggctggcactccagcctgcctgtgccaccgtccaactttcctgatgaggcaacattcgccctaacacggcaggaagccagttttcttcgcgaccgtattcaatcgtcatgcaaaggcagcctgctggcatggttaaccctgcatagcgaaccagcagacgtaagcgcaccatgggaacacccggattacgcgaaattcccggacgctctccaggaactgctgacccacgcgcggtttttttcttatacgatgcacggcgcagcattgttatataactatttgcttgccaaagaacgagcagataacgaccttctgtctcaacaccgtgacaatttcgtcgcctggtttgccgaaccggttcgcgagaagatcgctacctggccactcgaccgcatgtgggaacttactgccgggcctggctatagcattagcctgaaaactcgccgctttgtggagcagtggattgccttgatccgacaatcatctgggacattactcaccagtaaagaagcttgtgcacttatccgtacccgcgaaatagccctcaaaggtccgcgttcgcgctttaaaaacagacgtgcactggagcaatggagtggatatgccggaacgctgcggctggtctatcgctggcataacgtccagataatacttaacgatctggcgcacggtctcaggagagaagaatgctaa

SEQ ID NO: 204996 - DNA, 1797 bp, Klebsiella oxytoca
atgctaaaccccaacaatcgcagtttatatacttcggcattgaactctccgccctgtatggtgtttgacgaagccatcgcaaccagcttttcactcgacccggcatttttattgcaggcaccggtctatttggctttcacagcaactgacagcaatcgcgctcaggatccgctatccatttttgaagccattcgtcgttattccgaacgtatcacggtatacgttcaaaaaggccgtattcaagttcccgcacggctcaagcctaaccccttgctcggtttgcttgaagatatgattgttgaatcaaaagccaaaggccgcggggtctttcaccccaaaatctgggcgattcgttttatcaatcctgaaacagacgaagttatgtaccggttggtagtactgagccgaaatttaacaactgattcgtcctgggatctctctttgcagttggacggctaccctgtaaaacgtaagcaaagtgctaataaagcactggtgcatttattctccgtattgcccaaacgggcagcgggaaaaatggcgaaacatcgccggaatcaggcgcagcggttcgcagatgaactgttgcatgttgaatgggaatgtcccgctggttttgataaagtcgcgtttttcctgcccggagaaggttacgactggaagcctcccgaagcggatcgtgcggtggttatatcaccgttttgcaccgatgaggccctgcgccacatcgtggaacattgccaacaagctgatgccctgatttcacgtcctgacaccctgctcgccttgagtaaaaagacgctcaaccttttcacgcgccagcttcatcttgacgacgcagcagaagggcagatgcacgacgagagctcacctgatgaaatcattgcctccggtctgcatgccaaagcatatctgtttgaaaatggccgagacagcgaactggttctgggctcagcgaacgccaccagcgcggcgctactggggaaaacaaactgcgaaattttagtctcgctcaagggtaagaaaaagcacacgggcactattgatgacctccttagcagcgacgggatgggaagctatctgcaagatttcgaccctgcccagctgtttgagcccgatgccctgcgtatcgaagcagaatgccatcttgaacaggcgcgtacgttgcttgctgaagctgcattgagtcttcatggtcaccccggtcaaaacgaccaaagctgggcattgtggcttattggcgagattcctaagttaccgggagttgttcaggcaacagcatggcccataacggtatcagaagcgttgagctgcaatctacaggacccgaataaggagaataaaagagaactcggagagttttcagtccaggcaattaccggactgacagcgttttcccttaaaacatcgcacccggacgtatcgctcagatttgttctcaatctgccaattgatgccttaccccccgatcgcaacgcaataattttacaaagctgcatgcggaatcaggattttctacgttacttattgatgttgataggtgaaacggggcatcaatccttctttgccgaaaatgccttcggtgatggtcatttcttgacagggctagccagtggagaggaattcagcgttctggaagagctgacacgtatctatagccgcgaacccgagcgtttaaacgatatcgccgcgctggtggaaaatatgagagaagggaagaatgacatgattccgcaagattttcttgctctgtgggacgtatttgaatcagccatgggaggacgatatggccgataa

SEQ ID NO: 204997 - DNA, 3150 bp, Klebsiella oxytoca
atggccgataagcatcccagtattattgccccactcacgggcttgaaagatttccagcaacgcaccgtaaattatgttttccagcaattttacggtgataaaccgcaaaatcgctttctggtagccgatgaggtggggttgggcaaaacaatggttgcccggggcatcatcgccaaagttatcgaacatttgcaagataacgtcgatcgtatcgacatcatttatatctgctcaaatgcggctattgcggcacagaatatcaaacgcctgaatgtcagtaatgaggcgcaattttcacactcaacgcgcctgacgtttctgccaaagcaggtgcggtctctgcgccaaaacagaataaattttatcagcctgacaccaaacactgctctcgatcacactagaagccgtggaggtcacaaagaagaacgcgcgatcttatatcgcattttgtacgatttaccgttggcaaaaggcatgcgccgtgaacgtttacgcaagggaatgcttaacctgctacaggcagcagcaggcttttctggctggcattccacagtagaccggctatctgttgatgacattgacacggaactggcaaaagattttcgtcgcaaggttctggacgataccgaactgtacgctcaactcaaagaaggttgtgaatgctttgccgatgatgacgaggacagcgaaattcacgattctgaactgcgctacacactaatcggaaaactcagaagtaaactggcttcggtatgtttgtcagcgctggagcccgatctggttatccttgacgaatttcagcggtttaaagctttacttgatggtgacgatgaagccgcactgctggcaaaagcactctttgaacagccggacgtacgcgtgctattactctccgcgactccgtataaaatgttcactctcgatcaggaaagcgaaggggataatcactacgcggactttattcgcacattgcagtttttgtacaacgatagcagtcaaatcaagggtattcagcagcacttactcgatcaccgtactgcattgcacgctttcacaaatgccgcagaaacgaaaaaagcactggaacacgctttattacaggtcatgtgccgtaccgaacgggtaacgatgacgcaaaagcttgatgcgatgactaaagaagttgcacaaccggcaatgattacgctctccgaccttcatcacgttgccgccgttgatgctatcgcaatggaggtacaagctcgcgatatcatcgaatactggaaatcaatgccttaccttctcaattttctaaagcattacgagctacgtactcttattgacaaagcactggaatacccttccgatacattgcgtaaactcgtcaaatcaataaagccgcagttactgtcgaaggcaaaattagagcgctacaaaccccttgatgccgcaaatccccgcatgcgaatgctgtttgaagacacgctggataaagacatgtggcaacttttatggatgccaccttctctgccttacattacgcctggtggagtctatgccaacaaaggcagcttgacaaaaacgctggtattttccgcttggaatgcggtacctaatgcgattgccactgtttgttcttatgaggcagaacgacggatgattggtactgatccccagattctacatagtcagttcaaaaagaaagtaaaaccgctgctcaattttgcaaaatcatcaaaagatggtcgtctctccgggatgcctgttattgcctggatgttgccatcaccgatactcgcccgccatattgatccgcttgaaattgctctccagcatgccagcgagccgttgagtgtaaaggccgtaagggcgattgcaacggctaaatgtgaagcactgcttgaaactctggataatggtgagccgggtacgcgtgtggacgagcgctggtattgggcagcaccggcattactggatgctcgtaccgaaacgccagactggtggcagggcgaacattactggtacatagggtcaacgaaaaatgagagtgccgaaaactttcaggaacatatcgacctttttatccaaatggcaaatggcgagatctccctcggcccacgccctgatgacctggctgaagtgctctgtgacttagctcttgctagccctggtacgtgcgccctacgggcgctcaatcgcatcgacaatggcctggcaaccgattcagcagagatgttatccggggcagcacagatcgcttctggatttcgctcactctacaacctggcggagagtatttcgctactacgcggcactggcgatgacacttactggcggctaacgctgcgctatggcatcgatggcaatatacaggccatgctggatgagtatgttcatacactgttagagtcgatgggattacaacatgaatccgctgaagcgcagttagcggctattgcatcacgcattcaggccgtggtttcgctgcgtaccacgcaactgaatattgatgagttcaaaacgaaagggggcaattattcctggggcgatttgcacacacgatgtcgctttgctttacgctacggccagcagagggacgacacaaatcaagccgtcgcacatgcggagtcggtgaaagatgcgtttaactctcccttccacccctttatattggcctccacctcaatcgggcaagaaggactcgattttcatacctggtgccacgcggtgatgcactggaatctaccgtcaaacccggtcgatatggagcaacgtgaagggcgggtgcatcgttataagggccatgcagtaaggaagaatattgctgagcattatggtttgcgtgcacttcattcgttggcagaaagctcagatccatggacacagctcttcgcacttgcggcaagtcaccgtaaagcaggacaatcggagctggttccctactggatttttgaagaggggacatcttgcgttgagcgccgggttcctatattgccgtacagcaaagagagcattaagtttaagcggcttaaacgagaactagcactctatcgtattgtcttcggccagccgcgccaggaagatttattgtttggcctgaaacaaagtggtaatgagtctttaactgatttgtcggagtggcttatttctcttgaaccgccaaagatataa

SEQ ID NO: 204998 - DNA, 129 bp, Klebsiella oxytoca
atgactatacccataaccatagtaactactggcttttttcactacaccattcaaaatacaacctttaactacaattccagtattctcaaatctcttaacacttacttctatctcttttacagtatttag

SEQ ID NO: 204999 - DNA, 276 bp, Klebsiella oxytoca
atgaataattcaatcagagttccggaagataaagattttgtatgtgcgtttgtaacttcaccggatagtttttatgaggctattgaaagttatcgtaattatgtggatccagtcggagagatagagtttcatcgtgtccttatctttatgctgtatgctatacttgaagtaggtggcgctgaggtttccattaatgatgaagtgcagaaatgtattgagcacattattaatgaaaaaaatattatcagaaaaaataatgcatgtaataattcgtga

SEQ ID NO: 205000 - DNA, 993 bp, Klebsiella oxytoca
atggacttagttacgtcattattacaaagggggttattagaaagggcattagaccttaccatttctgaatcattcttcaattcaagatcacctgatgatataaagcatgctttaaaagctgggtatgatattaatgctgttaacagtaacggcaacaatgccatttttggctgtagaacccttgaagcactggattttctgctcagccatgaaattaatgcacaccatattaacgagcagggacaaaatgctgtcttccatcaaaaaaatccagaaatactaaagaagctgattgaactaggtttagacacctcgcatacagatgctaaaggctatacctgtatttttgaacattacagggatgctgaaggactacaagtattacttaatgcaggttgtgacataaatcatgtcgataacagaggaagaaatattctcttccttcccctctcccctgatgttttatccatagcaatagatgccggatgcaatgtcaaccatattaatcatgcaggaaaagggttcatcgaagaagagtatgatgatgaactacacaagatcattctccgccatattgataaattcgaaagaagaacgttgcatgtcgatttttgcaataccaactcagtattatttttatatgaactctctaaatatggattcaaaatagagctcaataaagaccgtttcgtaattaacagttacattagcgattacaaagctattttaagcactcttgattgtattagtgacattcaagatgttaatttctataattatggcggtgatcctctttacaaagatatcgatgagcgaattgtaaagtggatgataagaaataatttcctcattgatcttccaaaaatttctgatgataaaaatcatgatcatatattaaaatacaaaatcagttacgagcaaaaagaattatccaggaatttaaaacatgctaaaaataaaattgcaaaagtcaaaaacggtggtaggctgtga

SEQ ID NO: 205001 - DNA, 1128 bp, Klebsiella oxytoca
atgtacgatccaaaattaattgacgcatatcaagcatctgttaatgattattttaataagatattcggcgatacggaaatatatttcaaagatcaaaaggatagggttatttggacagaaaataaacttggaaaggattttgatattgagtttctgaaaaaaaatggtgatggtgtagtagatgctaacataccgtctacttatagcagtgtaggtcatggaacaatcagaacggcaatctttaccttactattaatgcgggatgttgctgagaggtttgagagaaaacaagggcgtaaagattacatggtcctttttgaagagcctgaactgtttctttatccaaggatagttaaggaacttcgtgatcttatttatcaagttagtgttgaagatcttccttatcaagtgctttgtgcatcacattcatcttctatgatagacctttcaaaacctaaatcttctataatacgcctagtaaataacagagaggggaccaaaacataccaaataaatgaccagtttttgaaggatgcgaaggggatagtaaccaacgatgagctcaagcaggaaatgtatgaagtattgagatttaatccttatatatgtgaatcattttatgcagatgaggttcttttgattgaaggcccaacggaggagataatatctagagcatactttcaggagttcccttctcaaaaaacagtattcgttctcaattgtggtactgtaactaacatccccttctatcaaaaaattttctcacgtttcaatattaaatatcatgtgatttgtgatactgacaaagcttcaatcctaagtattgatgagaatggtaacccatgctttgattctgggatacaaaaaaccatatcagaccagcattcttctgataaaaaacaaaataataagaatgttggtttgcttagaactcattccatcactttcgaaccagcacatcaaagcacagatatccctgatttcttgagatttgtcgatagtggtgataaaagtaagccgtttaatgcaaacctatattggaaggatattctaaagcctaatatcactcatcaagatataaataaagttcccgtcattagacgtggttttataattgttagtgactag

SEQ ID NO: 205002 - DNA, 2829 bp, Klebsiella oxytoca
ttgttattacatgtaaatattttacagtacctacattactatcagaatggtaatactcatcattatcctgataaaatcatcctgcttacgccagacgaacgtctttcacaacaacacttggatgagttgtataattctggcttttcccacattcagttgtttgataagaacaaatcagctccgtttaaaggcaccgttgaagttattgatatcaataaacttgctgatgacatgggtgataaaactgtcgctgttgaggcatttgaaggcaacaatctggttctaattgatgaaggtcataaaggaacagggactgctgctggtgcctggatgcgtcgtcgcgacaaattaacacgagacggttttgcattcgaatactcggctacttttgggcaagcagtatctggcggaaacaatgttgaagctgtcgaagccgaaatcaaaaagaaaaaagcaaaattactctttgagacaactgcattaggaaaactgactgctgagcagttagaaaaattagagctgacctcagaggaattacgtgatgcacgtattcaggctacaagagaagtttatggtaaatcaattcttttcgactattcctataaattcttctatgaagatggctatggaaaagagtctctaattcttaaccttaaccccaatgaagataaaaaagatgagcgtcgctacgaatacttcactgcttgtttactcagtttttaccagcaacaatatttattcaataggaataaagataagttagatgagttcaacattgaaaaaccattgtgggtctttgttggcaacacagtcagtggtgaagattcggatattcacgcagtactacgttttttagcatggtttttaaacaacgaaatacaagcaaaatcatggattaaggatcttgtcgaaaacaaagccagaattctggatactaaagaacgtaacatctttgaaaagcgtttcactgctttaatgaatggaccggaagatatctatttagatatccttgctcgactgtttaataccacacattcaggtcagagattaagagtattaaatttgatcggaagtaaaggtgaacttgcattacaggtcggtgaagcagaaccttttggcttgatcaatattggcgattcaccctctctttataaaatgtgcgaggaagatacgacgttcgattatcaaagagacgattttgccaagtctctattccatacgttgaacgataaagattcccaactgcatatcttaattgggtcccgaaaatttactgagggctggagcagttggcgtgtatcaactatgggtctactcaatatggggcgtggggaaggctcacagattattcagctttttggccgcggggtacgcctgaaaggtcgctactattctttgaaaagaagcacacctggagaacgtcctaaaggactgcatctggagaaattagaaacactaaatattttcggtgttcgtgctgactatatggcaacatttaaacaatatctcgaagacgaaggaataacgccaagtgatgagatccttgagctgaattttgaaactcggccaaatatgcctaatacaaagcttaaaacgcttaagcttaaagatggctacaaggataatcaaaaaaatggcttcaagcgtgtttactttcctgagctttatgaggttcctgctgaactgcaaggcaagataaagcatccacacatcaaacttgatttatatcctaaacttgagtcgattgacacaagcaggaagggtgacaatacgcctgttaatgtcagaaacgaggttaaacttgattataaagtaatcagcgcgtttgattttgatcgtctttatctcgctattcaggcctataaactacagcgtggatggtcaaatttacgtctggataaacaacggttgatcgatttttgccttggaaaggcgaatatcgcaaataattggtacacgctttcgattccggcatcggagctcgaaattgagcagtattccgatattgctaagcaagaagatattatgcttcgccttctgactgattataccgaccgcttttataatgcattaaagaatgcttatgaagggcaattttatgaaataactcaagtcaatgaagacgacccatgcatgatcaaaatgtatcactttgaaattgaagagtctgatgacggtctggattatacagagcgacttgaacaactacagcagatcgtcgctcaaggtgaaattggtaaagctaaatcctggaatgctcccggtatgattgctgtaaccttcgacaagcatctatattatcctcttctctctattgagaaaaatgctgatttaccgttaaaaatgcgtccaacagcatttgatgcaccgagcgaaattaccttcattaaggatttacaagaattcattgaaacaccaaaaggtcaaaaaaccatcggcaataggagcttatacttgttgcgcaatgctgattccaaagccaaaggcttaggtttcgctactgcgggtaacttctatcctgactttttattgtggctagttgatgatgaaagtgggaagcaatggttaagcctgattgatccaaaaggtattcgaaatctgaatcttgacgatgctaaatttggcttatacaaggaaataaaagagcttgagaagaaattatctgatgataaattaagcctaagtgcgtttattgtttctgaaactcgtttcgttgatttaataaatgtatccgaacctaaagataaaattgaagaacgtaacgtactctttctagaggatactggttctatttatctggagaagcttttcaaaaagatggttgcttaa

SEQ ID NO: 205003 - DNA, 186 bp, Klebsiella oxytoca; identical to SEQ ID NO: 10399

SEQ ID NO: 205004 - DNA, 192 bp, Klebsiella oxytoca; identical to SEQ ID NO: 10400

SEQ ID NO: 205005 - DNA, 234 bp, Klebsiella oxytoca
atgtttatcaatttcattaaaatcattactttgtgcgatacgatagaatgctgtgtcgtaattttttgtttgccccaacacaactacatccttagcatattgcttgaaaaaagcaactgtattttctatgttatttgcaatttgcgaatgggaaaaatacttctcaccatcaatccagttagcagatataatcacggtatcaatcttatattctttaatgtattgcttatatag

SEQ ID NO: 205006 - DNA, 213 bp, Klebsiella oxytoca
atgagtgaatttaactacatagccactaacattcttcaaatctttgatatttaccagtctgcaatctggttcaggcctgtcaacaagagttttaaggtcggcaaaatcactaccagcaatgaatgtagaaaggcagctattatcattcgtttcagccaagtaactataggcatgaaactctgtgattcgctgaaattcaccttgggcaattaa

SEQ ID NO: 205007 - DNA, 255 bp, Klebsiella oxytoca
atgggaaatttaagcccagctcatctaaataagctttaccacttttcccgtcacttaagacagatgtcaattgcttttgagcatcagaacgcagatatactattttttgaggctgagttttctcatctgaaccaaatacaattagtttatcgtttaagagttgatgcattgtttcaggtgatcttgaccaaccatttggaggcacagggcattccttacctgtttcagggtggatcaaaggaatataatatttag

SEQ ID NO: 205008 - DNA, 465 bp, Klebsiella oxytoca
atgttctctcaagaaattaaaaactcgcttcttaatgtcgataattttatcaagccatttaactatgaaatggatatctcaacagattccgcaggtgcaactgagcgtaaaaaaatcgatttagtagaaaccttcaattatcttattggcttacatgttaaatctattgaattcaacattgatcgtggctatgccagaatagaaggaacattacccacaggagaacgtacgctaatcctgtggcgcgactgcgataaaatcggttatgaagagttgaataaatacgctaaccgttttgatttatatgctaaagagaaaacgtttgatgttatttatatcaatggcgatcataacctaccaactgcatttacagtcgatgaagaagacggtgaaatcgtccgtagtttgaaaattcgccagatcgaacctgagttcctaaacttaatgtttgctgaggaggtttaa

SEQ ID NO: 205009 - DNA, 612 bp, Klebsiella oxytoca
atgagaatactattaactggttcaaatggccaattaggtcattgtttcatggataggatccctgaagattggcaagtgatagcaactgatactaaagagcttgatattacaaatttttcgaacgtttcaaaatttgttgatgaggtaagaccagatgtcatagtaaatgctgcagcatatacagcagtagataaagctgagacagaaaaagagatcgctaaacttgttaacgttgatgggcctaaaaatttagctgcggctgctaaaaaaaacggagcagttttaattcatgtatctactgattatgtttttgatggccagcaaaaagaaccttatatagaaaatgatttaacaaatccactaagtgtttacggcagaacgaaacttgagggagagaaagttgttttcgaacaaaacgaaaactctattatagtacgtactgcatgggtttatagtgagtatggcaacaacttcgttaaaacaatggtccgtttagcatcagagcgcgatgaaattaaagttgttgatgatcagtatggcagtcctacatatgcaggtgatattgctgtctcttatacacatctgacgctgccgacgactccttacgtgtag

SEQ ID NO: 205010 - DNA, 1182 bp, Klebsiella oxytoca
atgaccgtaaaccagccagctgcactgctacgccgcctcaacccgttctgcgcccgcgcgctggactccgccgcatcgctgtgccagacccgcgctcacgccgagattactattgagcactggttattgaagctgctggaacagggagaaggggatatcaccgtcattgcccggcgctatgagtgggatatggagattctctggcaagcgttgctggggcatcttgaaacgcttccacgctcggtacgtgagcgtccgcagctttctaaacgcctgacggcgctgatgacgcaggcatggttgttcgcttcgctggagagcaacgagccgcagatccgtagtcagcacttgctgatggcgctgacggagaagtccgaactgctggcttgcgacgatctgtgggtgttgttgagcgtgggtcgcgtccagttagggcggctgcgcgcgctactggacgagcagtcggaagagtgtccggtgcggcaaaggcaggcaggcgaaccgctggtggaagatataagtacaaattcttctgcgcttgcggcggatgatagacaagatgatgcgcatcgagctgtccttaaacgtttcacttcgaatattacagaaaaggcccggatgggccagatcgatccggtgtttggccgcgatgttgagatccgccagatggtggatattctgtcgcgccgtcgcaagaacaatccgctgcttgtgggcgagcctggcgtcggcaaaaccgcgctggtggaagggctggcgctgcgtattgtagatggcaacgtgccggatagcctgaaaatcgtgcatattcactcgctggatctggggctgctacaggcaggggctggcgttaagggggaattcgagcagcggctaaaaaacgtcatcgacgcggtgcaggcatcgccggagccggtgctgctgtttatcgatgaagcccatactatcatcggcgcgggaaatcctgcgggcggcgcagatgcggctaatttactgaaacctgctttggcccgcggtgagctacgcactatcgcagcgacgacctggagcgagtacaaacaatattttgagcgcgatgccgctctggaccgccgttttcaattggtcaaagtggatgagcctgatgacgacacggcctgcctgatgctacgcggagcaccatggggtgcacatccaggatag

SEQ ID NO: 205011 - DNA, 957 bp, Klebsiella oxytoca
gtgattcggattccgacagcgattccgattcagacagcgattcggattctgacagtgattcggattctgacagcgactcggattccgacagcgattccgattccgacagcgattcggactctgacagcgattccgactccgacagtgactcggattcagacagtgactcggattccgacagcgattcggattctgacagtgactcggactccgacagcgactcggatagcgacagcgattccgattctgacagtgactcggattccgacagcgactcggattccgacagcgactcggattccgacagcgactcggactctgacagcgactcggatgctgacagcgattctgattcggacagcgactcggattcggacagcgattcggattctgacagcgactcggatagcgacagcgattccgacagtgactcggactctgacagtgattcggattccgacagcgattcggattcggacagtgactcggattcggacagcgattcggattccgacagcgattcggactcggacagcgactcggattcggacagcgactcggactctgacagtgactcggattccgacagcgactccgattccgacagcgattccgactccgacagtgactcggattcggacagcgattccgattctgacagtgactcggactctgacagcgactccgactccgacagtgactcggattctgacagcgactcggattctgacagcgactcggactccgacagcgattcggattccgacagcgactcggactctgacagtgactcggattctgacagcgactcggatagcgacagcgactcggattctgacagcgactcggattctgacagcgactcggactctgacagcgattctgactctgacagcgatattgaggccaaccccgatagcaacagcccggatgttgtcgcgctggaaggtaacctga

SEQ ID NO: 205012 - DNA, 288 bp, Klebsiella oxytoca; identical to SEQ ID NO: 195196

SEQ ID NO: 205013 - DNA, 237 bp, Klebsiella oxytoca
atgagacttattgttaaaaacaccttggttagcacaacacttgcactgtcagattttataggttttattatttctccctatattgctatgctttttttgtcactgatattaagtaattatcaagagattgtgtctccgcgagatattgaaagttggctgggactacattggttgctgcgttattgcattatctataattcggacgttacctatcgcactagatttggcaatacttaa

SEQ ID NO: 205014 - DNA, 222 bp, Klebsiella oxytoca
atgctgttacccagcggcgaaacagttctggctcaggaacgcttttttattgtgcatattaacgatgaagagatcagcaccgaagcctggagcgatcatgaacggctcgttatcaatgactatcactggtggacgcctgacgagctggaaaaaacaactgacgttatttttcctgaaaatatatccgcgatcctctccgaatctgaaaagacctgccgctaa

SEQ ID NO: 205015 - DNA, 528 bp, Klebsiella oxytoca
atgtgtggacgctttgctcaatcacaaacgcgagaagaatacctaacttatctttctgaagaagctgaacggaatttcgccttttaccctgaaccgatcaggtgctacaacgtcgcgccaggtacacgcgtactgctgctgagcgagcgcaatgaagaactgcaactcgctccggtccactggggatacgcgcccgagtggtgggataaacctgcacttataaatgctcgtgtagaaactgcggcaacaagccgaatgtttaagcccctctggcaacatgggcgtgcgatttgttttgctgatggctggtttgagtggaagcgtgaaggtgacaagaaacagccctacttcatccacaggaaagacggcaagcccatcttcatagcggcgatcggtagtgtacctttcgaacgcggggatgaagctgagggatttttgatagtgacgactgctgccgatcttggtttggcagaaattcagaccgtcggccactcgcccttgttccggaagcagcgagggaatggatga

SEQ ID NO: 205016 - DNA, 147 bp, Klebsiella oxytoca
atgagacaggatgtagggggaaaggaagccagcgagattgcctccgacggctcggtttcagcggaccattttacctggcatcttgtttctcacgccgtcggcaacgtgaagaatcagggggcggaattaatagaaaggttaatataa

SEQ ID NO: 205017 - DNA, 726 bp, Klebsiella oxytoca
atgggactaaaaatatataaccatgtgattttggtgatttcaataatgcttttgttattttgttgtttaattattgcttatgcgatgggtgttggcagtattctatatgagataaagaactttcctgattggttaagttcgattagcacatttggaactctagttgtagcatactcggcgtataaaaaagcaccagaatggataagtcagagaatgcatgaggatgcattctctctagccagaaaagtaattcttgatgattacccattacttaaagaaaaaatagataatgctggaaatctagtgagttacaatgttatatattttgatttaattgatgatgattgcagtgtctctattactgtggatgagtgtgacaaggcattgtctatttttcatgatgtgcaaaattcaccggcgacaatagaaagtaatttggataacctttctaagcttggctggaatgttgatcaggatattttaaacctcaacaatgaaattaatgagtgttatagtgaaatgaaaaatagttatgttttagcctttgcctgcataaagcgaatgataacgattcaaaatattaatgaaaaacgtcgatgcgccactcgaataagtggtttttttgaacgatttgaaagtaataaaaatgaattcgatcatctttacgagagagtaagattaaaacacaaacgggttccggactattttgatgtcgaaaaaaaatag

SEQ ID NO: 205018 - DNA, 237 bp, Klebsiella oxytoca
atgcggatagcaatgcttgatgatactcccggtgaacacatagtgccgggccgtgaacgcatcacggtataccttgatggtaatgaggtgaagcacgtcttctcagccgacgatgataaaggcgaggtgattgccgccgtgcttgatagccggggttacctcattgccgagaacggcgaggttaaacggcagacgctgttcggtcaggtgaggatcgtacgcccatccaagcaatag

SEQ ID NO: 205019 - DNA, 660 bp, Klebsiella oxytoca
atgggtattctcacttttgatatgacgtgccctcactgccttcgagagaaggcagtgcttgaaggatgggctgaaaatcgtgttaataacagtgaactagtgaatgttgcgttcagttgtcggagctgcctacaagctgggatagctatcgttttgatgattaaaccgggcgggtacacgccattaactaaggcgaggcaagataaagattataacgtcatagtcccgggctccagggattatcaattgattgatgttttcccaaaagctatatctcatgccgcgcctgagaacacccctgccagggttgccgaagcgtttatagaggctaaggacaatctgagccgtagtcgcttcgacacttcagttatgctttgccgtaaagtactggatattgcaactcgaacgcttttaggcaatgaatcaaaagatgaaacattagttaaacgcattgccatgcttcacgccaaaggactcatcactgatcaaatgaaagattgggctcacattgtccgtattgactcaaatggtgcagtgcattctgacgaagagttttcgcaaaatgatgcaagtgaaataattagctttactgaagtattccttctttactcatttactctgcctgaaatggtgaatatcaaaaagcaaagcagggaatag

SEQ ID NO: 205020 - DNA, 246 bp, Klebsiella oxytoca
atgagcgaagctaaaccgcagggcgacattgagcggatgaatcgcctgaaagatgtgagtcgtcacttttgcaatctgctggatacagagcacaactccactatggatggagtggtagggatattcactaaaggagagtccgagcgtaatgaggcgttacgttgccttgatattgctcgcaccaaaatgcaggaagcctatatgtgggcttgccgagctgtagcgcgtcctgatgctgattgctga

SEQ ID NO: 205021 - DNA, 510 bp, Klebsiella oxytoca
atgcttcctgagctatcggctgccatgactgctgtaaaggaaacagtcggtcttgtaaaagtcataagtggtgcaaaaactgacgcagaaataaaaacggctaccttcgagctgcaaaacaaattattaacgcttcagacagaatgttttgctcttggcgatgctattagccttaaaaacgaagaagttgtacgcctgaaagcaataattgcagagttcgaaaactttagtgctcaggtagaaggttatgttcttgaacaacttgattcgggcacttttgtatactcgaaaaaggagttggtgagtggccgcgagatatcaatcaaactttgcgcacactgttactccaagcacataatggcgatacttcagttgttgcctgtacgacagtcgtctctgtttcataaaagccgttgcctccaatgccataatgaatttttgatggatagaaattcaggatatgtacctccgccaacgatggctgaactcggtcgtttacttaacgactag

SEQ ID NO: 205022 - DNA, 462 bp, Klebsiella oxytoca
atgactgatatcaccgaactggcgcagcttatgaaggctgcagctgtgcgagctaaggcagcaaccgaagattatgttgcccatcgcatgtctatcaccgtctacctcgaagaatgcaaagaatttaacgacctgtcagatgggccagataacatcctcgcgctggtagaggcgctggagatcaaggaagaacagcgcgctaactggttccagatggcacagaaattaggagaaaacttggatgcggctgaaaagcgcatctctgagctggagcgcgaccaggagcatcttcgcccggtaggtgtgattagcgagaaagcatttcaccgtcttgaaaacagcgaatctcgctttatagcgttgtggccgcgccctggcatctttttgccgcgcaagcgccccgaggatggcgtgatcgtttatgcgcgtacagcagccccgcaggaggtgaaaggtgagtaa

SEQ ID NO: 205023 - DNA, 1356 bp, Klebsiella oxytoca
atggagaagggatcacccaagccaagaacattgcaaagttttttatacaacaatggagggataaagttttatcgaaatggatttaatgttgccccctttggtgagagatataatgattggcttgggttagatgaatcttctcgaagaaggttaattttgccaccacattcaaatactaacttcttggggaatgtttatgttactgattctattggtgccatatttgaagaaacctctgctcgggaaggtgtaattgaaaatgatgcctttaaagatctagttaatacaaccaaaaatatagcaatgaaaattgcttctcatgttgcaacaataagaaataaaaaaataacgtcatctcaacagggctacgcaccaaatctaaaaaccaaagaagacactatacaagataagattagcaaactaaaagaaaaactaattgtaaaagaagagtacgagaaagaatccttagtagatataaatgataatgttacttcagacgtcttagataactcgggatttataaaagaagatttgactgcacaacaattgatcgccgatctcaatgatgtaacaacaacatttatagaatatgttgatgaacgactcttgtatagagtcctatcttcacttggtcttgctatttctgaatttacacatgagatacaattgtgtttattgaacttacaattaacaagtcagaatttggaattgctatctgagggaaacgctgaattgcaaaagtctgtatttcagttttcagaaaatctttctatgatggttgcttatacagatttcttcgatgggactatgcgtagtaattctaatcgtgaaaaaaataattatgatttaagaaaattaattaaacgttttattaaagggatggagcctactacaaagagacgtggctacaagttcaatgcgacctttgataaatggggtatttggacgaaaaaaatacatatctctgaaataatgtctgtttttatgaatttgtttacaaatgcttgtaaggcaattgagcgaagtggtcagaaagaaggacttatatccattaatgtgactacaaatgaatcatttctaactattttgtttgaagacaatggagatggaatacctaaagataaatgggctaaagtattcgagccactttatactacagcgatgccagcgaactcatatggctctgataatgaatatagtcgagggatggggcttggattagctatcactgaagaaataatctcggaaatgcaaggtgaaatatctataattgagccttcgccagagtataaaacatgtattaaaattattttacctttagcggatgaatcggagttaccagaagatgcctattaa

SEQ ID NO: 205024 - DNA, 1155 bp, Klebsiella oxytoca
atgcctattaaatatctttatatagatgatgaaagaacggaagtattgctgccccttataaatcaaatcagtgggcataatgttaatgggcttgaggtacatcataaacaagtctaccccacatttgcggatgtagttagtgaattaaaaaataatgaatataatggattgattattgatcaaaagttgtcagcgataagtgaccaaggtgtcaaggctgattattatggtacaactttagcccaacaactaagaacagaaatggctgtaggtaatatccttcctatacctatggttttgctttctaatgaaagtgttattgttgaaagctatattcctgatgattcatcaaatgatctatttgattttgtaattaagaaacatgaggttgcgcaagaggaaaaaagattacgagtgagtaaaatgcttcactctctaattcaagcttatgataaagcacgagcagtaaaaaaggatattggtatagacttaaatgaggaagaattatgccgcctttttaattgcaatgcagatcaaattgactatatggatacaagattcttagatttcattaaatctaagggaggtgacactcatagtttagtagcttcaatatattcatccctcattcaatcagccggaatgctggtgacagaagagatgcttcagactaagcttggagtaaataaaaattcttcagattgggataatgttaagcaacggttaaatgcgtataaatataatgggccattttgtgatctaaaagaaagatggtggttttccggagttgaagattggtgggatgaattatgtccagaaaatgtattgcagaatttaacggttaaggaacgtgttgggatattaatcgaaaaactatctttatcccatctaaatcctatagagctttcctatccggatggacagcaaagtgaatatttatgggttaactgtgtgttgtctggagtagctttagatccttatgacgctttgcgtgtgcgagatcctgaagcaaaagtatgggagcaaccaaaatatatcgacttgcgtgcatttttaaatgatgatgatgagcatcctcattataaaatccatatagatgataaagataaagttaaaaagcttttagcgaggctgaaaccaaatgttaacgaatga

SEQ ID NO: 205025 - DNA, 717 bp, Klebsiella oxytoca
atgttaacgaatgatcaaatagttgaaaaccttgagagggtagggagtcttctgctccaaaagaacattattactgatgaaacgccatttagaaatattcgtaggcagtttcaaaatgactctatgaaatattctattccttggattgaatttaagaaaataaaaggtgaatttgtccggagtgatgtttgggattcagatcttagcgtgaaagtaaatgcggaagttcaagtgcgtgaaggatttgagttcaattcagctgtaagaatgattgttaatatagaatatacatgcttgagtcaggatggtgagaaagaatgtaaagggtgctggcatatggattaccacgttgatgaaggggaaccgcaatatatgcacccagactaccatttacaccatggtggtcggtatattaatggccttcatgattatggcgaagtcatcattctcgataatccaagagtgatgcatcatccacttgatgtctttctcgctattgattttgttatatcaaatttttaccctaaaaaagagtggagtaaaataagggccgatacacaatataaaaaaataattaaagatgctcagcgtgcttggtggaaaggttactacgaaaaaatatctaactattgggagcattgtgatcgtaataacaaaggtgagatatccaaagctgttatttgtgaggctcaaaaattaaaccctcattttatatga

SEQ ID NO: 205026 - DNA, 258 bp, Klebsiella oxytoca
atgaaacggctgatactgtccggctccctacttctggtctgtatggcagtgatgttttatctggctgctgacaatacatcgcagattaaccgcagcgacctgctaccctggcgcataacgctatacggcgtgatttgtggtgtgggctggcatctgtatgaccacttgccgccatatcgtccggcaatccgccgtatcgcgctgatatttatcgtacttattgtactcaacgaaatcgtgccggaggtgttccggtga

SEQ ID NO: 205027 - DNA, 1608 bp, Klebsiella oxytoca
atgacaacttatctatcaaagaatatcagccggtataaggggagtaatctgcggtacaggttattctttacggcactcacgctgttattttctttttccctccacgcacagtcactttatatagattgctccgctaccgttgacggtgatggcactgtcagcaatcccattaattcgatcagtacgcttaacaaccatgagttgcatccgggagacaacatattgtttcgccgtggcactacctgtaatggcgaagtggtcgccgcaacttctggctcagagaatgcccctgttatctatgatgcttggggcgaaggaacggcgttacctcgcatagaagcaaacggcaacgaagcggctttccacatgacagatgtcagttgggtaacgatacggaatctggaactttcggccagcggcgatggaaaatccccccgccggggattatgggttagcgccaccgacagtggagaacatcaggggatccaccttcagcacctgaatattcatgatgtccgtggagaaatgccagccacaaaaaatccttcggacagcagcataggcaaatatacccatgcgtcaggcggcattgtggttgaggcgctgggcaacacgacacctacctggtttagcggactggatatcagcgataatattattcacgccgtcgatcgcgagggtatctatacctggtccaactggtgtcagcgcccggaactggtcgagttctggtacagcttatgtactgcgaagtggcagccattcaacaatacccatatcagccataatatgctttccgatattggtggcgatggcatcgcgcccatgaccagtacggacagcacggtggaatacaacgtactgaatggttttaatatgcgctccggctcaccaaacgccggaatgtggtcggccaacagcgacaatatcgtttaccagtacaatttcagttcagggggccataccacacaggacggtatgtcttatgatgtcgatcactcaacgaatggcattgtctatcagtacaatatttcctcgggaaacgaaggcggctttttcctgctttgcccctatggctatgatgtccccggcaaatcgcgtaatttcgtgatccgctataacctgtccgtggcagacagaacccgcacctttcaggtatgcagcggcggcgtgattaacggccagatttacaacaacactattttgctgccacctgacacaaccagcgcccatctcattctgacagaaggggcaaccaacgatggtgcagttgagcttaagctgactaacaacatcctgatgggcgatggctctggcgttactccagtctgggactacaatgactctgccattactggcgaccacaatctctacaacaatgttccggtaatgccctctgacagttatgcgttaatcgacgatccacgactggctaaccccggtccggagaatgtgctctggagagactatttgccgcaacccggctcaccggccattaatgcgggtatcgctgttacaggcgcacctgcacacgatgcgttaaatcaggctatcggaacaccaccgactatcggcgcgctggagccggaaagtagctcccggcgataa

SEQ ID NO: 205028 - DNA, 180 bp, Klebsiella oxytoca
atggaaaccgctgcacggatagctgatgtgctgaatgtccccctaccatggctgttcacttcggatgagaatcttgctgaactgatcctcaactttgccacgctttcatcagactcgcagttgcaattactggatgtgtctcggcagatgctaagcaccttacctgatgaaaatgcctga

SEQ ID NO: 205029 - DNA, 1290 bp, Klebsiella oxytoca
atgtcagagagcctgcaatctaatacaactcaaacgttacctgacgatagggaagagctgtatcaccttgtctggcgcgagcctgcggagcgaatcacttccctctatagcatcagcaaagaacaactgacaaaacgatgcgttgagttacggataccgagaccgctcgcaggatactggaaagcactggcgaaagggactgcacctgcggtgccacctttgcctgatttaaaaaaaggcaaaacgacaaagatcccgaaggaagcaggcgtaatcgtgccgtcacccgcacttccaaagtcattacctccagcgacgcgaaagcaagccacgattacagggaatggctatgcgttaatcaatgatcttaaggcgtatctccccaaatccagtgtgactgaagatggttactacaagcctgcgaaaaagaagctcctggatctcaatgtttcggatacggggtttgatagcgcaatagatttcttgagccggttctttgacgctctggggaaacagggctatcgggtaacactggatgttcctggagaacggtttcatcgtgcggatattgatatcaaggaagatccaaagggagaagggtatcgctgggacaatttatggcgaccttatacgccgagcatcatttgcattggtggcatgtatttcgcgttcaatctagccgaaatgacggaatatgttccggcgaagaaagtcaaaaatctttatgttcgtgacgaacagatggggaggtggattcgtggaaaaaatagtgcgccttttcttcacatctcgaagcatacgttgcctaccggacgatttcttttgcagctctattcgccttatgagtcagcagattggcgagtgcagttccggcagacaaaacaatgtggtttgattagccagatcccgaagatgattgcagtgatgctggaagccattcctatcattagcagacaactagaagaagctcgaatcaaagctgaggaacggcgaattaaatacgagcgggaacatgctatctggctcgaaaaggaacgaatccgtcgagaagaagaagcacacaaagccagcgctactgagctgaaatcgattatggcccagtgggcggaagacaaacgcgtggagcagtttttccgtgatgctgagttggatgccgctggtcttgatgagccgcagaaagtacagattatggagcgcctacaactagcccgacagttcttgtcagaggatacagcggttgagcggttgcttaagtggaggacgcctcaggagcgattgagtaagggataa

SEQ ID NO: 205030 - DNA, 1458 bp, Klebsiella oxytoca
atggaatcaaaattcagaccttgtgaacctatagaaaattttagggaggaatttttttcactgttacaggtagcaatgaaagatggtttaaaaaaagtaagcgatgcagtttcttccaaaaaatacattggaacctattataactggccttcactttcattcaggaaaaatggtttacctagtttctcatcctcaatatttcaaggtgctaacgaatacagaaatatttttagcacacaaaataaaggtattattgaatcagatataaagtcatttaacgattttttgaacttcgtaacatcaaatgctgaccttgaaaataggttagtgatggaaagtttaagaaaaacaaacgaagaaaacattaaaggatttaaagaaataactatttactctattataaatgatgttatcgaaagatatatacatttgcatggcacttttgagtatgatgaagataaagcaaataatattatcaatgaaaaacaaaattcaatttttttagatacattaccgattgatatcgtagtaccaattctttttattgattttgactttgattcattttttctatctgatggtgtcgaaattaggagattatcagagaaagaacacttagcccgatacaatataaaatcctacaatatcagtgttcatgattcggtactttcctcagcaacacatgctcttgttttacatggttgggaggtaaaaaatagcgcctgtataatggattttaacactctatacaatataagggcatatccaattgatattattgataaatttttcgcatcgattcgtttgattaaaaatgcaaacactggatacgctcaagtcttatcgttatctaaatcatggtttaaccattgcaaagctgatttaccacatatgattggaacaacaatacgttcctaccctgcaacctttgaggactattactggaatattgattctataccattaatttctaaagatgaaataaattcgattggaaaaacatttcgttcgctatgtaattcaaaagaaaattctattgacctatcggttaaaagattaaatcaatgccttgtccgagatagtgaagaagactcagtgcttgatgcaactattgccttagaagccctactttcagatgatggcaatcaagaaatgactcataaattagccatgagggtaggagcgttagcaaatttggaccgaaattttggaaaatcaccacaacaagcattcaaagatattaaaagtatttatgcatatcgttcagcaattgtacatggaagcaaaacgctagacaaaaaaagagttatcaaaattgatgataacaaagaaaccactactcattctctatcagtagagtacgttcgctttgtacttaaaattttattagaaaatcctcaatatagagaccctcgggtaattgattcagaattgttattaggacctataacaaattag

SEQ ID NO: 205031 - DNA, 390 bp, Klebsiella oxytoca
atgcgtatgctgattttgctgttatcgctgttgctgatcgcctgtagcacagatcagaaaaccctgctgccggtggatgaaaacaccaccatgctcaatatctggggccaacagaacagcgatgtgcaggctctgtacgacgcgcggtcggtactgcgtcgcccgctggatgacgccacgctgaccgcacaacagcagcaggccacacgcagtgatgaaaatgctgataaggcgctgttccggcgactgccgaatccggatctggagatgtatatcttccctcatctggcgggtagtgaaggagtcccggtgccgggatacaccaccgtcttccccttctataaccgggtgcagtacgccctgcccggcgagcggactgatccgctgtga

SEQ ID NO: 205032 - DNA, 1338 bp, Klebsiella oxytoca
atgaagctccaggccaatatcctgctgcgggttctgacgccgctcatcctgctggcgggcagcgtcctgctgtttcatgcctgtcaggatcgcaaaaccaccccgtcaaaatcctctgcgcctgcaacacccctcagccacgacgagctgaaagcgctggggattgagggcgacacgcccgccgataccgtcgccacgctggtcggccagatgaagctctggcgtaaggaactggagacggtgaaagccagtaacgccgcactggtgcaggaaaatcagcgcctgcgtgagcgcgagcagaataccgacagccgtatcaacgacgccattagccgccagcagaccagcgcctcagagcagcaaaacgaattgctcagctcgctacagacgcaaatccagcagttaaagggcaacagagcaacagatgactcgctggccgggctggggattgatgaaccggaagcggcctccggagaaccactgcgctggatagcccccgctgatgccctgccaactgataaaaacggtcgcccgctgcaacctactttggcctttccttcctcgatgcagaacactgcaccgcaaccagaaacaccgccccctaccgccgtcaaaccggtctacaccctgccgcagaacagtacattaattggctcggtggcgatgaccgcattgctggggcgcattccgcttaacggcagcgtcaccgatccttacccgttcaaggtgctgattggccgcgataacctcaccgccaacggcatcgagttgcccgatattgaaggcgcggtgatctccggcagtgccaccggcgactggacgctttcctgcgtgcgcggcagcttaacgtcaatcacttttgtcttccgtgacggcacggtacgcacgctacctgccgaaggcgacaaagccggaagcggcgcggaaggcaatatcggctggctatccaaccctcacggcctgccctgcatccccggcgaacgcaaatccaacgccgccgaatatatcggctcgcagttcctgctggccggatcgtccgccgccgcgcaggcgctggcgaacaaccagaccacttccaccgtggaggatggttccatcaccaccgcgctgacgggcgacagcggacagtacgtactcggccaggcgctgggcggcggcctgaaggagagcgccgactggtttaagcaacgctacggccagatgttcgacgccatctacgtaccgcccggccaggccgtcgccatccatatcacccgccagctcgccatcgactacgagcctgacggacggcgggtgaactaccgcactgcgggcgaacgcactggagacctggactga

SEQ ID NO: 205033 - DNA, 789 bp, Klebsiella oxytoca
atgaatgtccgcccactgctgatcctgctggttgcccttcccttgcacgccgtcgaactggtgaagtgggaacgcatcccgctgccggtggcgctgaacatcgggcaggagcggatcgtttttgtcgatcgtaatgtccgggtgggctatcccgccgcgctggaaggtaagctgcgcatccagagcagcaacggcacgctgtatttactcgccagccagccgttcgccgccacccggctacagcttcaggacacagagaacggcgagctgattttgctggacgtctccgccagcaagggcgagcacatccgggagccgatgcgcattgtccgcgaagagaaaaagacgactgacgcgaaacctgatgcaattccaggccccttaccctccacgccgctgccggtcgcgctcacccgctatgccgcgcagatgctgtatgccccgctacgcaccgtggaacctttgccgggcgttcagcccgaaggtatgcggctggcaaaagccatcaccaccctgctgcccgcgctacccgtcaacgccataccgatcggcggctggcggctggatccttatcacctggcagcgatccggcttcagaataaaagcaccacccggctggaactcgatccgcgccagcttcaggggcagttttacgccgcctcctttcaacatcgctggctggggccagcgggcagcgccgaagacaccaccgtactctatctcattacccgcaatcagcgtcctggacaggtgattctgccggagcctgcgccggagaggaaaaaatga

SEQ ID NO: 205034 - DNA, 354 bp, Klebsiella oxytoca
atgagcaccatcccctttctcccggaacggctgaaccgcgagcctgcggtgtttcgcggcctgacggtcagcgagctactgatagcactgcttgtcggactggcaactggagcaattgctggagccattccggcgatattgtggcgaaactggagccttattcccggtagcgctctgcctggcggtacgctggcgatcctctgcggtggacgctggctggcacggctgaagcgcggacgcccggagagctggctgtaccgggcgctggagctgaaactggcccgttttggcattggcgctcagcgttttgttctgcacgatggcgtctgggccattcgccggagccgacgatga

SEQ ID NO: 205035 - DNA, 219 bp, Klebsiella oxytoca
atgccgctggccggatttactgatgggatgccggtaaaaatccgggtgatgaaagactgcattgtgatcaccccgcaaaatacccgcgagctgtggggttgtattgagggcatgagcgtgacctacctcaatcagcggaaagttaagcagtggctggatgcctttccgggggcgctgcacgatactggtgatattccggtgatcaaacgtggcagatag

SEQ ID NO: 205036 - DNA, 771 bp, Klebsiella oxytoca
atgtcacactggcccgaagaactctttgacttaatatacttccctcaaaggaatgacaagcttgatgcacttgcaaatttagctgaaaatgaaaactgggattaccagagcactaccagtgattatcctaaacctgttttatataattacctaagattcacctataaaagattaagagaagaaggcaagattgaaatttcagatgatgcacaatatttaactttcaataccggccttgtaacgaataaccaagagccaatatttttgctatgcaatgttaacagaaacagtacatccatcccatggttttttattggctggaagcgtcgtggcgaacaggatctatccaaattctccaggcttccagaaatggctaacttcttcgatgaccctcaatacctactatttgactcgagaaaagatcttcgagtgaatatagagcacatagtcgaagaaaacaaagaaagatttcctgatccatataatcaaatggataattacccattacaaacactactaaaaggtgcaattgataacgcaaaagagagagtaaaaaggaattataaaactgctataccacaatattatgatggtaaattacaattgctcctccccctatgtttgaacactccagaagttgccgatttagcgcttgtagtggaaaaacaaggtaatgatttctaccgggcatctacatgccttacattagatatgtcatataataatgctcgcctcctagcaagacctgatagagattggttggtaccataa

SEQ ID NO: 205037 - DNA, 690 bp, Klebsiella oxytoca
atgaagcttagaatcaaagtatccgatagattcgataagatctatcatccactacagttcagggcattctggaatgatgaaggctattgctatctacgagtacagattatggatggcaagatagtctttacctgtgcccagctcctgaactattacaacacttcgataacaaatgcggtagagagcgtaagagagtctgctctgaatgcattgataagagatggagctttaaaaatttatgatcaaaaaaatatatttgatctctttaaatcccaaaaaaggataagtgaggagtttgagactttactctttgatttcctgaatgagaattctgtatggattgaatactatcatgctagttcaagcataactgatgatgatcgttacaccatagttaagttcgaaggaaattcctctccaacatggtactcaacatcaaaggaaaatctggagagtgatttccctaggcttaatttttcaattgatgaggaaagtctggcaaactggcggaatgctaggctgtcaacttctaccataaaaaaactcttgaaagataaaaactggacaatgaaagaagttgctgctcgttggaatcgctctgaagtatggatgagtaaaattgtgaacgatgaaaatagagatttatactgggaggatgccttcaaagggctacccagtaatggtgggtaa

SEQ ID NO: 205038 - DNA, 684 bp, Klebsiella oxytoca
atgcccgaacatgcgccaccaggccccgtgcgtcgccccggactgctcggctggatagcattacttcccggtgtgctggctggcttttgcctcggcgcatggatgctggcaatagcgctggagtggctgggtgatgcatttttctggcggaacgcctgcgccagccacagtgaacaggtattgcaggccacatggcagtggtggcgaggttccgctggcgcaccagcgtggctagtagaagatctggcgcttgccagtgatacgttgcaacaagggattgcggcgctgattgcctcgctcaacgggcaaagcgggttgttctggacagagacggtcactacggtgatccactgcgcgttactgtctgcgggtaacgtcaccctcacctttttactgcggctggcgattctgttgcagacgctgccgctgtttgcgctgaccattaccatcggccttgttgacgggctggtacgccgcgacttacggcgattcggcgcaggctatgagtccgggtttgtttatcaccacgccaggcgtatgatcggctcaagtctggcggcgacgggactggtgtggctggcgatgccggttattctcgcgccggagtatatcttggtaccgggagccttggtaattgggctggtggtatcagtggcaattgggatttttaaaaaatatttgtga

SEQ ID NO: 205039 - DNA, 2034 bp, Klebsiella oxytoca
gtgaggcttgattttatcctgcgcccggcggtggaactttacagcgccagcgcggccctgctggcggcggtatggtgcatagcggctccgcaaacgctgctgctgacgccttattccggctggctgctggcgctggccttgcttgcgctgtctgccctgcggctaaagcagggattacgcatcctgcgctttcgccgccgcgtgcgtcatcttccactctggacgctctctgccagccgtatcccgctgttacccgacgccctgtttcttgggcgcggctttcgctggctacccacgcatacccagcggctgtatctgtgtcgcctgccacagtgtgagcactggctacggacggatcgcccttccgccagcggcggcgatccactgctgcacggcgtggagctgtacgaaggcagcgtcacgctgccgctgcgcgatcgaccggggcatacgctggtgctcggcactacccgcgtcggtaaaacccggctggcggaactgctgattgctcaggatattcgccgtggcgacacggtgattgttttcgaccccaagggcgatgccgacctgctgcgccgcgtgtgggcggaggcgcaccgcgccgggcgggaaagcgtcttctggttgttccatctcggctggccggagatctccgcccgctacaacgccgtcggacgctttggccgcatttcagaagttgccagccgtatcgccggacagctctccaccgaaggcaactccgctgccttccgcgagttcgcatggcgcttcgtcaacatcatcacccgcgccctggtggcgctgggccagcgcccggactatgcccgtatcgcccgtcacgtgataaacatcgacgagctgtttatcgactacgcccgcgtctttctgcccggtcacgacaggctggcatgggacaacgtggtgcggattgccggtggcatcaccgagaaaaatacgccgcgtaatcttcagggacgggacagctacgttgtcgcgctggagcagtacctttccaccacccgattacacgacccgatcctcgacggcctgcgctctgccgtgcgctacgacaaaacctatttcgacaagatcgtcgcctcgctgctgccgctgctggaaaagctaaccaccgggaaaatcgcgcaactggtggccccggattatggcgacctcaacgatccgcgcccggtgttcgactggcagcaggccattcgccagcgggcgattgtctatgtcggtctggatgcgctgtccgatgcggagattgccgccgccgtcggcaactcgatgtttgccgatctggtcagcgtcgccgggcatatctacaagcacggcgtgatggacggcctgccgcaggcggaagaaaaagcggtaatcaacctgcactgcgatgagttcagcgaactgatgggcgatgaatttattccgttgatcaacaaaggcggcggcgcgggcgtgcaggtcacggcctacacccagacgctctccgatatcgaagcccgcatcggcgaccgcgccaaagcgggccaggtggtcggcaacttcaacagtctgatcatgatgcgggtacgggaaaccgccaccgccgaattgttgacgaagcaactgccgcaggtggatgtgctcagcaacagcgtcagctccggcgtcaccgacagcgccgatgctcagggcaatatcggattttccagcaacacccaggatcgggtgagcagcgtacaggtgccgctactggaacccgcgtcactggtgcagctccccaaaggccaggcgtttgccctgctggaaggcggccagctctggaaattacgcatcccgttaccggataccgcgcacgatccgcagatgccggaaaacatcgcgtacatcgcccgctatatggaaaaacagtacgacagtgcgcccgtatggtggaacagcccggagacagttgtaacggcgaaaaacgaccctattttatggctgaacgacagcgaaaccacggagaaccataccgatgataccccggacacaccgccagctcgtgagcgttga

SEQ ID NO: 205040 - DNA, 408 bp, Klebsiella oxytoca
atgaaacaccttattccagccatgctgttgtttactgccaccgcgattgccgggcctgccgttcccatgcaggcgctggatgaagcccggttactgcccgtcgtcacccacactctacatcccggtcagcaaccgcgtctggcgctcagcctgccggggatgacgccactgtatttaatcggcgacgatccgctgtccacagaatggctgcgccagcaccgggacacattaaaaaccctgcacgccaccggactggtggtgaacgtcaccacgctggcgcggttgaatgcgctacggggcatcgcgccggaactgacactgctgcccgtcagcgccgacgatatggcaaaacacctgcccatcagcgcctatccggtacttatcaccgacaaggggctggaacagtga

SEQ ID NO: 205041 - DNA, 534 bp, Klebsiella oxytoca
atggcgtcccgtctctgctccctgatagtcggcctgcttatcagcgctcacgcctgtgccgtgccgccgctatacgagcaaatcgcccaccagcagcaggttccggcggaactgctctacgcggtggcccgcgcggaaagcggcacccggctggcgcaggggctacatccatggccgtggacgctgaatattgccggaacaggataccgttaccccagccgttcttcagcctgccgggcattgctggcctttgcccgtacccgcagcctgaaacgcatcgatgccgggcttggacagattaatctcggctggaatgggcagtggtttccctcgctgtgcgccagttttgatccggcggacaatctcaccgtcactgccctgctgctgcgtcagcactacaacgccttccccggaagctggctggacgccgccgcccgctaccaccatcccgccggaggcaaacctgccgccgtctaccgccagaaaatcgaccagcaaatccggctgctctccgcatcagggacctcgccatga

SEQ ID NO: 205042 - DNA, 651 bp, Klebsiella oxytoca
atgcgcagatacctgttgctgtgccttctgctactgccgctgtttgccagcccgcagcaaacccgtattgaagaacagaccatcactcacacgcaggcgcagcagtgggggctgaccgacagcgaatggcagcgctaccagcaactgcgtcagggcgagcgcggcatctggtcgccgggactcgatcccctcaccaccctcggtgtggaagccaacagcgacgccgaacgccagcgctatgctgagctgctggcccgtaaagagcatcaacgggtggagaaagagctggcgttccagcgagcctacaaccaggcgtggaaacggctttacccgacgctgacgcccatccgcaacgtcgtccagccacgtctggcgctgtttgtcagtgaaaaatgcccggcctgcgagacgctggcgcagaagcttatcaacgacgaccgtccgctggatatctggctggtcaacagccgtaacgacgatgccagcctgcaacgctgggcgcagcgccagcatattgatatgcgcaaagtcgaacgcgggcagataacgcttaatcacgataacgggcgctggcaacgcctcggcggcggaaagctgccgctattgctggaacaacagggggagcaatggcgtcccgtctctgctccctga

SEQ ID NO: 205043 - DNA, 609 bp, Klebsiella oxytoca
atgcttaaacgtctggcttacctgatagcgggcagcgctctccttcttctggcggcggcgatgttctggtgcgtcaaccgcctgaataccctgatgctggcacagcaacagacacaacggcagataatacagtggcgcgaacagtcacagccagacagcgattatcgcgagctggaggttgccgtaaaaaacatcaccggacgcactgaagcccttaccagacagcttaacgatgccacccgcgctcaggccgaacgacttcaacccattaccgaacagttcaaagaactgaagggacaaatccagaccctcagcgccagttatcaacacctgcaacaacaaaccgccgcgcgcagccgcgcaaaggcaaaacgccccgtcccctctccgctttgggccgcaaaggcccctttttctcttatcagcagcgagtttcgtgccgggcggcagttcgccgtcatcgcgccatccggctatcgctcgctctcacagcttcagcttgttacccccggcgacagcgtgcagggctggcaactgctgcaactggacggcaaccgcgccactttccgtaaaggcgggcagcggctgacgctgaacgccggagagtaa

SEQ ID NO: 205044 - DNA, 465 bp, Klebsiella oxytoca
atggcgcgaataacaggatggattatcacactgctgatgctgggcggctgcaccgcgccgcaacagccccctgtgcctgcgccaaaacccgcaataccgccagcgcctgaagtggtgcgctatgaccgttacctgttgatcaacacccgccccgacgaagctcagcgcaacccgctgcaccaaatcgtcaacatcaacctgccgctgaacctgaagctcaccgttggcgacgccttcacctggctgctgaaacaaagcggctacagcctgtgcaccaatgaccattccacacagtttctggctggcaaaccgctgccgctttcgcaataccgactcggcccgatgcgactggaagaggcactgaaaacgctggccggaccgggctggctgatgcagagcgatgtactgaaccgcgaagtctgctttcacctgaacacgccgggaaccggagaccatcatgcttaa

SEQ ID NO: 205045 - DNA, 417 bp, Klebsiella oxytoca
atgagcgagaaaacttacttcaatctgtacaccagcggtctgggttacgtaaaccgtgtccgcaccgtcaccccaaaacgcggcgaaccctttttatgctgtgacattgccgcattaagcggagccgccgatgacgtggattatgtccgctttgactgcaaagtgaccggcagcgaagcacgtaagctgattgcccgttgcgagcaggcggtcaatgaaaagcgcaaggtgctaatccactttcggttgggcgacttatacgtcgatatgttcacctacagcaaaggcgagcgtaaaggcgaaacaggcgtcagcctgaaagcccggctgctctatattggccttgtcaaaatcgacggtgaagtcgtctggcaggctgggaatcaggaagcagaggcggaagctgatgcagcctga

SEQ ID NO: 205046 - DNA, 495 bp, Klebsiella oxytoca
atgatgaataaccccataaccggctatcagccgctggctgatgaagactataaaatgctggcttacgtctcctcgctaaaaggccttttaaagccttttaagagtaagggggagctggagctgctcgagagcaatgcccgaagcgtgcgcgagatgatggaacctttgatgcaacgcctgatccagagcgccagacgctaccccgttcgccaactgccgctgatattcaccatcggcccagccccgtccggcgcaaacttcttgcgctggcggaaccagcagaacaataaatccggcacccctgcattctgcaacctgattggcgatcccaaaatcccgcaacgtgccagagatgccttactggaaatcgagcgggatcgcatcgtgttcaatatgcagatgtcggtgctgaccttcattatccgccaggcgcgggagtgtcaggaaaagatgaaccaggcagaaatgctgtatcaggggcggcaaaatagctga

SEQ ID NO: 205047 - DNA, 699 bp, Klebsiella oxytoca
atgtcggactacaccttcaacatgggtcccctgcgtagtgcgatccatattcagcttcacacccataacgctacccggctgtggaccgggcgacgggcgaccgagaacggccctgcgccaatcatcggaatgccgcgctttatcgaaatcctcaaccagatgcgcattgccgcagaacataacgatccttacgccgatctgtggatgctgcgtatggaagagaaactggtgcaatcgcgtaagctaatgcaagtgatgctggatcaggcgaaagccatgttcagcgaattgccagaaggcatcgatattgaaacctgcttcaatgttcagcctgcccgctttccgctgtttatcaacgccccactggcctatcagggtgtttatctgctgaccgacttcgaccagctcgcccgtcagctcctgctggcctcgcatatcgccgtcatctcccgcagggaaatgcacaaccggttaaataatggcgcaacggttattcgcagcgccttcggtctggcgcagaaatatcacggttccggtctgacccgtcaggactttatcgacgatacaccacaggccagagcagtcattgaacgtctaggcccgctaccggaagcggtactgagcggcaagctgcgctcatcgttttcatcaccattgcctggcaaggccgaaaaccccggagtcaccgatgatgaataa

SEQ ID NO: 205048 - DNA, 2040 bp, Klebsiella oxytoca
atgcatcgcactatttctgagttttatcgcattccccctttacttattcgggcgctaaaaagcggaatttcctccgtggtggagtttcatctcaacaggggattacccaaagattcacgagattctctgggaaacagcccattgatgattgcggcccagtatggacatttcgctatttgcgaaatgttgttgagtgcgggtgttgatgttgaacatcaaaacaacctcgggcttcgcgctagtgaccttgcgcaggagcaaaaattgcgtgatctgttggcccgttatcgtcagcctctttcacttgccgaactggaacgctctgtggtttcagtcgaggactcagaaacagaggcagaattacccagcgctgaaatcccgatggattttatgctgtgggatgcagaagttgaattgaagcccgccgaagataatctgacgttaagacatgcttccgctgaagcccagcaattattatcacgctatcgcccgaaagataactctgctgagtggagcgatatcgaactcacgctccctgaaccactgacgccagtttctcactctccgcaaaattaccctcatctctcaacgttgctcattggcgcactgggtacggggcgtatctctttgcgtgacatctggcatgccggggaagaggatttcggtatgcagtggcctgaattccggctcagcgtagaggcattgatcagggacttaccgctgattgtggatgacgatgatattattccgcctgacgctgctccggcgacattatcggtgagtgaacctcttgaaccctggtttgatgctttcaatgcattgcggcagttcggcatcgttgaaaactatctcgtggatatccgccagtgggatgtcgtggataaaacaaaagaagaacgactcggccagcgcatggatacggcgctaatcaatctgataaaaatcctggcgggtttatccgaagcggaatatatgcagttgctgcagcccaattaccttccggagccagcgcctgagatttctgaagaggaagacgtcgcagaagaagcggatgaggaaatgcctcccgtatccgatgacgatgacgataacgatgacactatcagctttatcgagctgctcgttctgctgagaagtgggaaagcaggcgagtatcaggataatcatatcccccgcccggagtatgccgacctgcaacagatagttgagcgcgcccgaacgctcatccctgatgaaggtcataaaataagtctgtatgtcagcagttacagagaggcttgggaggggctgatccacgccaacttgcgtctggtcgtcaccatcgcgaataaatatcgcgggcggggattagatgtcgaggacctgatccaggaaggtaatctgggtttgatcaaggccgttgaaaaattcgactatcgacgcggatttaaattctccacgtatgccacctggtggatccgccagaagatcagccgcgcgattgccgatcaggcgcagctcatccgtttacccgttcacttctatgagcaattcaggcgctggcgaaacagtcgggatcaattgctgtatcgccaggggataacgcccacgatcaaacggctgcaagcattgactgaccttccagaaaatcaactcaagcggatggcaaaatatgaagaacagacggtgttaattggcgattttcatgctgacgcccaggacagcgaagcggcgctgtcgggagacgcgatcctgaccggaaaggatttcaccagtgctcccgttcagtctctcgagctaagagaatgtgtttcattggtgctggaaacgttgttgccacgcgaaaaacagatcataaaaatgcgttttggcatcggtatgacgcaagatttcacgctggaagaggtgggtaaacagtttgatgtcacgcgagaaaggatacgtcagatagaagccaaagcgctccgtaagctccgttatcacagccgggcgtcgaaattaggcggcttcgtcgaacagtgggaaaccgcgttgagcgagatgcaggaagaagaagaatga

SEQ ID NO: 205049 - DNA, 1503 bp, Klebsiella oxytoca
atgacgaccatgcgccatgcgccaccgaatgcagccattatgatcgaagcgctgcgagggctcggttacaacaccgccaccgcactggctgacatcatcgacaacagcattagtgccggtgcccgtaaggtcgatctgacctttcactggcgtgagtcggatagctatatcgtggttcgggataatggttgcggcatgtcggccgctgaactggatgttgcgatgcggctgggggtcaaaaacccgctgacaaagcgttcaggacacgatctgggccgcttcggtctgggactcaaaaccgcctccttttcgcaatgtcgccgtctgacggtcgcctccaaaaaagaggagataacgaccatcctgcggtgggatctggacattctcgccgccagtacggacgacggttggtatttgcttgaaggcgctgacccaggaagtcaggaggcgttagcaaatgaggaacctgactcccacggtacggtggtgctgtgggacgttttagaccgaattgtcacccccggctacggtgagaaagatttcctcaatctgatggatggcgttgaacaacatctggcgatggtatttcaccgattccttgaggggaacgctccccgactcactctcaccctcaatggtcgcaaaattaaagcttgggatccctttctcagcgggcatccttccaagccctggcattcgccttcggcaatggcgccaggcgctcctgccgtgaaggtggagtgtcatgttctgccgcatcaggatcacctgacgacgcaggagtatcaacaggctcaaggaccggcaggctggacggcccagcaaggattttatgtataccggaatgagcgattgctggtggcgggcaactggcttggactcggaagtccccgggcctggacgaaagatgaaacccaccgccttgcgcgaatccgtctggatatccctaatgatgccgacatagactggaagattgatattcgtaagtcgatggcccgcccaccggtttcgctgcggccttggttaacccaactggcgcaatcaacgcgtgatcgtgcggttcggacatttgcaaaacgcgggaaaatgaataagcgcaagcccggcgaggaacttgttcagctctggcaagcgcagaagacgccatccggtgttcgttatcagatttcgttacaacatcctgttatcagcaatgtcctttcgcaggccggtgagttatctccacaaattcaggccatgctaagactgattgaggaaaccgttccagttcagcaaatctggcttgatacggctgagacaaaagagacgccgcggacaggttttgaaactgcaccgcccgcagaggtgttgtccgtattgcaggtgatgtatcagactatggttggacagcaggcgatgtcaccggcgctggcgaaacagcacctgcaaaatatggaacccttcgataattatcccgaattaattgcactactccccgacgatcaacatgagaaatcgctatga

SEQ ID NO: 205050 - DNA, 2859 bp, Klebsiella oxytoca
atgagtcttaatcccttggatgacacgcaactgagtgtattgcagattgtgcaaacgttcctgcaaagtcaggataaaagcacgatcacgcccggtattctgcgccaacatattgatatggtttgtcagatgaaacctgagtggagccgccttgatagtcgggagatcctggtcgaagagttgatccgccgttacagcatctggatgggagaagattcttctctgagtaatgacgaagggcatcaaccctggctgaccgctgatgcgaaacgcgagtggcgctactggcatcgatatcgccagtggcttggcaaaacgatgccttggggagtcctggatacccttgaccgttcaacggatcgtgttctgggattacttgagcaaccggggcgggaagggcgttgggaccgacgtgggctggtggtcggccatgttcagtcggggaagaccagccactataccggtctaatctgtaaagccgcggatgcgggatataagataatcattgtgctcgctggtttgcataacaacctccgctcgcagacccaaatgcgtcttgatgaaggatttcttggttacgagacgagcccactcagagaaaaagtgaccatcattggggtgggcgctattgatagcgatcctgtcattcgtcccaattacgtcactaaccgatctgaaaagggcgacttcagcgccggagtggctaagaatctggggatcagccccgagcaacggccctggctgttcgtagtaaagaaaaataagtctattttgaagcgcctgcatacctggattgagaaccatgttgccaccagcgttgaccccatcaccggaaagcgttttgtttcggaattaccgctgctgatgattgatgatgaagcggataacgcctcagttgatacgggggaaatcgtctacgatgacgatggaaaaccggatgctgaacatcagccaacggcaataaatagtctgattcgtaagctgttgatgcagtttagccgtaaggcgtatgtcggatataccgctacgccctttgccaatatttttattcacgagagcaatgaaacacgtgacgaaggtccggatttgttcccttccgcctttatcattaatctcggcgcaccctctaactacaccggccctgcgagggtatttgggcgggccaccgcggaaggccggagcggagagttgcctttgattaggcgagtgagtgatcactgtagcgatgacggaaaaagggggtggatgccggtttctcataagagttcgcactatcccacactggatacgctaactcatttcccggactcgttaaaacacgctatcgacagttttttactagcatgctgtgtcagagaattacgcggtcagggagaaaaacacagttcgatgctggtccatgtgactcgcttcaataaggtgcaatcggttgtttatgaaaatattgatgcctacattcaggacgtgaggcagcgactgacgcgaaggattggacacgaaccttttttacatcagcttgagtcactctggcagaccgattttttgccgacgaatcaggcgatccgcgaagttatgccgcagcaggttccggacgacgccttcgaatggcaggagatcgtcgacaagctgtataccgtgatagaaaacgtgtcggtacgaatgataaacggaacggcgaaggatgcgcttgattattcggacagtgcgacaggcttaaaagtcattgcgattggcggagacaaactggctcgagggctaacgcttgagggattatgcactagttattttttacgcgcctcccgcatgtatgacacgttaatgcagatggggcgttggtttggttatcgccagggatatctggatgtatgccggctttataccaccgatgagctgattgaatggtttgagcacattgcggatgcgtcagaagagctgcgggaagagtttgacaatatggtcgccagcggcggcaccccacgtgatttcgggctaaaagtgaaatcacaccctgtgttaatggtgacctcgcccttaaaaatgcgtagcgcgcgttcactatggctctctttcagcggcacggtggtcgaaacgatttcgttgtttaaagaacaggagtatcacaagcgtaactacgtggctttccagcgtctaaccgggcgcgtcggtgctggcgcgccgatacctgagagacgacgcggagataagattgaaaaatggaatggggtcatttggcaaaatatctcccctgagccgatcatcgatttcttaacggaatatgagacccatgctcaggccagaaaagctaacagcaaactactggcggattttgttacgcggatgaatcgcgttgatgaactcacccaatggacggtggcggtgatagggggtggcatcgatcgccatcacgatgtttgcggcttttccgtaccgcttatgatgcgtaaagcgtctgaaggggtcactgaccgttattccattggccgtttactttccccacgcgatgaagggattgactgtgatgaatcaacttggcttgctgcgctggaagaaacgcagcgtatttttcatgccgatcccggacgcaatgaagggcgagaggagcccgtcgttccaggtggcgtggtactgcgtcggattaaaggatttggcattaacgacattccagcacagcgtcaaaaaggtttattgctcatttacttactggacccgcagcaggcattgtcggcagcggaatatcaggaagatgccttacctgtggtggcttttggcatcagttttccgggaagccgcagtggggtaacggtggagtacaaagtgaacaacgtactatgggagcaagagtatggtgcggctgagtaa

SEQ ID NO: 205051 - DNA, 1029 bp, Klebsiella oxytoca
atggtgcggctgagtaaagacgatctgctggcggcctggaaagccttagatcgatctcagatagacgaactgcctggcgctcagggctggcgcgggattcggctttttacgcaccagggctgtagctttcatgccgggcgtcgtcagcctgataatgaagaaatgctgattgccgtgtttcctcatcctctttcgcctgggtcggcggcgctgccatcttgtaaaggattccgcgttgagatggccggaacagaggagggggggcagaacggtttgatgatccgtcgccagcaaacagggaatgtggatgtctttacgacgatgattctggatattctccattcgctcctgaacgtttcgaaaccgcgcctgtttgaaactctgcttcgtcggattcgtttatggcaggcgtttatggagcgcgatacccgtccactcagtcaagaagaagaagttgggttaatcggcgaattgacgtgtctggagcggttgatcgagagcggtcttgctccgtcaacggcagtcgaagcatggataggaccgcagcatgggctacaggattttgcactcgatgaacgcgccattgagataaaaagcactacggcagcgaagggtttttgcgtaactatccactctcttgaacaactggactggcagcgggcaggatcgcttgtattgtgtggtttgcgcttcagcgagcatcccaccggcgcaaccctgaatgacatcattagccgtcttcgtcaacggtttgagggaaacgctacggcggcttgtctttttgagggatcactttgtcacgtcggatatttcactgaacatgctgaattctatacatgtcatttcttgctgacagaggcgttcgcactccccattgaagcggattttccctctttgacgcatgccaatgtcccgttgccggtggtgagtgcgcgctatcaactcgaactccagacacttattcctcaggcccaagattttaaccattgcttgtcagactttgcaggattaccgcatggaacttattga

SEQ ID NO: 205052 - DNA, 1806 bp, Klebsiella oxytoca
atggaacttattgattttttacgtcaaacccagaatgagattcgcaaggaatatcaggatcaaatggctcagccaggggttgagtcgccttttccggagctgatttttaccgatattgttatgcgtcatatggccgatatcggcatgacattcgatgatgccgagacgtgtcactttatggcgaaagtcagtggacacaatgtgcgtctcagcggttatgccttctcagaagatggcgatcaacttgacctttttgtcagtatttatcacggtagcgacgagctctgtcacgtcccggatgctgagacaaaagcgattgccggccactgcattcaatttttgcagaagtgcgttgacggtaaattatcatccacgctcgatcagtccaatgatgcctggcaactggtgacgaccatcgaacagtcctatgcggaactggagcaaatcagaatttatgtactgaccgatggtcaggtgaaaacccgctggtatcagtcacgggacgtggccggtaaaaccattaaattagaggttatggacattgtccgtttgtttaaccactggcaggaaggtaagccacgcgatgaactgcaggttaattttgatgaggtggctgggggggcgcttccctgtgtctggatcccggatgaaatgggtgagtacgattatgcgctgacggtggttccgggagagacactgcgatttatctatgaaaaatatggcaaccggattctggaagcgaacgttcgctcgtttctgagtcagacggggaaagtcaacaaggggattcgtgacactttacgtgagcagcctgagcgttttatggcttataacaacggcattgtgattgttgccgatcaggtcaggcttggtgaagcaccgggaggtggccctggtattgcgtggatgcaggggatgcagatcgtcaacggtgggcagacgacggcttccatgtttttcaccaaaaagaaatttccggcaaccaatctgcgtaacgtgcgtgtacccgcaaaagtaattgtgctgaaacagacgaataatgcacaagaagagatgttaattgcggatatttcgcgcttctcaaatagccagaataaagtcaatatttccgatctgtcagccaatcgaccagtacatgtacagctggaaaaaatggcaaacacggtgtattgcccggacggatacagtcgttggttttacgagcgagcaaatggcagttataaggttatgctggaacgagaaggtaaaacaccggcgggcattaaacggttaaaagacgcaattcctccatcccgtcgaataacgaaaacggatttcgcaaaatatcactgtgcctggctccagcgtccggatttagtcagcctcggtgggcagaagaactttgccgcattaatgacgatgattgacaaggatactgagcgttatggggatgaactgaacattgaaacttttaaaaattacatcgcacaggctattatttataaaaaagcctataagttgattaattcacttttccccgcatttaaggcgaatatcgccgcctatactgttgccgcctattcacatctttatggtaacaaaacggatctggcagagatctggaatcaacagggtatcgaggaaactatggggaatcgtcttgtcagcttggctcaccgagtaaatagccttctgactgaatcggcaaatggcaggatgatttctgaatgggcgaaaaagccggaatgctgggactacgtgcgcagtaaaatctatttctccgcacagggaaaaaaggatgacttctcgcatggtgaaattgcatga

SEQ ID NO: 205053 - DNA, 528 bp, Klebsiella oxytoca
atgctgaaaggcaatctgtttaaccagcacctgaatgcccgcatgagttccggcggccatgccgacggaagttacaccatccccggcttaggtggcagcctagtttccgggtataacgccagattcgccaataccacactttctccctttgtcagtttcacgggcttcatctcgcaaagtgatgattactggctatcgaacggaatgcaggcacatccttgtacggctaaatctgcgctggggcaagtcgggtttcggctgcgccagaatattactactcacagtggtatgcagttcattccgtggctgaaaatcgcgctggagcaggagtttgtgcataacaacccggtcagggttaatgacgataatttcaataacgatagcgccggaacacgaggaagctaccgggctggcatcagcgccactctcacgccgcacacgcatatttacgccaacataaattacgagaaaggtgatgggatggaatcgccgtggaccgggaatgcgggtttaagctaccgcttctaa

SEQ ID NO: 205054 - DNA, 1134 bp, Klebsiella oxytoca
atgacaccgtatatccaggcgctgatcaatatgaccggcgacaaactccagcaacggatgcaaaaggatccggcaaccgcttccgatagcctgctgtttatgggcaatcagcatgacacggttccgcgtcgcttattgcaggatccgctgctatcgcccagagataaattcgcctggcaggtgatccggatgcaggcgcaggacaacggcggcgcggtgttcccctcctacagcgaattgcaggtacagctctctaaccgcccgcaggatgaaaaagcctcgcgcagcaccgtcagtcgggcattgctgatgctgcgcctgacgcgctggctcagtctgtgccagaaagcgcgggatcgggtatccgggcgcatcctcgggaatatctatgccctgcacgatgaaccgctgagcgtactggacgccgtgcgctttgatgccagctatcttcatctgctggaacagtgctcgcgacatgaaaacaaatctattcgcgctactgcgcaaggtattctgtacgacattcgccaggacaccagcctgcgctacttatcatcgcgcattgatctgctggaagaacgcgcccgctggcagcagcgccggtctcctgtggagactaagccagaaacgtccggtcttaatacggtaccaggaaaaatttcacctggtaccaaatcgggactaagccggaaaccggggcctgacggcttggtctcaaatcagaaccaggctcctgtacgtactgtacctacagatctttgtaatagtactaccgcgcgcgcgaacaactcgccgccgaactggccgccggaaattccgttaacccatcccgaaaagcagcttgtcttgcagaccatgctgaacctgccgcccccgctgcgccaggaagtgcttgatgacgcagctcaacgcgttgcccgtggtggcatacaaaacccgctcgcctatttgctggcaacgctgcgcaaagcgcagggcggtgagtttaatcagtatcgacgcggcaaagcagcggtgccggagtttgtaccgcctgtggtttcagagccggaaataccggcaaggccgcgccaaaagcgggatatcagtaagttagttgcggagattcgggcgcagtgtctggggagtggctga

SEQ ID NO: 205055 - DNA, 540 bp, Klebsiella oxytoca
atgctgccgacgattaatcaggccgttttgtcacaggtaatacaagccctgaaggacggcaatgtacgctattgcgaagcgctgggctttgaccgcgaggagctgaacgaacttaatgacctgacctttgaggagttaatgcacctgggcaacacctcggcgcagttcctgaaaatcaccattaaccacgatgtactgcgcaaaatgctggttcaggtgcgtcaggagcaaaaattccaacaactggtcggccaggcggtgcagcttggcggctcaatagcgttaatcagccactacttcggcatctcgaccgctgaaatcagcgcccgccgtcggctgatggggatccacgttcgtcaggggcgcaaccaggttcccggcgaagaggaagaagccgcactctggaaccgctggcaggagctcaaagtggataacatcgactccatacccgcactggaagccatgatgctgctggcgcaggaacgttcgctctcactgaccgtggtctggaatctgatccggcagtgggagaaaagctga

SEQ ID NO: 205056 - DNA, 1485 bp, Klebsiella oxytoca
atgaacaacaaactgacttcgacggaactccagtcccgcctgctacagggcaattttgatcgggaaagatcgcctgatgagcgatttgccgatccgctgatggaaacctcaatgatcgtcacgctggaacagcttcgtcctttcgatctcaacccacggttgatgcgcaaccccaactatgacgatatcaaagcatcgatccgtcatcgtggactggacacgccgccgccgatcacccgtcgtcccgatcaggagtggtacatcatcgccaacggcggcaatacccgcctgtcgatcctcaacgaactgtggcgcgaaacgcatgacgaacgattctggcgcattcagtgtctgtacaaaccgtgggccggtacatccgatcaacccatgctgggcgaactgcgctgcctgatcggccatctggcggaaaacgatctgcacggcaaactgagtttcatcgagcgggcgctggggatcaataaagcgcgggaactgtaccagcaggtggaaaagtgccagctttcgcagcgagagctggcggagcatctgaagaacgacggctaccccattaatcaatcgcatatcagccggatggaacaggcgctggaatatctgctgccctgcatccccgaagtgctgtacgcaggaatgggccgctcgcaggtggaaaaattgctgtcattgcggtcagcatcattacacctctggcagcgtcacgccgccgaagacgacggttcctttgacaatctcttttcttctgcgctatcgctgttcaacgaccagcctgaagacttcgctattgaacgggtgcaggatgagctgctggggctgatgagccaggagctgaacgttgattacaacctgctattgctggacgtcgatccttctgagcaaaaacgccaggccgtgctcggccccacgccggaaccaccaccgtatataccgccggaagaacccgaaccgcacccggtaacgcgcaggcgtaagcctgaaacagaggaagaggacattggcacgccagcgcctctgcctgaatcagaagaagcgccatcgctattgtgtgaagggaccgaacccgtaacggatatctggcgcatccctcagttgtgggataccacggagtccttacgatcggccagcgatcgcctggcgtgggatctggcagaacattacgccattgacgaccaggtgatttcggatgctaacgaaaatggcattggtttccaggtgatgccattcgcatcagatcatcccatgttcacccggccacagtcccgcgcctgctgggcgctgctggcagcactcaatgatatcccgctgacagaagatctggcctctgcactgacgcccacactcttttttcaacgcgatgcggacggcttcttcttcagcgatgaattccttattaaagcattccggctgatccgtattgtccgccggatcaaagaattacagcaggaggcacaacatgctgccgacgattaa

SEQ ID NO: 205057 - DNA, 1356 bp, Klebsiella oxytoca
atgagtaagcgtaaacggccacaaccgccccactccgtcgaagcggaacaatcagtgctcggcgggctgatgctggataacgatcgctgggatgacgtcgccacgcagatttccgcgcaggacttctttatctccgcgcaccggacgatttattcccatatgcaaaccctggtcgaacagggaaaccctatcgacctgatcaccctgagcgaatcgctggaacagcaggagcaactcgaacaggtaggcggcttcgcctatctggcggagctttccaaaaacacgcccagcgccgccaatatcattccctacgcgcaatacatcgccagctatggtgaactgcgtcagcttctgcttctgggcaatgaactgagcgatatggcaggccagccgcgcagcaatgtggccgatgtgctggccttcgccgaacaaaagctgtttgccattgcgcagtcgcatcaggatggtggcctgaccgacatcaacgcctgctttgacaacgtgctggcaggcatcgcccaacgctacgaggccgaacgcggtagcctcagcggcacgccttccggcctggaacagctcgacgccctgacctgtggcttccagcctgccgatctgattatcgccgccgctcgtccctcggtcggcaaaaccgccttcgccctgacgctgtgcgtcaacgcgctaatgctgcgccccacccagccagtacaaatctacagcatggaaatgtcgtcggagcagctactgctgcggctggtttctctgattggccgcgtctcacaaacccgactgcgtagcggcgatctcggtgatgacgactggcatcaaataggcgtcagcgccagtatcctgatgaacgaatggaaagatcgtctgctgctcgacgactccgggatcctcaccccgtctattttacgcagtcgggccagacgatcgctgcgccagtacgggcttccttcgctgatcgtggttgattacctgcaactgatgcgcagcggcggcgcggagaatcgcaatcaggagatctcgacgatctcccgctcgctgaaagcgctggcgaaggaactgaactgcccggtgctggcgctgtcgcagcttaaccgggcgctggagtcacgccttaacaagcgtccctgtaatgccgacctgcgcgattccggctctatcgagcaggatgctgacgtcatcttattcctctaccgcgacgaactgtacgatcccaacacgctggatcggggtatcgccgaagtcattgtcagcaaacagcgcaacggcccaattggcacggtgcgcacccgatttatcagcgatcaaacccgtttcgaatcgctcagccagcagggagtggggtcatga

SEQ ID NO: 205058 - DNA, 375 bp, Klebsiella oxytoca
atgaaacggaaaatctggcgggcattttgctcttattacgcccagcatcccttcgagaaagacgatgaagtgatcgtgttctttgaagctgccgatcgtgaagaagcgcgggaaacgttgccggtattaatgtcgctgctctggcatatcccaccggaaaaggtggactgctataacctggaggatgaaaacgaactgcgggatacgtccggttcactgacgtcccccaaggactggccgttatttgaagtcggctggtccaacaataagccgttctactccagcgatttgccacttttactgctaccgccgcatcaacagacccggttgtgggaagcctttctggcctgtcaggagggtaatcgggatgagtaa

SEQ ID NO: 205059 - DNA, 885 bp, Klebsiella oxytoca
atgaaaaacgcagatgcaattgatttaccaacactaattgccgccatcctctccaccaaaggtggcgtggcgaaaactaccgatacggctaacctcggcggctacctggccgatcaggggttgaaagtcctgatgattgatgccgatatccgccagccgacgctcagcagctattaccctcttgataacgaagctccaggcggtatctacgagcttatcgcgcagaacgagctggatccagcgatcatcatctcacacacctccattcccggactggatatcatcatttccaacgatccgcgcggcgagctgatgagcctgcttcaggctgcgcccgacggcgtaatccgcctgcgccatctggtacgccagataaccggctatgacgtcatcctgatcgataccattggcgcacgcaccatcgcgctggaaatggtgctgttagccagcgatctcattatctccccggttctaccggaaatgctctccgcacgcgagtttctgcgcggcacgctgcaaatgtaccgggatctccagccctttacccgctacggtatcccactgccgcctctgaaggcggtgattaacaagctcgaccacaccaacgacgcccgcgaaattcaccacaacctgcttcaggttctccagcacaaacagaaagagcaggagctactggttcccaccgagatcctgatgacgccggtttacgccagcgtggcctatcgccgggcagcatcgctgggaatgccggtacatcggctggatgcggccagaccaaaaggacggacaacgccttgcgcggcagaaaccatgcagatgctggctaaagaactgttcccgcagtttctcgccctgccccatcagcggatggagggcatagcatga

SEQ ID NO: 205060 - DNA, 1104 bp, Klebsiella oxytoca
atgtatgcaagtttattgtcttataaaaatttaaaactcgaaagcgaaggtagagaactgagatctattacagagttttatttatattctgacagtcgatttacgaatgatgtaaatgacaattcagtatactgtttcctgaatatgcttccacgacagtcaagacatccatcggttgagccgtcgatcactgttcgtgtcagatggcacagcgatattaatgaaatgatttttgcaggcaccaagagttacacaaaagactttcatggcggatggtataacgatgaaatagcagctctttcaagtttattactcggtgttagatttcatgccagctcctttactcgtcatattgattactccactggtgaatttgggtaccctcaagctgatcattctctgccaccatccttatcatttaaaaatagcattccaatcgttccaagcgcttcaaaacaaatagatattggcattcttaagaatcttaataaatcacatttaatcattgagaaaaactttaactatctaataaaatcagctaggagttatcagaatgctttatggatttgcgagtcatcgccaaacatgggctggctgctacttgtatctgctctagaatgcgctgctgatcaatgggcaaaatcaaaatcatcaagggaggaacgatttaagcaagctaaacctgatttatatgaacaattggataccaatgaacttaggcatttaattcctattattgctaaagaattttccacctcatttggtgctacaaagaaatttatagatttttgcacacatttcctgccagatgaaccggaaatacgaccaaaaacaggcaaaattgattgggacatcgaatcattgtcggttatttttaaaaaaatttatgattaccgctcgaaggcgttacatggaggacagccattccctgaacccatgtgctctcatcctgaagcctgggatggatacgcagaacgtgcaagcccttgctcaaccttaggtggaacatggttagctgatgatgtccccataaacttgaatacattcaattatatggttcattctatcttaaacaaatggtggctatctttattacctagctaa

SEQ ID NO: 205061 - DNA, 576 bp, Klebsiella oxytoca
atgtctataataaagtctgatttaggctggtatccaccgcagggacgatggctgacacgctttgtttttatcgctgcggcgatattgctggctggttgtgacaggcctgccatagaagagagtgttagcggcggtagcggtaccatagaagcggttaaccatacccactgggcgataaaccatttcagcgtagacggacagtcagggctggatattatcggcccctggcaggggggcggcggtggctgctgttacggtgtgccggcgaaatggaaaccgggaatgacggtgaaagttgagtgggaaaccggtgtgggagggtctaaaggttttcctggatttgctaatacagataagtacttagaatggggaaaaaaaatcaaagctcaaaaccggaaacatagccagacagtatctgttcccgattataccaggcaaaaaacctgcggaataaaggtccactttttaccctgcgatcaaataaaagtcaccaccagctgctacgactacggcaacccaaattatccgattaaagatccgatcaaaatggaggaacccaaagtatgtccacaataa

SEQ ID NO: 205062 - DNA, 1203 bp, Klebsiella oxytoca
atgaagggaatgcagaagatcaaaaggggtaagagcttcgctggtgttgttcaatatgcattgaagccaggttcacatcataaaagtgatccaatcgtcattggcgggaacatgttaggtgattcagcccttgaactgatcgctgaattcgatagcaccaaacatcttcgccaggatgtcgcaaaaccagtttggcacaactcgcttcgcttacccaacggtgaatcactaacggctgaacaatggtccagcatcgcagatgactatatgaggagaatgggattcggtgatacccatctccgttgctatgtgcttcatgacgattcggctggtcagcacatacacattatcgccagcagaatcgacatagctggtgggaagctctacttgggtaggaacgaaaaccttataagcacacgaattattagtgaactcgaaatcgctcacggtctgacagtgaccaagacagcaccttccattacaccaaagcaacagaagcgaagaaaggtatcccgtaatgaacaaatgctttcagaacggacaggccttccctcccccaaagaagctctccaacagatacttgataaaagtttggcagatacacctgaccttttaacttttatcaaaaggctggaagaagcaaaagtcggctggacggctaacattgcttctaccggtaagatgaacggcttctcattcgaataccgcgatatagcattcaaagcttcgcaattgggtaagagctactcctgggcaaatctcagtaatcggcttaactacaaccccgaccacttagaagctttacgaaccaacacaccggcaaaagaccactctgctcctgctcctgctcctgctcctgctcctgctcctgctcctgctcctgctcctgctcctgctcctgctcctgctcctgcaatagttttgaaaaccgctgagagaaaggaaagtatcggtaaaaaaattgcagaactggaactacggctcagagaagacaaacggaacgaaatcgtagaaaagatccttcaaaagaatgcagccaaacagcaaaagcatctcaggctcaccggctggattccctttttacaacggctcatagagcttctcagaaaatatggaaagagcatcctccataaggttcctacaaacttctcagaagtctattcaacacatcatctgaaacctacaagaaaaattcgtttatag

SEQ ID NO: 205063 - DNA, 414 bp, Klebsiella oxytoca; identical to SEQ ID NO: 85124

SEQ ID NO: 205064 - DNA, 573 bp, Klebsiella oxytoca
atgaccacggacttcatgtatactggttttttatacagttatggtgggtggtgtatgcttaatggatttgctcgctatgctttgactgctagttcggttgccccagtttgcctgacattggcattcttagcttatattaatgataattataagattcttgtttcctcaattcttttggctgtcgtaagtgtggttttttgtgtctttataatcaaacaagcacaaaaatataatccggtcacattgaaaaacttagaatcggcatctccggcagataaggaaataaccaactatttcttgacttacttatttccacttatatctgggccgaccacttttatggattggcgattagctctatttttttatttaagtcttttcttctacataaaacactcgtcttcgtatagtttcaatccaattttgtctattatatttggattcaagttctatgaagccgaagatgacaccggggtgagctttgttcttttgtcaacaaaacctcttaccaatgcgaagatcaaaggtttgagggtaaagaagcttactgaacatacctatatgattgtataa

SEQ ID NO: 205065 - DNA, 894 bp, Klebsiella oxytoca
atggaactttttgcgattacagacagcgagataccgactagaataattaagattgacatagatgctcccgcacaaacggtagtagaaaatctatttagaactcagagaagtgagtttataaatgaagatatcgaagagatagacttttgtgcatcttataatgttcaggatggtgaaatattttctatcaatccatttgatgacgaaataggcattattaatgcaatcgaacggcctgatgctgttccggtttgggaccctgatgatgtgtcagttcattattttaaagcgttatttacgggtgagccagcttcgaatggtaatcctactcaggtttggcttcaatgtttcgacagacgacaaataattaataatgaaaaatcctttttccaagtagtaactcagcctggaaatagattctcagtgtccactcgtcctggtttttcgcttagtgatcgattaactgctattcttgtgggtgataaattattgttcaagagtttctttatgctccggcgattttttaacatggaagagtattttaatgaagctactagagaggatttagataactttatcggtaatgatatatttcatgtggaaaatgctgaagattttatgacgtttgcagattctgcaattaaaaagaaagtatctttgataataagttctggaatactcaacgatcagcctattgaaaatctaattgagtgtgcccagaagattggatatcaattaggtataactaatgtgaatggtgacaataaaatcactatgccaaactctaaaagagaagtgaagcaactattatatttcctcgatcagggctacttcaattcaataatcacaaatgagttaatgttgacgaattcgaagcgaccaataagaatttga

SEQ ID NO: 205066 - DNA, 303 bp, Klebsiella oxytoca
atgcataaacgttttggtgaacttattgattgggcaaatgagcattatgatttggttatcgtggatacgccgccaattcttgcagttacagatgctgcagtaataggtaattacgccggtaccacactattagttgctcgttttgagcaaaatacagccaaggaaattgaagttagtattaagcgcttcgagcaaagtggtgtaaatattaaaggttgtatactcaatggaattgtgaaaaaagcgagtaattattatgggtatggatataaccattacggctatacatacaccgataaataa

SEQ ID NO: 205067 - DNA, 1227 bp, Klebsiella oxytoca
atggaaaataaaaacaagataaaagatgagaaaaaacacactttgtggattaattatttcttagagaagttattaacacacacagaactgaatccaccgtttaaaatcaaaggggatatcgcaagtgatttctccaatcgttgcaatatttacaatgaccttcttgatgttgtaatcaaagaaaacgtaaatgagtgtggacgctaccttaaacccttcattagcaggataaaaaatattcaaacttgtatccagaagtctttagaggagtttttatccggtgacattaagtcagcatatgatgtatttgatgaagtgatgtctaaagaggcgacagtaactcaactgaattatatcagcgtattgcttaaggatatttgtagtaaagatgaacctctatatcgagtaagaaaatcagaatctgccttaacagaccacgaacatattttccacataccattttcaaaaagatatcttgttaatgctcagcgctattctgttgctggtcaaccatgtttatatcttggcacatctttatatgtttgttggcaagagatgggaaaaccagattttgacaaactatacatatcatcgtttattactgatgatgataaatcaaaaatattaaattttgcatcacaccacctaacgcttccaataaaaaacacagccagtgatgaacaattatattttgacaatagaactaaagcatcttattttatattttggccattaataatagcttgtaattatctgaaaacaaatgagagtgcctcattcacgccagaatatatcattccgaatcttttaatgcaatggattggacgtcgagtcaaatccccaattgctggaatagcatatttttctactaaaatgcccacatcaagaaatagcagatactcaatcaatgtcgtattaccacctaaggcgacatataaacagtcggtaacgaacgaatactgtccaagattgagttcatcgtttgaatttacagcaccaatgtcttggcaagtacttaaaactcttgattatcaaaaccatttacccctttctaaagagcaagagaatgcaatcatgtatctgaagaaaaaagaaaagctctcaggtattgcaaactttgaggaagatatcgtcaaactatatccacttactgatttttacaagttacaactactagtagatcgactgtttaagcatcaaaaaatcgttcaaaaggtgtcgagctaa

SEQ ID NO: 205068 - DNA, 201 bp, Klebsiella oxytoca
atgctgaacaatgaaccttcatttgcgtcgcttcttgttaagcaaagcccggcaatgcactgcggccatggctggatcatggggaaagagggtaagcgctggcatccgtgccgctcgcaggatgcactgttggccgacctgtccactatccaacaggggaaaccatggctattgaaggcgattctgcaactgttccgttaa

SEQ ID NO: 205069 - DNA, 1164 bp, Klebsiella oxytoca
gtggacaacggttcaattactttctttgatattactgcatgtggtttttatcgtctgaagaataagccggaggagctagattataagtttggcgaccttatgggggttctggacgatctagagggttggctcaaagacaaaaattttgaacaaactttgccatggaataaagaggagcagccactacgaacgcgggtttacagcagaggtcttgttagagatggtaagactaatgatgcggtaattgttttatatcgcgaagttgggaacggcaacggtatacatggtataaaagtcggttcaaaagtcagtggcgatagtaaaggaactatcagagctggaagagaacatggcgaagataaaataatatggggtgaaccctgctattactggattattcctgagttaaataaaatagcatctattagatttcctcattctttcgctgatacctatctttttgggcaatacatcatacagcatgttaataataatagtaagctagggaaaagaacgaaatctaaaagaacatttgaatctgccaaaacccccggtcgttgtgtagacgtctacaatactaagtttaagtatcaagatggtaagaatgagataaactgtatattcaagtttgttttggaagagacgaaattgaaggcggcagaggaaaactttgaaaggctgagacataaaatcactcataccttgattaaggatacgacagtgattaatcagcaggatacgaggcaaccgttattaaagttaacaagtgttgctttagcctctcttgttggagaggataatcgaaataagcttattggggcacctcctgtattggagcaacctcgtagaattgaggtcaaaattgatggcgctccgtcatctgatgagctgaaaaacctgttctcaatgagaggtgatgagtctgaatgggatgttggttttttaatgtcggatcgcgcaaatccagtttggcttagtagctacgtagcaaggaccaggctcccccttagtgattctgatgggtctgagcattactcagcaagttttttattggatgagataaacaaaatacgtgatgatttgataagtgaagtcaaatttgctgaagaagcatccataaaagaatctgaagctgcacccacaaaaaagatagcggaaggttga

SEQ ID NO: 205070 - DNA, 537 bp, Klebsiella oxytoca
atgacagaaacggaaagtttgataataacagttgcgaaacagcaggcaataaattttgttgctgttgttttgtgctgcgttataagctatttttcgtttaagaatttttcttataatgacgcaaaagatattttgggagtgcttataaatatatctgcatctatatttactatagttgggttgtgggttggttttttatatcctaatgcaatgaatagtatcgttaaagatgatgttagttatataaaaaatgagcatgattcaccaagaatagaaaagcttgtttatacaataattacatcggctttcgtcatggctggaattcttgttttctttttgtctaaatcaataatttatgcattgcctatctatcatgcacataaagatttgtttaaaattgtcgggattttctttatctattttattagttggatgcagttaaaatgtgtgttaagcctgattctgagtaacctgcattttgttaatcatttgcatgggcgtttagctaaagcaaaattagagcactacgatgaataa

SEQ ID NO: 205071 - DNA, 297 bp, Klebsiella oxytoca
atgaaaacgacatacagctatgactttcagtacttgcgtaaaggggagcagcgccccgatgatgatggagaagtcgttgggtgtaattcagatgataacccactgctaatgctgcctaatgtaggtgactacatctcgatcacgaataaaggagggcgtgcgcaatttgatggaaaagtaaaaacaaggttgttttcatatgtccgtattgatgatgaccatgtccattgttcaatttgtattgtggttgaggaggttgatatggatcagatatggggaacattaattaaagaataa

SEQ ID NO: 205072 - DNA, 801 bp, Klebsiella oxytoca
atgtataacgaggtgatctctacttctgtttctttactgaaaacactcgataacattgagaatgcagactgttatcaatattattattttatggcaacatcattcaggatgctaggtaaatacgatctagcacaaaagcacctaacacaatgtttagaattatgttcctctgacgataaatctatgttagcggattgctatattgagcaactgtatatctacgaaaaaactgataagaacaaagctatcgaattagctaaaagaagaaaaaaagagtttagcagcagtagtctcgcttatattatctctgatcaaatgatgtctatcaaaaaagaacgtaaagaaagaatcaaatcattaaacacattgataaaaaaagcaagaaaattagaattccatacaactgcaaataatatggttctcgaactgagcgcagataaaagccatgaagaaaaagttacatctttagatagcgtactatcttctgaaaccagcgtctacaaccaatgcagagcgatcattcaaaaatatgaatcttatatcgaaaacaattcatttgaaaaaataaaagaagacgatatacgtaaactaaaaaatgtttacaactatctattcaatcaacgttttgattacctcttccagagatgccattctattctatggaatatagccgaatacagaaaaaataacgatatcatagccatgatctactttaaggggagaataatttggattctcaatgatgatacagaaaatgaattgaggtacagtgaaaggtttaactccttttttagtgcatga

SEQ ID NO: 205073 - DNA, 579 bp, Klebsiella oxytoca
atgagaatagattctttaggatggagcaacgtagatgtacttgaccgcatctgcgaggcgtacggattttcacagaaaactcaattagctaaccacttcgatatcgcatccagttcattgtcaaacaggtacacccgaggcgccatctcctatgactttgcggctcactgtgcccttgaaacaggtgctaatcttcggtggttacttaccggagaaggggaagcatttgtaaataacagagaatcgagcgacgccaaaaggattgagggattcacattaagtgaagaaatcctcaagtccgataaacaactgagtattgatggccaatttttcacaaaaccgctcacagatgggatggctatccgttccgaggggaaaatttattttgtggacaagcaagcatcattgtctgacggcctatggctagtcgacattgagggagcaataagcattcgagagttaacaaaactaccgggcagaaaactacatgttgcaggcggaaaggttcctttcgaatgcggcattgatgatattaaagcgttggggcgtgtggtgggtgtatacagcgaggttaactga

SEQ ID NO: 205074 - DNA, 936 bp, Klebsiella oxytoca
atgaaacttaaaaaattacagtctcttgattttgtgaatgactttctctgtcatttagacacgaatttcgaaatagaattatttacagcatgtttacgcaactactcttcacacggtaaccctctgagatttcataactttgctttttcgattcgggaactgataacacatataattgacaaaaaatcacctaacgaaaaagtgaaagaagcatcatggtatgaaagagaacatgaacattatgaaatctcaagacgacaacgattgaagtattgctctcaggcaaagatttctgacgcatacctaggtgaagagtttttagaagagtcaaacgaaagaattgatgaaatgttaaaactctatttttttctaaataaatatacacatataacagaaaaatacatgcacccctcccctcaggagtttttcttaaaagccaaacagatattgcagacagcaacagaaatactaaatggtatagagaactgtagagacgaactgatacatactttagaagataaaattagagatgccgttattgatacggccgtgagcaccatgcctgagagtcttataactatcgcaaatcatgcgtatgtggattatacagaagttgaggattttggaattacatccattgatgatgagtatataaatatctttgcaaaaggcactgtttatgtcacccaggagtacggttctaagcatgatggagtcagtttagaagaaagttatcccttcacgttacaaatggcatctcacttagactctcctgagacattcgaggtcgtatctgaagctttggaagtagatacttcatcttggtacgatgatggagagcaagaagctcagatgatggagatggaaagaaccagcgttcatcaagtccttgtatcatcctctgattttgagactgatgacagcacaccattttag

SEQ ID NO: 205075 - DNA, 411 bp, Klebsiella oxytoca; identical to SEQ ID NO: 109632

SEQ ID NO: 205076 - DNA, 324 bp, Klebsiella oxytoca; identical to SEQ ID NO: 109633

SEQ ID NO: 205077 - DNA, 846 bp, Klebsiella oxytoca
atgcccgtaagtcatgaaatgaataataccgttgttgcctgcgtggacggttcgtcatcaacacaggccgtctgtaaatatgcggcctgggcggcctccgcgttgaagatatctgtggcccttcttcatgtactggaaaaaagtgaccaacctgtggtttcggacctgacaggaaccatcggcttagacagtcgggaacattttacagaagagctggttcgcattgagggcgaacgtaaccgattgttgatggtacagggtaaagccatcctgaaaaattgtgctgagctgctgacagagaaggggctaccggagccaaagcaactgcaaaaacatggcgcgctggacgggattttggctgaattgggtgatacgcgtcttatggtgctggggcgccgcggggcatctaatccggtcggaagccatattgagaatgtcattcgtctgcaaaaaaatcctgtgttaatcgtacccgaaaccttttctttcccttcacgcgtaatgttcgcctatgacggaagtgaggcgagtctggaaaatttgcgccgactttctgtaagtccattgttcttaaatcttacgtgccacctggtgatggtgaatggaaattcagaatcgctggatgcagctcagtctctgttgcaaagagctggcataaccagtcaggcaagtctgctgaaagccgataccgtggctaatgcactgtgccgctacgccagggaacacgggattgatcttatggtcatgggagcgtacggacattcacgcctgcgcagattctttatcggcagcaacacatcagagatgctatctaatagcagtcagcccctgctgatgctcagataa

SEQ ID NO: 205078 - DNA, 129 bp, Klebsiella oxytoca; identical to SEQ ID NO: 109474

SEQ ID NO: 205079 - DNA, 480 bp, Klebsiella oxytoca
gtgaagttctacgcgcggaatgttgaccctaatgagcgctatccgtggacagaatgggtttacaccggtgagaataaaacgatacgcgtcggcaaagcggacggttcagacgtcggcgcgatcggcggcagcgataacgtcacgctccagcaggctaacctgcctgctgtgcagattgacgtgagcggcaagaccagcgaacaacctgagcagacgctgaccacgaaaccagccggtaaacataagcacggcggcgtaccgagtcgggataatccgtgggagattggcggtgatatcaaccagcgttttaatccggcgaacctgggcgaaacggatgaggccgatgatcatgagcatggtattgatatcccaccgcatcaccatgacgtcaccggtaaaaccgccaacctcggcgaaggtaaatcgttcagcgtggtggaagcccacaccttgctgatgtgctggagccgcgttgcctga

SEQ ID NO: 205080 - DNA, 285 bp, Klebsiella oxytoca; identical to SEQ ID NO: 200288

SEQ ID NO: 205081 - DNA, 888 bp, Klebsiella oxytoca
gtgctgggtgagatgacaattcttagccagcgcagcccttttgatgttgttaggaagaaatacatttctcaaatgtcagagcatacagggcgtaatgttattgcttactactctggttttttacaaaaaaatactcaatctatcagtcacttaatttcaatgactgatgatgataaaaatggatttatgactgctattaatggcatggatacaagcaaggggcttgatctattgatccatactcccggtggggaaattgcagctcttgaatcattgggtcaataccttagggctaaatttggtactaacatacgagcttttgtaccgatgatagcaatgtctgctggaaccatgcttgcttgttgcgccaacgaaattttcatgggtaagcaatcgaatatcggccctttcgatcctcagatggggggtatacctgcacatggtattttggaagaggtggagaaggcgaaacaggagattctcgctaatccaggtactgtggcattttggcaattcaatttgcaaaaattgcatccaacctttattggtgattgcgagaaggctatccaatgggcttctgaaatagtctctgattggttgatttcaggtatgtttgcgggtgaagttgatgctgaggataaagccaattcaatttgtcgccagttgaacaatcactccacaacttatgctcattctcgtcatatacatatggataaagcacgagatattggtctgaaaatatcctctctcgaagatgaccaagtacttcaagatcttgtgttgactattcatcatagctttatgcatacttttgggagtagtactgcggctaaaattattgagaatcataatggtagctcaatggtttggaacgctgcggatatgtaa

SEQ ID NO: 205082 - DNA, 204 bp, Klebsiella oxytoca
atgacagcagcagagctttacacgaaatttgagatccaaccagcagagtacaaccccaatgagtcaccctttgagtttgcaaaaagggtgatcatctctcatccaattcttgtggaacagacaggggttagttattcatcaggaaccaataatacagggaaaaatgatgaacaaacaaacaattatgccatgtatagctactaa

SEQ ID NO: 205083 - DNA, 1077 bp, Klebsiella oxytoca
atgcagatcctgttgtcggaactggaacacggctatcgctatccgcagcagctgccgccgccgcttcccgttaccttcagggattatctgcagcaacccgcgctgcagacgcccaatcccgactctctggcatggtggcaaacgcagctagatgatattcctccggcgcctgcgttaccgctacgctgcttgcctcaggacgttgagacgccgcgcttcgcacggctcaatggtgcaatggacagcgcgcgctggcgtcgcctgaaacagcgggcggctgacgctcatctcaccccgtcggccgtactgttatccgtgtggtcaacggttcttgctgcatggagcgcacagcccgatttcacgcttaaccttacgcttttcgacagacgaccgctgcacccgcaaatcaaccagatcctgggcgactttacttcgctgatgctgctgagctggcatcccggcgagagctggctgcaaagcgcgcggttattgcagcagcgactaagcgagagcctcaaccaccgcgatgtatcggcaatacgcgtgatgcggcaactggcgcggcggcaaaacgtaccggctgtcccaatgcccgtcgtctttaccagcgcgctgggctttgagcaggataacttccttgcccggcgcaatctgctcaaaccggtgtggggtatatcccagacgccgcaggtctggctcgatcaccaggtttatgaatctgaaggggaactgcgctttaactgggattttgtcgccgccctgtttcctcacgggcaggtggagcgccagtttgcacagtattgcgccttgcttaaccgaatggcggaggatgacagcagctggcagctgtcgctcgccgacctggttcccccgcttaaggtcacggagcaacgcgcccaccggctgcgccctgagcgcactcagccgcgggtcgcggcggacgagagcagcgtcagcctgatttgcgacgcctttcgtgaggtggttggcgaacctgtcgcacccgcagagaacttttttgaggcgggcgccacgtcgttgaatctggtgggggtcgtctcagaaaacggaaaataa

SEQ ID NO: 205084 - DNA, 324 bp, Klebsiella oxytoca
atgatcagagatacagttatgaacaacgatgattatgatccattaacagatttactgattggagaagcggtcttatccctactcaaaagtaagggacctataagtcaacaagcgctgatcgataaactccaggccatgcaggcgggagaagtcgatacaaagcggcggaacacccttgggcatattatcgaggaaatcagtaatagggtatctcgccgtggtaagaaaataactctgggtacttcagacgctaaaaataattgggcagaacaaacgactttattaggttctccctcgcagcctggtacaaataaaattcactga

SEQ ID NO: 205085 - DNA, 732 bp, Klebsiella oxytoca
atgttagacttagaatatgctgtaactgaaccttttttaaattaccatttatttcatgaaggattaaatacgaaggttaaggttttaacctcatcacttaatcatgtgattgaatatttattgacgccaggcaatgaaaataaaatgaatgagctcattaagaaaactgataaatcttggcaattcccgccgaatttttcacttccaaaccctccagtcgatgaatcaagtttaaaaagtaaaatatcatcaaaaagaccagataaggtagatgataataatgaattggattatcaattaaagaaaaaagaattagcgcaagagatgctgtattggtatgtaagtgaaatggctatatttggcagtttttctgctttggatgattgtattgtcgatattgattcttggttttcaagttgggcgatgtttaataacactcaagataaaaaatcggaatcaaccagtagtaacaaaattgaaaggttatatgactcacacgaatgggacatgaaaaacataaagacattccttccgatttatgagtatttttcagcagttagaaattcaatagctcataggcaatccaaagcatctcataagctatcagagatatcaaaatcccaagaattaaaagagtcagtagagagaaacttcccaaaaggtaaaccattaagtgaatttgaatataatgaagatatattcatctctccaaaaacgtcgttgctttgttaa

SEQ ID NO: 205086 - DNA, 1251 bp, Klebsiella oxytoca
gtggaatacttgccgatatttgccgaagtgaaagagagacccgtgctggtgatcggcggcggcgagatagccgcgcgtaagattacgtttttgctgcgcgctgaagcgaaggtgcacattgtcgccgaaacgttgatgccggaacttgccgaaaaggtcgagcgcgaggaaattcagtggcgggcaaccgtattcgaagagcagcagcttgatgacgtatttctggtgattgccgctaccgaagatgacgagctgaaccaacgcgtttatgtcgcggcgaacgcgcgctatcggctggtcaacgtcgtggataatcaggcgctgtgctcgtttgtctttccatccattgtcgatcgctctccgctgctggtggctatctcttccagcggcaaagcgccggtgctgtcgcggattttgcgcgaaaaaatcgaagccctgctgcccaccaacctggggcggctggctgaaacggcgagctactggcgtcaccatattaaaacccatctgaaaaccaccgccgaacgccgccgcttttgggagcgcgtgtttaccggtcgttttgccagcctgatgctggcgggcaacaaagccgaagcggaaaaagcgctggaagatgaacttcggcagccggacaaacgccccggtgaaattatcctcgtcggagcggggcctggtgatgccggattgctgaccctgcgtggcctgcaggcccttcagcaggcggacgtggtgttctacgacaacctggtcaccccggaggtgcgcgaactggtacgccgagacgcggagacaatctgcgtcggtaaaagcgcttccggcgtatccgtaccgcagcaggagatcaaccgtttgctggtggatgcagcgaaagagggcaaaacggtgattcgcctgaagggcggcgacccgtttatttttggccgcggcggcgaagagctgcaggccgcggccgaagcgggcattccgtttcaggtcgtcccgggcgtgacggcggcggcggaaatcagcgcgcagctgatcgccaacggcctcgatggcgacaccccggtagcggtgatctcgcgcggtacccgcgccgatcagcaaacgaagaccggcacattacaacagcttgaaaacctggcgaaagacgccccgatgcccgccctgatcgtggtaggagacgtggtgcaattacatcaacagctcgcctggtatcaacacacctcatcctcagaggcctttaaggcttctgtagtaaatctggcttaa

SEQ ID NO: 205087 - DNA, 801 bp, Klebsiella oxytoca
atgacaaatgatatctacattccaaaactcggtgacgtcgttattccgggcacacatcccaaaatcggccattttatgcagcctgacttgcctgtcactgcagggttaaaagcgatgtacatccacggcggttcggttgatctgagcatcagaaaccgggctgataattcagcaccactgaccctggtcggctcacccgagattgccagcggatttggggcggtatgtggttttggaaaatgttttgatactggaaaagtttccacaaaaaaccagactcacatcgtgatctgcaaaccggtaaagccgacggcggccaccgagacccagcaggcttttatgatggggaattacagctattccggtgcgcctgcagtctaccgtggtgacgggctcgcttttctgttctccgggcaaagtctgtatggagcgttcgtagaagacaatggtgctacaccgttgaacatgatcaactactacagcgcagcatatgacacatcgaagtgggcagctttcgtggaactggttgatggtgataacggtatagcgaggattgccgcccggcaaggaggatctcttaactggcaaaactcaaaggctctgaccaacaggacggcatacaccgaccggactattcgtatcgggtcacatcatgcacctgctgcctatcctgccggtgccaatattactatggggcttgaactcatattcgatgttgcattgactcaggcacaagtcgcatcagtactagacagcgttagcgcgtatctcagtacagcctggggaataaccgaactatag

SEQ ID NO: 205088 - DNA, 2133 bp, Klebsiella oxytoca
atgtcaaatctgcaggaaactcctgtctgggtaagtggtatctaccagcttactgaagagaccccggtactcggtaagcaggatgatgtcccgggggatggcccggcaaatcttcaggcgcaacagcttgctaatcgtacccaatatttaaaagcaatgatggaatctattgctgactggaaagagtatacattttataaaacagaatctgatcctgatggcactattgcaggggttcaggggactgagagcggaaaggttttccgggttgctcagggtattgctgaagttatttcattcaaatattacctgaacgattcaggcactccaaggttaattgcatggttgattggacagggctctatttccaacaacattcgcatttactcttctgatattaaagcgaagcaagatgtagatgcaggaaatatccttgccggtgcttattgctggattgttagttcttctgattccattcttgcagatgagtttattaacgacgcaggggcattgcagcccactggacgaaaaattccaacacatgaagctattgaggcaattcgtgaacttatcaaaaaattgtctaccatcgccttggttgatgacaattttttcccttttttcgtggatgggacaggaaatgtacctgtgtactgggataatggtttcgctgtttcccgcattgccacatcgttgtatcagatgatttatgctgatgttcacgcacgcctgggggatgcactgaataagcaggtaacaggggtttccccaggttttttcccgttattcactgacagcgccggtaatgttcctgtgtactgggatggcggactgtgcgcatcagcaatatcaacagggctgctggaaaaaatatgggcttacatcaatacaattattgctgatgccctgaatttaaaagttacgggtatctcgcctggatttgtccctgggatgactgacggtgcagggaatgtgctgttctggttccagaatggtgagctggatgcaggcggtattggtccaaacattggcggatcgctagccagattgtaccagcgccggatgtataccgccgcttatagcattccgctacatactgacggtcgaaccctttggcgctggaaagcgaagaaagcacagctcaaagcaggcctggcagtccgtccacacttcatgctgacgggggacagctggacgcaaaataacgaacttgcaaccgctattgcgggaatactgcacgcggattacggcgatgctggtttaggctggcgtaccgttaactatggtgccgcgcgggacggttcaaatattttccgctccgccgggtgggacctgtacgactcgtcaccgaccagcggagcgccgctttatggctgcggtattgatgggcaaaccattaatacgacgacaaacaccgcctatttcaatgtgactaacgtgcgctgtactgattgccggatttactatcaggacctgaacggcaagtttcagtacggttacgacgttggcggcgtcacgcagtggactgaagttatctgcgggaattccggcacgaccaaatcagtgctgctgacgggaatgccggatgaggtccgaactatctatgttaaaaccgatggcaacgccggacgtgttgctatccacggattctatctctggcgcagtggcgtggcaggctgtgtgatgagcaaagcgggtaatgcggggattctggcggaccagttcctgttgttctcagacaaaatagcggagtacctgagcacaatgcagccagacgtcatttgcatcgtgatcgggaataacgattaccgaatttcagaatcgacagccacattccgtactgctctgcaaacctatatggcttcttgtcgctcagtattgccggacgtcggctttattctgatggcaccaccgcgaacaaacgggacggcagtcactccccttgtggatttccgcgacgtgatgttcgacctctcgcagacactgaatgttgagttcttcagtatttacgacctgtttgatacctggactgagatgaacagcctgggctgttttgttgacaatctgcaccccagtgctacaggcagcaacctgatcgcatccactttgaataccgcacagattaaaggctga

SEQ ID NO: 205089 - DNA, 501 bp, Klebsiella oxytoca
atgagtaaatttgaagagatttgcgcagcgtttgatgagtcacaaaaaaaatttattgtgtatcgcgcccattgtcataagttcgctcgtgattttggaatgcgttttatcagataccttgaggtgcctgaagaaaacgttgaatggtttaaccctgatactgttgagccgtccgagggtagggtcactataccaggcgctatgtatctggatgatgataccttctggcattttggggtgcgaattacggtatttgataagcaaaaaagtgatttcagaccacaaattgagattgttttcatggtgaggagacaatcggatggtgatttccaggttgcggttaagcacattgataaaatccatgacattcaacctgataaggatgcaagctataccgtttttttcaatgcattacataaaataatactggctctttacgagggcgatctcgaaaatttcctcgcgtcccaacagcctgttagacgtattggatttatttga

SEQ ID NO: 205090 - DNA, 156 bp, Klebsiella oxytoca
atggttttctgcaacatgttgataaagaaagtgagttcgatggtcgttcagttctttcctttttgggtgattttggcatcggcaatactatggaaaaaaatagtgctcttgagagtgcaaatacccgactgtcacaactgcaactacttagggtaa

SEQ ID NO: 205091 - DNA, 285 bp, Klebsiella oxytoca
atgaaaagcaacgaatacgagcaattaaagaaagaaaccgaccacacggacgactgggcgagtggggtttttgttgcattgtttgatgtactaatggcaatggcgcatgagcatcctgaagtcctgagccgccttgaaccccagtggaaagaggcatatgacgattacaatcatgctgttcagaaccgccacgtagggcagtctgcccgattacttgaggcccgaaagatgctttatgggatgctgaaaactcagggggcatttgatttacatcgtcctgattaa

SEQ ID NO: 205092 - DNA, 861 bp, Klebsiella oxytoca
atggcacagagtaatccagaaactatcactcattcttttaacagcatcattgcattggctgttgatgaacgacgtgctttgactgtgcctgaaagatttaaagtagacggcatacttgattcgttatactcgtctgataaatcaagttattattactgctatgctaatttagctgctcttacgggggatgctaagggcatggatgaatgtgcgaattacttcttttcattaaagggcaaacagttaagtaaaggtgcccttcaatgtatttttgccctgaataatgcatcttgcttcgataagctatatagtatattaaaaaattatgatattaaaacgttccatattgatgaattaataacggtttatcttaagtctgcaattttaagttttaattttgatgacgcccgtgctttaatcgaagaattggatgtcaatgatgattgcatatccagagaacagattgagtcaatcttggaaatgctttataactttgaggttttttatttttcttatcaagaagaagacaggctgcatgttaaagaatactttaataaaataattaaaatacatcgtgaaaaaataacatcaagaatctataaggtggctggcccttcaattataaggccagatattttttcagacgaaggcaatgtgtttatgaatgtcatcattgagtatgtttctgatgatatagactatgcaatggacattgaaaattatttttacaaagtactacgtgaaaatacaaaggatattaaagcgaatataatgtcgtcagttgtctataatatccttcctattagttcgaaagattcacttcctttcactgaaagggttattgaagtggggttagattaa

SEQ ID NO: 205093 - DNA, 315 bp, Klebsiella oxytoca
gtgctccgattgaagaagattttgataagtctccggcgccttgtgcgtttgcatcactggctttacgatgacaaccctaacggcaatcacgcgcaatggcgtgtcagatctcaggtcagggataagtatctcaccgagaagagcacaaaagtttcaccgagcgccgccgccagtttcacaacataccagcccgtcctcctacgcgatggggctgtttggctttatcgcaagtatctgaagggacaactgccgatgaagcaatcctggaatggggaatatacccacgataaagagctttctgggggcattcagtga

SEQ ID NO: 205094 - DNA, 759 bp, Klebsiella oxytoca
atgaaacttgaatcattaccgaaattttattcgccaaaatccccaaagctgaatgatgaaacgccggccaccggtggtacttctctgacgattacggatgttatggctgctcaaggtatggtgtctgccaaggcacgatttggattcaatttgttcctcgcaaaaatgggaattcaggatccagaaccggctatccagcagttaatcaattacgtaatgacgttaaggaatcccgtaatatcccagctttccgagagtgtgcgtattgaaatggcatcttgcttagccgcttttgcgttcaacgattattcaagatctgccgcaagtaagagcacatgcccgcattgccatggacagggagtcattcgagaggtaaaggatgttgttaaacatcctggtgtgaaaggcattcccccttttattaaacttgaagaggttgaatcaacatgcagacattgtgcaggaaagggttggataagcactgcatgtagggactgtcatgggcgcggtcttgtactcgataaaaagcgtactgagttgcataaagtaccggtacaaaaattatgtgggcggtgcaatggcaaaggttacagccgtttgcctactacattggtaaaaggtcgggtaattcagttggttccggatatgacaaattatcaatggtatagtggctatgctgaggtgatcaatattctcgtcacaaagtgttggcaggaagagagctatgccgaggctgaattaaaaaaaataacaagttga

SEQ ID NO: 205095 - DNA, 369 bp, Klebsiella oxytoca
atggcacccattccgttatcagcgcattttaataaagaagagttcgcgtgtaatgatggttgtggtggggattttaacgtcccccaagagctaattaatatattggaaatagctcgcgcagagttcaatgaaccaatccatataaattcaggatttagatgtgtgccttataatcatgttgttggaggcgccactaactcatttcatttaaaagcatgggctgctgatattgttataaataatgttagcccgaagatagtttacgattattttgatcaaacatatccagataaatatggcgttattgaatatgaaactttcgtccatattgatgtaagagaaataaagtatcataagccactaaattga

SEQ ID NO: 205096 - DNA, 243 bp, Klebsiella oxytoca
atgaattgctattgtggtaaacgtgcaactcatgtacttgttacttatgaccacgacatagttttgccattgcaagttttctgtaagacacatgcatttgaagacgatcgagaagaatgctgttgctgcgatgcttacggtatcgaagttgaaaatccggccaactttaaaacagaggaactgttacctacatacttaccgggttcgcttgatgaaggtaacgtttgcagcgaacatccttaa

SEQ ID NO: 205097 - DNA, 630 bp, Klebsiella oxytoca
atgaaccaatcacaatttcaaaaggcggctggtataagcgccgagttaactgcgcgctggtatccgcacattacagccgcgatgaatgaattcggtattaccactcccctggctcaggcgatgtttattgctcagtgtgggcatgaaagcactgggttcagacgtctggtcgagaattttaactacagcattgcaggtctggctaattttgttaaagccaaacgccttacgcaggatcaggccaattcacttgggcgccggcagagcgaaccttcactcccattacagcgtcagcgtgcaattgccaatctggtgtacagcaagcggatgggtaacaacgccgccggtgatggttggctctaccgtggtcgcggaattatccaggtcacggggctgaacaattaccgaacctgtggtgacgccttaaaggttgatttagttgctcagccagaactactggctcaggacaattatgccgctcgcagcgcagcatggttttttgtgacgaatggttgcctcaaatggggcggagaccttgagcgagtgacccagattatcaatggtgggcaaaatggtattgatgaccgccgtgcccgcttcctcaaagctaaatctgtcctggtggtgtga

SEQ ID NO: 205098 - DNA, 297 bp, Klebsiella oxytoca
atggtattgatgaccgccgtgcccgcttcctcaaagctaaatctgtcctggtggtgtgatatgcaattaatcgaaaactggcaatcagcctggaagatgtggtctgtacgcattctggctgttctggccatcgtcgctacgtcgtgggccgcggtaccggatggcgtgaaagcgttaataccggatcagtatttgggctgggttgtcggctttgtttctgtctgcgctgctattgctcgcatcattaagcagttcagcctgaccgacagtggccccaatacggatcagcagtcatga

SEQ ID NO: 205099 - DNA, 273 bp, Klebsiella oxytoca
atgaccacgatggaaatcattgtaggggcgattgctacggtgctggctctgatattcggttcatttcatctcgggaaaagtcagggcaaaggtatcgccaccgatgagaacgaaaaacagaatgcagaaaacaccgccgccggtaatgcagctgtggcagagcgtcgtgtggaggtaacgaaaggggccagcgatgtacagcagactgttaaccatatgcctgatgacgatgttgatcgggagttgcgcgaaagctttacccgcaaaacctga

SEQ ID NO: 205100 - DNA, 207 bp, Klebsiella oxytoca
atgacgatgttgatcgggagttgcgcgaaagctttacccgcaaaacctgaagtcatcgacacggcctgtgactgggtgcggatcatctacctgaccgaccacgatattgacgtgctggacaagcagacgaagcgcgacattctggcgcataacaaatcagtgcaggggaactgcccgcaacaaaccgacaaggctactaatagctaa

SEQ ID NO: 205101 - DNA, 483 bp, Klebsiella oxytoca
atgacgcagattaaccgcctttatgccagcagcgggccggaggtgatcattgaaacgctgcagataaccatcggttcagatgttcactatctgtgtaagggctacgaggatattaccgcgacgacggagaacggcgagaccgtaacgtttaccgcctgcgcgatggatattgcgctgccggcgcgtaatgaggacggcacgcaggatttgaaatttgctctgtgtaatatcgatggcgttgtgtccacggcgatacgcaatgcgctggcgaaccgactttcggcgtcgctgacttaccggagttatatttccacagatttagcggcgcctgcggcggtaccgtatacgctgcaagtcaaatctggctactggacggcgacagaagtgcagatcaccgcgggctatatgaatgtcctcgatacagcctggccgcgatatcgctatacgctcccatcattccccggtctgcgttacatcagctaa

SEQ ID NO: 205102 - DNA, 588 bp, Klebsiella oxytoca
gtgggtacgatgttcctgtggctggggtttggcatgtgcatgctgatggtctatgggctcaatacttggctaccgaagatcatggtcgccggtggcttcccgctgggttcgagcctgatgttcctggtgaccttgaacattggcgccaccttcggcgccctgggtggtggctggctcgccgatcgctggggctgcaagcccacgttgatactgttctttctgctggcggtgatctcactctgcacgctgggtatcaagcctggcccgctgttgctcaacgctatgttgctgatcgccggtgccaccaccatcggcaccctggccgtcatccacgccttcgctgcacagcagtacccgagcgagatccgtgcgacgggcgtgagttggtgttcggcaattggccgtttcggggccgtggctggcccggcaatgggcggcctgatgctgagcataaacctgccactgcagatcaatttcattctctgcgcggtccccggattggtggcgattttcgccattgccatgatcaaaagaagggccgttgccagcgtgggcttgaatgcccagccggcagacacccatcactga

SEQ ID NO: 205103 - DNA, 1815 bp, Klebsiella oxytoca
atgcctgtcagtatttcaaagattgagatatttaattttagatcaatccaaaggatgagtatcgattgttcgagacttcagctatttgtaggaaacaatgatgctggaaaatcgaatatattgagagcattaaacttatttttcaatggcgtgacaaatccagatgaagaatttaatttcccgacagattacaatattcattcatattcatccgcaatcactagcaaaaaggctcgggaaataaaaatatgcttaaccttgcaaatacccgagagttacaagaaaaccaatggtgattatattgaatggactaaaacgtggcgattacataaaggctacaatgaaactataattggtgtaaaaaatgttaatggccccaggggcggcaaaaccattcaaaaaactccgatgcccgccaggtccaatcttcgtgtattacttaacaatatcaattatatctacatccctgcaattaaagacaaagaatacttgtcaaaacttagaagtgagatctacggtgttgtaaatgaagcatttagcgaaaacttcacaaaatctagccatgagtttgaagaaagcatcgctgaaaatttacaagaacttactgatgatattagcggttctcttggcttccaatcgaaactatccttaccaaaggacttaagtcatttatttgaaaagcttgattttttaaatgaaaactccatctcactgaatgagcgaggtgatggagttaaagcacggcatatacctttaattctgaaatttatagctgaaaaaaagaaaggactacaagcgcaaggcaaccccccttatacattcatttggggttatgaagagccagaaaataatttggaaatcactaatgctattaaactagcagaccagtttactagcatgcttcataatccgatatcacagttatttttaaccactcattctcctgccttttacaatcttgctaagcaaaactccgttgccacgggttgctattacattgagaaagatgctaacgactcaactttttgtgaagttaatcttgaaaatctagatgcgaaaatgggtgtattagaactactatccccacacatagaatctttaaaaaaagaactgcaaaacattcaagaagtatgggaactaggtaaagataagcctgtagtatatgtagaaggtcctagtgatgctatcgttttaagaaaagcgatcttacatcacactcccagcatcattgataaaatagatattataacactcggctttggtggtgggacaaattatgtttgcgatatgctgacagcgtactttcatatgagaaaacatcaccaaaaccgtcatcgtgcattcggaatagtagatccagatagtgatggtaaagattgtagaaccgcgattagtaagcttcttgaaaattctaagcagaatggaaagccctcaattaggtgtgttttaatgagattatctactgatattctttcagcaagaaaggatgggtttaacatacccggagttttagaggataactatccaatatcaatttggatcgatgagaaaaacaggggaaaactccaagagagaaatttaaaagaagttttaagtgataatcactacaatacacttgcatctagcaataaaactattgatgatttacttgatcaaaaaccatactcattaaaagtaaaatacaaaaccgatccacttcgaaaagtccaacttgctaataaagttaacgcattaggcgatgatactgctgccgaggatttacaattcttaactccttgcatcgacgaaatgattaaattcttagaccttaaataa

SEQ ID NO: 205104 - DNA, 150 bp, Klebsiella oxytoca
atgcagaacagcagcattatggcgttagcgctcgcgctgtgcaacgtagagcaaggtcaagcggttaaagtgccagcaatggccgggagtaatttccatcttgccatttacaaaaccttacatttgtgtgattttgaaccatttttttaa

SEQ ID NO: 205105 - DNA, 165 bp, Klebsiella oxytoca
atgaatatcaattttgattctgatatgtataaaaaacttcaagcaaaagcaactgaacaacacactacgattcctgctcttattaaagagttagtgattaaacatgtccttgtcgatgaggaaaagaatgaaacaaaaaagactaaagcagtttccagtaattaa

SEQ ID NO: 205106 - DNA, 1467 bp, Klebsiella oxytoca
atgaaacaaaaaagactaaagcagtttccagtaattaaatatgtagatgcgatttgcggtagcggtaagagtcacagactgaaagaatacatcttaggtaatcctgataaactttccctcattgtcgttcctactcataacttagcagaacaattccagaacagtctaaacgagatactcaaaagaaaagtattccgtgttatgggtgaaccagcagtcaaaacactctctgatgctctcgaagatacttttaaatacaaagttatcatttgcactcatgaatgctataaacagtattgttataaagcagcgtttgataatgagatgcaagataagctgttacattttgacgtttatgtagatgaaatacccgccgcctcattcggtggatggattaaagttgacttcaaaaagaatgctgatgaaaactacccctttctaaattggatagaagaaaaagaatccctcttctatataaaggaagaaaacagggatgagtttgaaaagtattatagagagaagaacgctaacagcagagatttaaaacaactattatgggctatgttacacggtgccgggttgatgtttgatgaagagaaacacttcttctgttatggaatctctcctctaatgagtagtgttaactggtgcaaaagctttgtgattatgggcgctggtgtgagccgtagtgagtttttatggtgggctaaagaggttgcacacttcatctgtatccctgctcctgaatacttacagcctcatacagagcgtagacagcataagcttgtgcctattgagataaaagccctcacagataagaacgctacacaggaatcattagcatatacccttaacaactttaataaagaagtgagaacattgttaggtgatggctacatctttgcaactaataaagataaatcagtatgcaactttgaatcttatggagatgaaatctttggagactctaacagggttagcatggcaagttatggattgaacaactaccaacacataacaaaagctgctttcattggatgctcaaacttccatccttctgtaacaggtaaatggaaattgtatgcagaactaaacggatgggatgcaaaggaattagcaagtagacgtaaagccgcaatgaactatgagcaatgctaccagtttgtttcacggtgttctataagagattatgactctaattcacctcaattatacattgttcctgatttagctactgctaactatctgcaatcttattactttcctggtgcaaaggtagaaagtttaggctttgaccttccagtaaaagaaaggaaagcgagagaagtagttaaaccatacaatacaacaaaagggaatgagacaagggaaatgattcaaatgtataaagcacagggaatgaaacaaaaagatgtagtgaaacttacaggccttagtaaaggtcaggtatctaaaagctggaaatag

SEQ ID NO: 205107 - DNA, 366 bp, Klebsiella oxytoca
atggcacgaactaaatcaagagatttagagatctacaactattttaaagaaaataaaagcagtctctattctataaaatccctcgcagtaaaacttgatatcacagaagaagatattaaaaagaacctctcatctctgaagtttggtgatcaactcatcttcgagatgtttgggaatgacacattccgagtagtgagcctttctgattcatttgaagaggggcagagagatgaaatagagaagcgctggagagaacatactaaaaagcttgttaagatttataaagagcagggctacactcctgaaaaatgctcgtcgattagtgatgtagagatagaaacagtaaacaaatattggggtaaataa

SEQ ID NO: 205108 - DNA, 153 bp, Klebsiella oxytoca
atgcagaaatacgaatatacagaaaatgaaaaatcgctctttagaagcatagctgaaggtttagatcttacatatgaggaacttgaatccaaaattatcaaggaatatttggaaaatctcctcgatagaatcaaatataacagaggggaataa

SEQ ID NO: 205109 - DNA, 243 bp, Klebsiella oxytoca
atgaaaaaagaaatgaacagtatcacaaaaatgtcacaggaagaatttaaatctgcatgtattaaaactgctgcaatgctaaatatccctgtggaagaagtgattgaagaagctgaaaagcgacttaataaagctggcgtagaagtagagaaaagcgataacactgataataatgtgcaactcacttttaatgaaagatacgcagcactattaaaatctaaattaaataaggataatgtctaa

SEQ ID NO: 205110 - DNA, 360 bp, Klebsiella oxytoca
atgattaatctatctcaattgttcgaccacaataaaggatttaccgatgttgtgagttatgctacagacccgtttgcatgtgttatgaatatgcaatttgatactctggctgctgatgtgcatgcaggtgatgtgttgggtgctgatggctctctgtatacctctggtgatgatgcctacattgttgtagctgattatgtccccgctggctctgctcgttgtgtgaacgttctacgctctcctgcaatggggtcatgggttcaagttaaacaaggcaacctgaatgcaggtgatgttgatgctgctgttgtagcactcgttaaacaaggattccgtttccaggaattccagacctcttaa

SEQ ID NO: 205111 - DNA, 273 bp, Klebsiella oxytoca
atgagattgatttattctattattttgctcggcttaatggccggttggaataacgcgcgtgccggaacctgcacgacaattaccccgcagctctccacgctgtctgtaggaacgattaccgtaccgcgtgatgcaccggtcgggaccgttatttattcggcaggcgggacatttacgggctcttacctttcaggttgtactaacccaatcatgctgggtttcagcatgagatataataatgcgacgctgagcagctacggtaatcacgtttaa

SEQ ID NO: 205112 - DNA, 447 bp, Klebsiella oxytoca
atgttaaccctcgccctggtctttcagactctggccacaagaaaaccacatctggattcgggtatatttatttacgctaaagaaggattcgggaattaccttgggtttacttccgcgctcggtttttgggcggggacctgtatcggcaacgtatcttattttgtgctgataaaatcaaccctcggcacattctcacccatctttggtgatggcaatactttatacgcaattctcactgcctctgttgttctgtggtgtttccatattctggtattaaggggcgtaaaagaagctgcaattattaatacggtggtcacctgggccaaaattattccgataggtgtctttattgtcgttcttatgttcgcgttcaacgctgacattttcaccgttaacttctggggggggatccgacatcaaggacattcactcccataccctctctga

SEQ ID NO: 205113 - DNA, 1755 bp, Klebsiella oxytoca
atggcagtggaaaaactgattgtcgaccatatcgacacctggaccacggcgctgcaaacccgctccacggcggggcgcggcagctcgggtaagatcgacctgtacgggattaagaagctgcgcgagctgattctggagctggcggtgcgcggcaagctggtgccgcaggctcctaacgatgaaccggcgtcggtgctgctggagcgtattgcggcggaaaaagccgagctggtgaagcaggggaaaattaagaagcccaagccgctgccggagattagcgaggaggagaaaccgtttgagctgccggaggggtgggagtggacgaggttaggatttatttcaaactatggtttttgtgataaagcagaagctgaagacgtaacacctgaaacatggatccttgaattagaggatatagagaaagtcacatcaaagcttctcaataaggtaacttttgcagaaagaccatttaaaagctctaagaatcgattttcacaaggtgatgtactttatggaaaattacgtccgtacctggataaagtgatcgttgctaatgaaccgggtgtatgtactactgaaattatcccaataacaagctatggtaatatttccccagaattcttacgtttattgctgaaagcaccaaatttcattacttacgcaaatagctctacacatggaatgaacttgccaaggcttggtacagaaaaagctcagcatgccgtcatcgaattagctcctatccaggagcaactgcgaattgtttcacgtgttgataaactcatgtccctctgcgaccaactggaacagcactcactgaccagtctggacgcccatcaacagttggttgaaactctgctagccacgctaaccgacagccagaacgccgatgaactggccgaaaactgggcgcgtatcagcgagcatttcgacacgctgtttaccaccgaagccagcattgacgccttaaaacagaccattctgcaactggcggtgatgggcaaactggtgccgcaggatcccaacgacgaaccggcctctgaactgctcaaacgtattgcgcaggaaaaagcgcaactggtaaaagacgggaaaattaaaaagcaaaaaccgttgccatcgattagtgatgaggaaaaaccgtttgaactgcctgaggggtgggagtggtgtaaatttggtttaatctctgagtttattaacggagatcggggaagtaactatcctaataaaaatgaatacgttgttcacggaatcccttggataaatacgggtcacatagagaaagatggaactctatcaataacagatatgaatttcattactgagaaaaaatttaatgagttaagaagtggtaaaattcaaatcggagatttagtttattgtttgcgcggagctacattcggtaaaacagcattcgtaaaaccatatgaagctggtgccatcgcatcttctctaatgatcattcgaccatttattagagaaatgggagaatatatatacaattatttaatcagtccatttggacgctcgcaaatttttcgttttgataatggttcagcacagcctaatctatctgctaacagtgtgatgctttatgcttttgcatgtccaccactacaagaacaatttagaattcataaaataataactgagctatttcatatatgcgataatttgaaattacaaactcaatccgcccaacaaacccaactccacctggccgacgccctcaccgacgccgccataaattaa

SEQ ID NO: 205114 - DNA, 159 bp, Klebsiella oxytoca
atggctgttatggctggaagcgataacgaaagtgagcaagatgcccggcctgccggcacgcaagccggtaagctttatgccatctggcattttcaggaaccgggacagctaaacgagaataaacatattcaccgctgtgccagcctctgcgtagtgtga

SEQ ID NO: 205115 - DNA, 999 bp, Klebsiella oxytoca
atgactgaacgtttcttaccagcaggccaccctgttgtatacactatcgagcagcggagtaccgttccggtcgagacctggaacaaatttacctcagcgattatcgatatataccactgcctgccatgctgcatgcggccggtgaatccgcgccggaacaatgagcaaaccggtgctttctcacttttccatcccgacagtagtccaaaagctgacgagctggtcttcagcggtaaaacgggcgaaggttacaggcatcgtatcattaccatatcgcgtgagtgtacccgggatgtcctgagcgtggatgagattgaaacagagcatcagatgtcggtagatttgtttacccgcatggtgatgctggcacttcataatatctgtgctgcacattttattgttcattccacggcaggagcctgttcatgggcgctgcctctggccaccctgaaccgggcccgagacgaccagttctcagcctgggaactccctgatgcggtgcagtatgccacatcgttttcgcaggaaaatgcccggctgactgaacaggctatcgccggcagtctaaccctgagcccgggaataaatctgtcccgcgagcagtgggaggatattgccgctctggagttcagattgtatgaacccctggcgtatctttcagccgatccggaagccccttcgctggaactcgttttaggctccagtaccgctgatctggtgatgttgagtggtttagacgctctgctttactggggcagcgtcaatatgccggactatgcggaaggcgttccggatcaggaaccgatatttctgtcccgcaatcatctcgcattattgcgcgatgacatccgcaacggctggttctcgtcgtacaacaacgatccgacctacggagagatgttctgtaccgagttgcagctgattgccgtgtgggcggaatactgcatccgtacgctggatatggagcgggaaagtgttttcctgtttgcgatctggtaa

SEQ ID NO: 205116 - DNA, 618 bp, Klebsiella oxytoca
atgttgcgttttcacggaaaagacctgaaagctgttctgaccgagtccttaagtaacgacaggccagtggtactcacctgtgacgtaaccgtgtctttgtccgttcaggatggcgaacgtttccgttcggcctccggacgtgaagaccagttacgtcaccaggcatttgcagatggctgtcatcccgacagggatcagggatgggctacgctggcccctgcactcgtcgacaatgctgttttcactaaacctctcgtcctgacggaagggcgtatatgggacatgctggcgaagaatcatcagctcactctgatgcttccagagaacgatattgcggtatacagcggtgaacggcgttatgtgccggtggccggttaccgggatctgacggaccggctgcatgtgacggccaccgggtattttgctgcctgcagcagtcgcagcgagctgaaatactggcgtatgacagcattacggttgcttgaggatgttcatgccgttgcgtgccgtcatgccaggcctgcggatcatagccggtttctgatagccgctcataatctgcagtgccggacagaatgtgtttcatctgacggggcgctgctgcttctgagcgcctga

SEQ ID NO: 205117 - DNA, 1056 bp, Klebsiella oxytoca
atgaaaactgataaccgcaaaaccactgccacggtttgtaaaaagccggcggcacgcaaaacctcctcctccggcaaacgtcgccaggcagaaacggccgcgacgctcactggcagcggcgatatttatcgtctggtcactgaccggataattgtcgcgctggaaaacggtatacgcccctggcgacggccgtggcgaaacgcgcagcaggggatcaacaccctgatgccggtcaactcgcttaccggccgggactacagtggcgtgaatgttctgctgctgtggctcgcggctgaagagcgcggttttaccagcgaccgctggctgacatacaaccaggcacaggagaccggaggtcaggtccgcaagggcgaaaccgccacgcttgctgtgatataccgcgactggacaaagcaggcagaagacagcaacggcaataagctgtttgatgctgacggtaagccgcagatggaaacggtgccgatgttgcgccagtttcctttgttcaatgttgaacagtgcgatgatcttcccgaccaggtatgtggcactgccaccgtcacccggccgcaggaggatttcgctggtgtcagtccggcacagctgcagcaggttctgtcggtggtgaacgccaccggcgtgcagttttcacccagaccgcagaatagggcgtattaccgtgccgccacagaccagatagtgctgccactgacatcacagtttgacgctgaaggcgactactggtccacggtgcttcacgagctggtgcatgccagtggccatgcgaagcgactgaaccgtgaagggataactagggcgtcaaagaaatttggcgacccggtgtatgccttcgaggagttgatagccgaaattggcagtgcctttctgtgcgcacatctcgggataaccggtgatttgcagcatgaaagttatgttgacggatggctgtcaaaactgaaatccgacaaaaaggcgctgttcagtgcctgccggcaggcccgggaagcgtcggaatatttgctcgcgccactcaaccgtcaggctgaaacggcgtaa

SEQ ID NO: 205118 - DNA, 936 bp, Klebsiella oxytoca
atgtctgaatggtgccagaaccgttttgaaattaccggtaaatctgtctgtatcgatgtgttgttgcagtggataaacggttcagacacgccgcgttatcgccacgcaatactgcagagtatacagctgttcctggcagggtgtgcgggggtactgaaaccggtgcgaactgtctcgtacatcccctttcaggggctggttcgtcatggtgtcgggcagtcaacggccgctaaccttgcgtttgagcagtggctggagttgctgcagaaagacgtggcgctggatacggagactatacgccggattgaccggctgtatcaccagtcctgcctgggggcgctgaagtgggaaaatatccctcaggcgtcacgggacatcatggctatgctgatgaaaaggcagtatgcggactggttcggtctggccggcctgaacgatgagcctgatgctgcggtttgctgggaacgtctgcgggaatacccggaacggtcgcagccctgcgatatgctgatggttattccgacgcggctggccacagagcttaatggctccggtgggctgctgacgggagtatccacaacgttgagcttctacagccgcatttacgggatggagtggccagccgggcataatgtaaacctgcaccgccatgccgctaacgggttaacgttgcggctggattctccatggtatccgccgtcaggtgaggtggtggccggtatttccgctctctttgagtgtgaagtgcgacatacgtacagcgaaccggtcagcggcctcagtggttatgactgttatgacctcggggcgcatgtggatggccaccagggggggccggtggacactctacagtcagcgccggcgctgtatctggtcagtagtgaacagccgcatcctgaaccggagacggctggttacagcgaagtccgtggataa

SEQ ID NO: 205119 - DNA, 684 bp, Klebsiella oxytoca
atgaccggttttattgaccatgaaaaagcgtttatctcactttttaatcagaccgcacgatatcatcaccgccataaggtattcgaagattttgtcagttgcagcgttattgcgctggagaaccgcctctgttttaacgaagagcgggaaggtaaatatctgcgaataatcggtggttatgaaaagccggatgttatccgtatggcgcaactgctggcccatatggttaacggattgcagaatggattctgtgactttctggggaacgtatttatgcagctggaactgggcgataactttcgcgggcagtatttcaccccctgggatgtggccagaatgatggcgcagctgcaactgggggatgtgaagacaatgtttgatgaaaagcctttcatcaccctcagcgaacccgcctgtggtgcaggttgtatggtgctggcctttgccgatgttcttaatcaggcaggttatgcgtcgtaccgctatctgtgggtctctgcaacggatattgatccgctggcggccgggatggcttatatccagttgtcgctttgcggagttgctggtgaggttgtcattggcaacgcattgtttgacgaacggcgtcgtgtgttactgacgcccggtcactatctgggcggctggccggtccggctgcattcactgcgaaataaggtcgcatga

SEQ ID NO: 205120 - DNA, 1530 bp, Klebsiella oxytoca
atgaaacaagaatctattattcaaaaaatttggagtttatgtaacatactgagaggtgatggaataacattctaccagtatgtatctgaactcagctatctgctgtttctaaagattgctcaagaaaatggttcagaaaaattgatacctaaaggctaccgatgggccgatctagagtctcatgaagaagaaggattactagggttctatcaagagatgctcacccatttgggcgcaaatgctgaaaatgaagttataaaagcgatctatgcattccctacaacagttttctcccattccgaaaatttaaaagctgtgataaacggcatttcaaaaatagagtggtatcaaataggaaaagatggatttggagatctctatagcggtttaattgataaaagtgctcaggatactcgttcgggggctgggcagtacttcactccgcgatctttagttaacactatagttagattaatacagcccaatcttggagaattaattcaagatcctgcgacaggaagtggggggttcttaatttctgccgatagttatattcgaaataaatattcacaggcaaaatacataaataatccacctaaatatcaaggagtagaaatagagaaaaacactcgtagaatttgcttaatgaacacttttctacataatttagatgcaaatattatttatggtgatgctcttactgatgatgtagctgagttgaatgaagctgatgtaattatagcaaatccaccctttggtaataaggccggggggcaacgccctttacgcaatgatatcccataccccaatacaaataagcaactcgcttttttgcagcatatttatttgaggcttaaagctggcggtcgggctgctgtagtattaccagataatgtactatttgaatctggtataggagccgatgtacgtcgagatttaatgaataaatgcaacttacacactattttgcgcttgcccactggtatcttttatgctcaaggtgttaaaactaatgtactatttttcaccaaaggctctgccaaaaataaatatcaggaaataaattgtactgagaatgtatgggtatatgatttacgtacaaatatgcctaattttggtaagcgcactccttttggtaattccgacattggctttgggtcagcagattttggtacagatccgcacctcggcgcgtttgagaaagtgtttggtaataacccttatggggccagtgaacgtactgaaggtgaatacagctttggtgcacaagagctcgaagtggataaagatgccgtagcagaaaatcaggatattgatgaaaggctagcccattctcgctggcgcagctttagccgtgagtggattgcgaacactaaaggcgattcgctcgatatattatggctgaaagacaaagatagcgttgaagtatctgatttgcccgagccacatttattagcacgcgaagcaaaagatgaattagaagcagcattgagtgaactagatgaattattaaatgtgttggaggggtga

SEQ ID NO: 205121 - DNA, 1824 bp, Klebsiella oxytoca
atgaaaacgccttttccaaaaacatgggcaagtgtagaaggctctgactttgtaattgatccaaagtctgacatcgtagatgggccttttggttcaaacttgaaggcttctcaatatactaatactggtgtaccaatcgtacgtattcaaaatgttaaaagatttaattttatcgataagaatataaaatttattagtaacgagaagtatgaagaacttcagagacatagttttgtcagtggcgatattttaattacaaagcttggtgaccctcttgggttagcttgtgaggttcctgaaaaatatagatatggcattattgtagcagacctagttaggctacgtccaaatatagaaatttgttcaaaaccatttctaatttacttactaaattctgaaattgttattaaacaaattgagaagcacgttaaaggaacaactcggccaagaattaatttaggggttattcgtggattggctttgcctctcccccctctagctgaacaaaaaaagatctccgagaagcttgacgttctgctagcaagcgtagaaatcatcaaagcacgacttgaacgcattcccgagattctaaaagcgtttcgccaatccgtacttactgctgctgtgagtggtaagttgacgaaagattggagagatgctttaggagacaacaaaaaaatttccagatcagagatattagatgctagaaaacttgcatgggaaaagtttgagctcaaaaaacgattgaacaatggcgaaaaaattttaggcgaaaaatggaaaaaaaaatataaagaaccggcagaaattttggccgatcattgcttcgatatccctgattcttgggaatggtccaacttgggggagctatcctggagtgtgaaagacggtcctcattacagccctaaatacactgatagtggaataccatttatttcagggggtaatatatcatcgaacggcattgatttttcgaattgcaagtacataagttctgaacttcatcaagaactgtcaaaacgttgcaaaccagaagtaggtgatattttatacaccaaaggtggtaccactgggatcgcatatttcaatactgaagagagagatttcagtgtttgggtacatgtcgcagtattaaaaataataccgataataaatggtttctaccttcaaaatgctcttaattctcagcattgttatgatcaatcccaaaagtatactcatggcgttggcaaccaagatttagggttgactcgaatggttaacatcacaataccagtcccaccattagatgaacaaattgaaattgtccgccgtgttaaagagttgtacgcctttgccaaccacatagagcaaaagaataattccgctttagaacaagttagtagtctgactcaatcgtttttagccaaagcctttcgcggtgaacttactgctgattggcgtgatgctaatcctgatttaatcagcggtaaaaacagcgctgaagctttactagagaaaattaagaacaaacgtgaggttatcaataaacagcctaagctaaagcgtcccaatataaacaaaaggataggtagccatatgagcaaacagatcatcaaagtggtcgaagcgttaaaacttgcaggagaaccgcttagtggccagcaactgttagcggcagctggctaccccagcgacagtagcaccgagcaacttgaacagttctttttagatatccgtgactccttggtaatcgagaagtctattgtaaagcttgagcgcagtgacgacagccaagactggttcgccttagctaagccaccaatgaataaagcaaagaattaa

SEQ ID NO: 205122 - DNA, 1602 bp, Klebsiella oxytoca
atgaaagtcgacaaactacatattcgctcacgttacaaaaaccttgaaaacgtgaaagtggactttgacgaagaccacctgatgacagtagtggtgggccgtaatggttccggtaaatccaatgttttagaagccttagtgactatattccgtaacctcgatctgggcgaagccccgcctttttcttacgaaattatttatcgacttggtgagcgtcacaagcccagccagcccagtgagcgatggatagaaataaccattgatgccgatccagatcgcggtacacttgcaaagcaatatgaagttagtgtgcgcgatcttttaagtgaagacatatcaaaagacatgtttgataagctaccttcaggcatcaccattccgttttcaaaagttaagcgtgataaaagtggtaaagcaccatacctgcctaattatgttttcgcgtactattcaggcccaagcgatcgtcttgaaaatcattttaaaaaacaccgtacggatttttatcgtaggttactcgaagataaactggatctaaaaggtgatatccgaccattattttacgctaaacctcaccacagccaattcgtattacttgccttttttttatcagaacaagacagcgcagaaaaggcatttttgcgagaacatttaggtattgaaggattagacagcattcattttgttatgcgccagcctgggtgggctaaacagaaaggtgaattgttttggggcgcccgaggtgttgttcgtagatttttagatgaactgatacaacacgctctgtcaccgataaaagtgactcgtcaagaagatatctctttaaccggtaataatatccgtaatgagttctttcacctatttttacctgatgtaaaagcactgcgtgagttcgccaaagttctcagtgctgacgaattgtttaaaatgcttgaaagcaccttattatccgaaattatctctgaagtaagcattcgggtgaaagtatctagcagcaaggaacctctcactttccgcgaactcagcgaaggtgagcagcaactactgacagtattggggctgctcaagttcactggcggtaaagattcattgtttttactcgatgagcctgacacacatcttaacccgtcttgggctgtaaaataccttaaatttttgcgtgaatttgtacctaatcacgataccagtcacttactgatggtaacccatcatccccttgcgattgcggaactgaagaaagagcaagttcaggttatgaagcgtgacgatgaaaagcaaatatccgccaagatgccagatgaaaacccgcgtggcatgggaatcaatttaattttacgtagtgatatgtttggtctgcagacaacgctcgatgatgacacgaaccaaaggcttacaaacagaaatgcactcgctgcaaaggaaactttatctaaggagaggattgttcgcgagcagggatttcagcctgaggatgaagagcaatatttaggtaggttaaacgctgagctcgaacatttgggtttcaatcttgctacggatgatccagattatcttgagttccttcgtaataagtaccacgccaaacatgaggaacgtcattaa

SEQ ID NO: 205123 - DNA, 810 bp, Klebsiella oxytoca
atgcgttggatttgcaaggacgagattgaggaatgcttgactcaagcatggagagacatggctgatcgagcaaaggctgatttaattgctgctccagacgaagatacaaggaaagcgatattacaaagagtcgcgtcctcaaatgtttggcgagagtactataatttacttcctgatactttaaagcgcaaatgttggtattgcgaagccgaggagatccgatcggatatgccagttgatcatttcagaccaaaaagcaaggttgaagatgataagcagcatgatggctactggtggttagcattcgattggcaaaactatcgatgtgcttgcacattctgcaatagtcgtagagtttttaatgaaaccgagggggggaaagcatgtcgtttcccgcttgaaaatcctcaggagagagcttttgcacctgcagaccagatcaaactgaacaatgaacggccgtactttctcgatcctttcaacccggatgatgaaaagctgctctggtttgataacgatggactgccaaccgctaagccattggcaacggctgagcagcaaacaaaggttaaaaattctatcgaaatatttcatctgcatgagagcagaatagcccgagctaggaacaaagtacgcttagaggttgaacgacaagttaggaaaataaaagataatgatgatgtacaggcggccaaagctaagctgcgacgcatggtaaaagatactgaaaagttatcgcgtgctgcggttgtgtacttgcgagcgcacagagaaattccggaggtgaaagacatattggatttagactaa

SEQ ID NO: 205124 - DNA, 1545 bp, Klebsiella oxytoca
atgttaaataaaatcaaaatgtttttgtccggtacgccgactgtcacagagccatccgacaaactttccgtttcggtgccgacgggttatttctctccggttaaggctgaagaacaggtcatcaccgcattgcgccaggatgccctgcagaaaatccgggaaaataatgcgttgtcgacagaggtataccagcgactttatctggctcctctgaacctcctgcttgaacggacccagaatgtaccagcggcacctgatggccggtgggcttatgccgggggatttggtgatttaagcctgcgttttaccgcttatgctgtgaggcttgcccgggggtatatgtttccgccaggtgcggcgccggaagaacaggccgcgcagggtgttatctggcaggccgttattttctggaccgcgttatgttatcacctgccattactggccagtattgaaggcgaaaccaccggcggtgttaactggcaaccgggcatatctgtgcctgatgcaccttatcgcttccggtttcgtcattcttctccgaacgcgcatgatgcttctgctctggcggcgctggccgccggacagttaatacccactgaagcgataaactggctttcaggtaccccggcagcgttgttcagtcttgctggtgcattccgcaatggttctcctgatatgcccctcatcaggacgttgctcgaccaggcggcagagaaggttgattcgccagtactccggaaagagacaggtgaatcttctgtggtaattgcgccgccagattctgtaacgtcacaggaggggacgttggtcgttcagacggacgataatttatcctcttctgtagtcgagctggccgcttcggagctgatgacgtcactcaacgataccggtggcggggactgtcagccaccgctgaacggggtaagtacagtggttccgccggaagaaccggataacggcagcccgggccaggaggatgccgatatgctgctcagtcttttttccgcagtagcggatgctgaggttatggatgaaacagtggtgcccgtcgggaaagacgttccagatgagtctgctgagacggaagaggccacccggcatagcgataccgatgctgattgtctgttgcacaccacacaaggagagcagggccacccggttaatatcggtgttgatgtcagacagccaggcgaggcgtttctcgcctggctgtctgacggcatggcatctggcaggatcaccgtcaaccagcatgattcacgggtacattccgttgccggttttatttaccttttggtgccggatattttctttctttttctgaaagataccggaagtgacagccacagggaggagattcagacctcgtttgagaaactccagctccaccgtgttcgcaggggggaacgttttatccgggcgaaactgtactgctcagaaaacaaacaggggcagttcagcagggttaatggttatcttatcaagactgtccgcctgaaaggggtgagacctccggaggacagcaaactccttttctttccatag

SEQ ID NO: 205125 - DNA, 192 bp, Klebsiella oxytoca
atgggcaccgctcccgatgaacagcgcgattacaacggcactggtatcatccggcagtatattaaaaaaggcatcagcgatcaggaaaaccagacagtttgcctggatccccgttgctgttacagtatgagtatttttccgttcacagaaccaccctaccccttcccgtatctgagcatacgggaagggtga

SEQ ID NO: 205126 - DNA, 903 bp, Klebsiella oxytoca
atgtccagattcagtaagcaacttgataaacagctcgtcacgcttgcgcgtcaggggcagggtagttttaaaactgtcgcagaccgttcaagaattgccgaacgattctctgaacggctggcgaagttaaatattcagatcagggatgcaaagcatataaagactgtccatattcagagatacatccagagtcgacaggcagaaaaaatatcaaatcggacattgcaaaacgaaatggcggctgtacgttatatcatgtctgttgccggaagaaataaactggcaaatcctcagcatgaattattgagcaacaaagcgttggggatttctggtgcaagccgggatggtactaaaaaggccatatctgacgacacgcttcgtgaggttattaattatgcaatgaaaaaagacgaaggtgtggccctcgcggttcaactggctcgttatattggacttagaactgaagaaactgttcagtcagctaaatcattaaaaacgtggcagcagtcgcttttaagtggaaatgaacgtgtccgggttgtattcggaactaaaggggggcgtccgagagagacaacagtttttgacagggaaaaagttctgacgcttttaaataaagctattacgtattgtgacaataataacgggaagcttatcaacaagccaaccttgcatactgcaatagaacgctatcgtaatattcttcgcgatgccggaatgacaggggagaatgcgccgcattctttgcgctatgcgtatgcaaaagatgctgtgaattttcatgtcaataatggcatgagccggaatgaagcggtggctttagtatcgatggatttaggtcatggagatggacgaggacgttatataaagcaagtgtattttaaagagggtttggatgaatga

SEQ ID NO: 205127 - DNA, 702 bp, Klebsiella oxytoca
atgaaatcttttcatgattggttttattcatcatgttacaattcatttaaagttaaaagcaagagacaagttattttaactatggagagttggcataaatgttctgagggggtggcggataaaattaaaaacgaaaaagggataagttctatatgccataaaggatgctcgcgttgctgttctttacatgtttccttaattacgccggatgtgttttttatagctgagaatttaacaaagaatttgagtgagtcaaagttgtttttcattaaaaaaaggctaaaacttcgagctgataaggttgaagaatatattgatgatagctatagaatggagtgtgtttttctcggaaaaagttctgggcagtgtgttatctataattaccgtccggaagcgtgcagacgtttctttactaatgatgaaaaagattgcattgaaagtaatggttcaccacttcaggatggtgcggtgttttattcaactgggattctttcttcttatatggctcttgcagcacataacaatgacctatttatagatagtcatgagatgagtaagtctttatatattgctctggataatcctttgctttttaaaaaatggctgagaggcgagcctaatgtttttccgggtgttaagtgggaagggtatcatcaggaaattaaaaaaatgaatgctgatatgaagatcaaaataaagtaa

SEQ ID NO: 205128 - DNA, 558 bp, Klebsiella oxytoca
atgttcaggaagaaagtattggttgtttgtattgtctctatgtttataacagcatgttccatggatgagttatcttcagtaaataagaaaatcagtgattttggatcgtcaatagcaggaaatcagtcatcgcagaatgaatcagacatgcctaagttagcacctaaagttgaagccagtcaggattccacatcaaaagatttatctattccagttgatgtcgatactgccgctgctcgtttgcgccgttattataaatttatgacgacagatgagttaaatagtattaaaaatagagaaagtacttcggcccgtttggctgctgctgcgattgaggaacaaaggcctgaatggtcggcatcggcaggaagttattataaaatggggcgaaactggggggaaggcaaagatcatattacactggaggttgaaaagaatggtgttggaagtcgtatctatattcagtttttttcttcaaacccacaacatctaacagaagcctatttaggtaatttgtatacgcaagtgaaaggtgttgcagagggcaaggttcgataa

SEQ ID NO: 205129 - DNA, 180 bp, Klebsiella oxytoca
atgaatattttcatgaaaaggctactgaatgcggtgctacctgcccctcaaccagacaatcacgctgacgacagatctttactgacaagtttcaacgatgatgaagcggaagaaacgccggcattgtttgatacacgcccttacttagattttgagcaatggcataacgataacaactaa

SEQ ID NO: 205130 - DNA, 1542 bp, Klebsiella oxytoca
atgacaacgaacagctatctggagtatttcctgaccctgctgggctggctggtcaataatggcctctgggacgtccttgtcagtaccggactgtttgcgctgccaatggcctttaaggtcgtgggtatctggctgaaggttcgcgaagaaggggaagatgaaggtaacaagggtatgctgtcgctacctcgtatcgagaatgcgctttatggtgcgttcttcgtgatgattgcctgttgcgttccgctgattcaggtgagcctgactacgctggaatttgataaaacccgagcgaaaacgtgtggaacctggacaccaaaagcgcctgatgaaagtggttacaataacattatctccagtatggacggcgaaagcgcggctgcgccggtctggtgggtgttggtccataagttatccaaaggtgtgactcaggcagcggtggccggcattccctgccggccggatctgcggcaactgcggtttgaggtgcagcggacgttcattgagaatcgtgcgctggctgatgagttgcaggattttaccaacgattgctactcgcttgcgctttaccagtggaaacggcgcgatcaggggcagacaacagataaggcggctttgtcagacctcagttggataggcagcagtacctttcttaaaggagactactccaccctgcagtcgaaattgccgcgcgggatgttctcctggagcgatgcccgtgacagtggtcggccgaataccggtaatgggggatacccttactgttctgagtggtggtcggcagcagataccggcctgaaggccagggtgatgaagcaggttgatgacagctactggctgcgtttatctgcggcgatgaagatgattggcagcagccagactgattatcaggaggaggtaatacgtcggctcgtcagtccggcgaacctgacggtatcgcatggcggtgaagtatataacggctatggtggtaatgcggatatgacggcaatgaatgcgatttcccgcatcaccggaacggcaggcgcttcggtggcctcactgggcgcgttcccggctctggacgcgatgcgtcaggcattgccgatggtgcaggccgttatgctgatggccatttatattatggtgccattaatcctggcctttgcggcctatgagttcaagacggtgatcaccctgacgtttgtcatttttgccgtgaacttcctgacgttctggtgggaactggcccgctggctcgacagctggttgctgacggcgctatacagttctgatacccactcacgctttaatatgatgggattccagaatacatcggatgatctgattatgaatctggttatggggacgatgtttatcgtgctgccaaccgtatggatcggtgcattgtcttgggcgggtgtaaatattggtgtggctatcagtaatgcatctaaagaagggactggcagttcacatcaggcagctcagaatggcggaaatcttgtgaaaggagggattagcagtttccaagcgggaatgagtaagggaatgaacaaataa

SEQ ID NO: 205131 - DNA, 354 bp, Klebsiella oxytoca
atgaaaaacagtcaccgcgacctgctgcgtaaaacaggaaaagggttaaaagttgggacgctttatctgctggttctggcattgataatggtcctgggattctggctggccgatacgggaatgcgtcatccggagagcgtggcatccctgaagcgatggatgtacgcaacgcgctacggctggctggcgtggcggctggttatctactgcgccgtcgggtggggggtgtggaaaatctggcatgcaccgggctttcggcaggaatatcgtcgtccactgctgcgcatcgccggcgccagcacattattctttctggtctgcgagtactccattttttccggcgtgggaggctga

SEQ ID NO: 205132 - DNA, 1434 bp, Klebsiella oxytoca
atgaacatcgaagcattgaaattggcgactggcgcagtgttactgcttgccggaactgtgggtaccctattgcctgtccgggctgaaatttcgctaccgcaggttaatgacagcgcttttggctacggcaaatccgttgacggcgcggtatccgataaattgttttataccctgggcggtgggtcggtgatatcgcagccggcgacgcgcagcaatatgaaaaaaatgggtctggatgtggggtggagcagtgacctgatgtgcggcaactttgacctcaaaaccacaattggcaaccagttaaacggcgtaaccgatggttttaaaaatctgatgggtgacgttattcagggtgcaactggcgcggtggccagcctgccagcaatgcttattcagcgggccaacccgggactgtatgacatgctgaccaacggtgtactgcaggcgaatgtctcgttcgacaaagcacaactgaactgccagaacatggcgaagaaaatgatggatttcagtgataccagcaagtggagccaggcagctatagctgaagaatataaatcgctcgtcaatagtggggaaacggacgcaatacgtgcagaccaaaaatatcaggatgctgatggaaccgctggcaaaaaatggattggtggtcagataagaggaggaaaagggcagaaggcgatccggccgacctatgatttggcatctgctggttacaacatgatgaacagcctcaacgtactaagttcagaaaccgtgagtagcaccagttgtaacggtggtgcctgcagtaagttcagtaatgctgaagaagctgcacaagccgtggtgagagttcttggtgatcgctcaatgcgcacctgcagcaatgcgtcgcaatgcaccagtggagataccgatgatcagcccggtctgtccgttgctggtacaggatttgccccgatgctggaagaagccacaaagaacaatacagagcaactggtgaaactggttaatggtgccgtaaaacccacggcaaatgaactggcgaagctgaaaacgggtggtttgccggtaacggccaatgtcattaaggcactgcaacgtgacccggataataccgcactgacagttcgtctcgccagtgagcttgccatgtctgatacggtcgaaaccgctttgttgatgcgccggatgctgacaacaggtatgagtgagccaaatgctcaggatcaacctattgcactggaagatggtgttcgccggattgatgcactcgatcgcgaaatcatggcattgaagaatgaaatggaccttaaacgagagctggcgaggaactcggtactgaccatcattgagcgggacaacgaacgtgtcggcacaaacccgatgattcagcagacggacaatgccgacagccggttccagaaacttgatactcctgatgcagagtaa

SEQ ID NO: 205133 - DNA, 993 bp, Klebsiella oxytoca
gtgaatcagcctccttcccgactcagaaaaacgttctgctctgccgctgtcgccaccgttctggccacagcgtcaatacctgcaacgtttgctgcgctgaatacggcacagatagtggccagtgcagtgacgcaggactgcattagttggcgggtaagcggtatctgctactggctgttctgtactgcattcggctgcaccgtaaaaacctctgtaaaggtcacccattttattccggaagcggtggtttcgacctacgttgcgcccggtggaaatccctggacagagatggcttttgtcagccagacggcgggcgggctggaaaatgccgttactggtgctttgtcaggagtaactgccggcggtgctaatccggcagatatgaagaacccggggcagcgtaaatccagtattcgcttcaaatacgccgatgccattgggcatccggccacgtctcttatcggtggcagtatcgccgggtattcctgcgatagcgccgccactcccctgatgccgtatttcctcagcacgctggactctattgcctggcgaacgggtgtaccggaatcgctttatcccgaggcactgatccccggtcgacgggaaatcggtagccaggcatccggcaacatgtggggcaacgtctacccgcgctccgggtttgtcagccagaccgatgatgacaaagcgtcggcggtggtggcacagcgtgtggcagacattatcacccggacaggccagccgcacgtttatcaggtgttgaaggggacccgccgcgacgggtactggccaccgggagaagtcacggaaaacaccggcactaagaaccataagtggcagcgtctggcgcctcagatgactcaaagctgcgcggtatttccggacggtagccatagcgcggctactgataataacgaggcctttgctctgtggcagccctacagctgctgcaagcgtatggggcaaagattcctgagcagcactgatttttga

SEQ ID NO: 205134 - DNA, 402 bp, Klebsiella oxytoca
atgaaattacgcaattttctccttctgccgtcattgttgccggtgtccgttctggccagcacggtggtatataccgacagccagcacttgcctgaaaatctttccccggatgtcgtggttgtgttgctggatgaacctgaacgcctgcaggcgaaagtgtttggccagcttccggttgaccctgagctggcagcaatgcaggcaaggcaggtgatgtcctcccctcagtggcaacaaaagcagcagcaactggtcacagcatatcgccaggtagtgcatgcccgggaacttggtatccgcaaggtgcccgctgtcgtttttgacgaccgggaagtggtttatggcacaactgatgtagcgcgggctcaggcactacggctgcaggcaggaggtggtcagtga

SEQ ID NO: 205135 - DNA, 3798 bp, Klebsiella oxytoca
atggctctattggatgtaataaaaggctgttggtcagcaaaagaaactggtgcttcgattaatgaacaacagggagtctacgataccttaacgccgaaaataattactgatagcagtgttgaaccttattttgatgcgctggattttgctttttccaaatcagatgtgaaaaatattgctattactggaccttatggtgcaggtaaaagtacagttattctttcctatcttaaatctcgtcttaaaaaagattttatcaatgtgtcacttgctgatttttccttgtcaggaaagagtgaaaaatcagaatcagagagcgtagagattgaattaagcatactccagcagatcctgtacaaggaaaataaagataatcttcctgattcacgtattgatcgcattcagaatagaaataaaaagcacattttttctctgttcactactgtattaacagtggtatggccgatattattgttggctgtgacgttgtttcctaaaaaaatcctgtccttattcagcgtaaatgaaggtacgcttagtgcgatcattgatgcctatccagtacggttggtgttaagcgttgttatggggatggttggtttgtattttatcgtccgagccgcctctaaggctggtattttcgataaaaaaattaagcttagcaagatagcatttcttcagggcagtgccgatatagcaccccaggatgcttcttcactgcttaataactgcctggatgagattgtctatttcttttcccgttcaaaaaataaaattgtggtatttgaggatttagacagattaggtaataccgaagtgtttgttaagctaagagagattaatcagatagttaataataatatccagggtgaaccggttagatttgtttatgcctgccgggatgatattttccttggtgcagatatccggactaaattttttgactttattttacctgtgatcccggtgatggattcccggaatgcctacactcatttaaaaaacaaactaaatgattttccggccaatgagcaggcgcttcttaagcagatgtcattgtatataagtgatatgcgctctttgcaaaatattgtcaatgagttcaatctgttcaagaaggtggttgatgacaataggaatcaggcgaagattttttcacttatcttttataagaacatctacgcacaagattataatttaatagataaaaaatcgggtgttctatattcattcatccacgattatcggttgcgtaaactgcatgaaagctatttcattagtttggataaaaaattagaacaacttagtaataagttggtggagataaaaaaagaatctgcaaatactgataaggaattacggaagcagattgttagtcgatttattgctcctgaattatggcctattgtgcattttagctccgaacaatattacagcaatggtcattatatgactcatgctgaaagtttatgtgacgatgaaacaaattttattgcgttctttagtaggaaatcacaactttatgtaggttatggtaattataattctaataattaccaacctattgcccattcatccataatagaagaatataacctaagagttaaggttattgccaaggataaagcagcagaatatcaaaagaccgtcagtgaaattgaggatgttagggaaaatattcgtactcgtaattccatctcactggccgaattattaaaattgattggttgggaaagatttaaggagattgctgaagtctatattgaaaaatgtgatgatcgcacaattattgacctggaacagttggaaactatccgcaatggattccgctttggcggcttagaggctctttattacctgttgaccaatggtcatatcatgcaggattttatgatgttccggtctgtctttcataagggaaccatctctgttaatgataatgactatatcaaagccgttggtcgtcatatgggttgtgaagaagtaaaccagaattttttactggacaaccccaaagatgtgttggcggaattgattggccagcgttatcaatatcgagctggtgctatccaccatcaaatcgtagcactattgcttgatagtcgtcatagcgttgacacaaaaaatttgtctgagatggttgcgatgatattccagaaaacctctacggatattctggctatctttaatgtattagaatcctgttttgttgatgccgattattttacccggttagtggtcttttccttgggagatagccgctatctggataagatgatcgcggtgattgaggaacaggaacgcagcagcatcgtcacgtcaattgttacgaagatggtagctttaatctcacctgaggtatcagccaatcaggaaaattatcgacaatttattgtcgagcaagggtttagtttgatttcttttgtagaaggtagcaatcttgaaccatttcttaataatatcaaactgctgggtgttatttaccaggatatttctttgccgatcactccctctgaaactcaggcattaacctttatcgccgaaaatcagatgtatactctggataagaaaaattacagagttatcgttgctggattattacaacatgaaaatataccttgcgatcgggtagatgagttcccatggtcattactggagacgtaccaattatccagtgtaaaagagtacgtgaatgacaatatcgatatttttgttcgggaaatatttatagactctaaggaaagtagtaagactattgtatcggtgcttactcacccaaatttaagtgatgaccttaaaattggtatactgaaaaagatgcaattcactgtggtggatttacatgattttccagagcatattgatgctgatatggatgaattatcataccatgatctgttctaccgctacgatcgcgtagcgccgggatgggatgctttattaaattatatttgcgaagggtgcagccttgaggtattaacccagtacattgaagagcatgctcaggttttgagccaaaaggaagtgagcctgattgatgaggaacgctatgatctcctttatatgaaggttatttgcaatgataaacttagtgatagtgcatatttctcagtgttaaaaccagtttatattaatgttcatcattgggatgaacggttgagcctggacaactttctgcgtctgataaaaaatagcaaagtagagttggatacagaatcctttaaacaggcagtgcaatgtttcatttcggatactgctaagggaagtattgaaccatttgtactgtggttttctcaatttaaagaaacctttttctccgatacagattattatcttcgggatgagcatgacgatacttttcttgaggaaatgttggttgctattcataattcccagtgcttcactttttcggaaaaagccacgctgctgttcaaataccgtgagcgttaccatgagtccttccttgatgagctaactatctctaacgaaggtttactcgctataattgcgctttctactgatgataatttttccatgaatctgatagtcaggctgttaaaaaatggctatcgcagtcgagtggagatcgcacgtctggtgggcaggcttgaagaaaaagaattctctaagatatttaatcaaaaaagcgcaacactgaatctcagtaatggtcaacaagcggagctattcctgtctgctttacagcaagctggtcttattaagaaatggtcacttcgggaagcaggcaaatatcacgtacactgctgttatgaagaggatgagaactacattgattga

SEQ ID NO: 205136 - DNA, 384 bp, Klebsiella oxytoca
atgatgacgctgaagtatccggtgccctgtgtctgcggtaacgacagcccggataacaatgttttcaccctgccaccgcagggtgaacccgggatgtctgtggtgacgcaggctaatctgcaacgtctgagcgaacacatccgacagcgactgaatggcccggtgaccgttacctgtcaccctcatcgggtgggcctgagcagctgtgtggcagtgacggtggagggcaggctccgcagagcggttaatatccttatcaccgtcagcgggcagggaagctggcccgcagaggaggagtatgaacatccccgctggtatattaccgtgacggatacggctgatatgctctatctggtgctttggttaggtgatatattaggctaa

SEQ ID NO: 205137 - DNA, 2865 bp, Klebsiella oxytoca
atgttctctcttttcagtcgtaaaaatgaagcaaagccagatggcacggcaaagcaactaaaggaagaggcttctcctctggttattcgtggtcgggagccgctgacgcgaccgggccggatgaaccggcaggaagagacaaaagtctatcacgctaacccgtccatcattgattatctgccctgggtggaattcctggatgaagatcagtgtcttctgcttgaggacggtatctccgtcggtgccatttatgacgtaacgccggtggccacggaagggcgcacggatgatcggctggagcaaatccgcaatacggtggaagatgccctgcaggacagctttgatgaatatgatgagaatccttgggtggtgcagtttttctgccaggatgaggatgatgccgaagcgtatctggaccacttacgcggttacgtgaaaccgcatgcacagcgcacggcatttacggaagcctggctgggtgaaatggcgcgccatatccgcagtatctcgcggccggaaggactgtttaccgatgcgctgatcacagggcagccgtggcgcggtcagcagcgccgcacccgcatggtcatttatcgctggatcgggaaatccgcgtcccgggacccgatgccgccagtggcgatgctcaaccaggcgtgtgaacgtgtggtaagtgcgctgggtggggccggtattcgttgtacccgtcagaatggcctgcaggtgcacagctggctgctgcacctgtttaatccgtctccggactgggtggataaatccacactctatcgtcaggcggcgtatgccgatccgcgcgacttcccggcgggagtggcaccggtcagcaatgattttgctgaaacgctgtggtttacgccacccgtttcggatccggagaacggcgtatggtggatagataataaaccgcattgtgcgctgccggttgagagactgcgtactccaccggagccgggtaccatcaccggtgaacaggcccgcggtgagaaaaaaatcaacgcgctgatggatatgtttccggaagggacactgctgtgcatgacgattgttgtgcagccgcaggacagactggaagaacagttcaaccgtctgtcgaaaaatgccgtcggggaaaataccgaatccggccgtgtccgccaggatgttaaaacagtgaaagagtatctgggaaaccggcataagctgtaccgcgccgggatcaccttcctgctgcgcggtgatgatatggataatcttaaacgcaaacgacttgacctgactactgtactgctgggtgctggcctgcagccggttcgcccggagtttgaggtagggccgctgaatacctggctgcgggcgctgccaatgtgctttaacccggacagcgataaaaaacactggtacacccgcctgacctgggtacagcacctggctgggttgctgccggttaccgggcgggaaaccggtaccggcaatccggggttcagcttttttaaccgtggcggagatattctgacgtttgatccactgaacaagtatgaccgtacccagaatgcgcatctgctgttgtttggaccgacgggggcgggtaagtcggccacgctgtgctatgccttttctcagctgatggcggttcaccggccacgtctgtttatcgctgaagccgggaacagttttggcctgcaggctgattattttgaaagccttgggctttctgtcaacaagataagcgtcaaaccgggtagtggtgtcagcctgccaccgtttgccgacgcgcataaactggtcgaagaagggctggcagcacatgccgttgatgagagcgatctccccgatatcgatgccgacagcgacggagagggtgaagacgaggataagcgggatattctcggtgagatggagatttcggcccgtatgatgataacgggtggcgatccaaaagaagaagccgagatgaagcgtgccgaccgggcgatgatccgtgaggcgctgctgatggccgcacatgcgacatataaagaagggaggcagatgctgccttctgacctgcagaaagcgttatacagcattgccggcgatgacagcgatgaggggcagaatgtccgtaatgcccagcgcaaggcgaaagccgcagagatggcggaggcgctggggatgttcactcaggaaggcagttttgaggcggagctgttcaatcgcgaaggtgagctgtggccggaagctgacgtcaccctggtggacctcggtcacctggcgcgagagggttatgaagcgcagatggcgctgaccatggtgtcaatgaccaacatgattaacaatattgcggagagggaccagtatctcggccgcgatattgtctttgcggtggatgaggcgcatatcgtgacggtcaatccactgctgtcgccgtatatgaccaaagtggtcaaaatgtggcgaaagttaggggcctggctgtggctggccacgcagaacctgaaggatttcccggatattgcggagaaaatgctgaatatggcggaatggtggatttgcctcactatgccaccggaagaggtgaaagatatcagccggttccgtgcactcacgcctgaacaggaagccgtgctgctttccgcccgtaagctgtcaggttgctataccgaaggggtggtgctggccaaacgtattgaggcgctgttccgtgctgttccccccagtctgtatctcgcgctgggcatgacggagaaagaggaaaaggcggaacgccgggcgctgatgcgcgagcatcactgtagcgaactggaagcggcgaagctgattgcccgcaaactggaccggttgcgcggactgactgacgcacacgatgaggagagcacggcagcatga

SEQ ID NO: 205138 - DNA, 840 bp, Klebsiella oxytoca
atgatgaatcagaatgtcacacagggttttactctgacctggctgtttcgcggacagggtgagtgggggatccagttcaccaacggtttttttgacaccatggaagaagcaaaacaggtgatgagtctggcaccgttcgcacagttgctctgggtggatgcgagcctgatgctggatctgagtgccacatataagatgataccggttgagaacgacaggtttattgccggtccactggtgaatgggtctgagggtatccgggagtcactgtttcagacaacagacgttcttttctgccgccccgaatatgcttcttttgagctgatttcatgtaaggcgacccggttgggcctgcagggcgacgacgttgtgtccaccgttgtgccggaggaaaagaatgcgggcttttctttgataaagcctccgtaccgcatttttctggtctgcctttttattctgacggttattttactgaccggctgttcaacgacaaaagaagagatgctgccgacaggcgatcataccatgcttgaactgtggaacggggcggacggagaagggggtacaacacggcagtccactgcggcaagggatgcgctgcaccgtccgttaaccgacgatgaacgccggaaaggtgctcaggacgatcgcagctacagtcgtacgcaggagagtgaaatctcacagcaattctcacgtttgcccaacccggatatggtgatgtacctgtatccccatctggctggcggtaacacgccagtgcctggctacagcaccgtatttcctttctacagccagacacagtatgcaatgcctggtgaacgtacggaggcgctgtaa

SEQ ID NO: 205139 - DNA, 1506 bp, Klebsiella oxytoca
atgcagattaagtccaatgccatggtgaaattcattgttcccgcagtggtggtggcggggctggctgtgggcctgaaaagctgtaagggagagcgattacctgagaatgcatcgggtgatgtgacgacggtactgaaaaatctttcacaggatgagcttaaggcgctcggagtggaaggtgatacgccggaagataccctgcgtacgctgataggtcggctgaatgacgttcgcgatcgccagaaaacgctggataagcagaatgccgatttgctgaaagagaatgagcaactgcgtaaacgcggcactaatgtatccggtcaggttgacgaggcagtgcaggagctgcgtaaagagtatgacaaacgtcagcagcagctacagaacgaacagaccagcctactggcaaaagtgcaggcactgtctgaacagctgaaaaccaccgaccgtggtgcagcaggtgcaaaaccggcttctgacagcgatattccgctgggtctcggtctggatggtctgggtggcagcacccatggtaccgccacccggggcgatgatggtctgatgtgggtgacgccaggcgatcaaaaagcggtcgatccgcgcgataccgccagtggtaaggcttcaccgcagtttcccacttcatttctggacaacaatcctctgacccggcagaaagcggcctatgagcaacaggttaaggggcacacgaatgagaagggggcacaggacagcgctgaacctgtttacaccctgccggaaaattccaccctggtgggcagccgggcgatgacggcgttactgggccgcatcccgattaacggcacggtgactgatccctatcctttcaagatcctgattggtaaagacaacctgaccgccaatgggattgaactgccggatgtggagggggcgattgtctccggcagcgccagcggtgactggactctctcctgcgttcgtgggcaggtgaacagcatcaccttcgtttttgctgacggtacggtccgtaccgtgccccagccagacgtcagtgggaaaaacaccggcaacggcaatacgcagaataaaaccggtaccgacggcggcatcggctggatttcggataatgacggtattccctgtatcagcggtacccgcaagtctaacgcgtcaacgtatctgcctactctctttgcgctctctgctgccggcgctgccggggaagctctcagtgaggggcagtacaccacgcagaacaatgttaacgggatttcatccacgctgaccggcagtgccggcgaagcggcgctggggaaagccctctcaggtggcatgagtgagaccactgactgggttaagcagcgctacgggcagacgtttgacgcgatttatgtgccgccgggtgcgaagctggccgtacatatcacccgccagcttgccattgactatgaagataacggccgcagggttcgctacgatttcaccctcccgggtggtgtcagcgacaacggcggtctggactga

SEQ ID NO: 205140 - DNA, 924 bp, Klebsiella oxytoca
atgaagacccgtaatgatacccgcgccgggctgatggcgctgtcccttttgctgttgccgctggtctctctgaacagcgagctggctaaggctgatgaatttatgaaatgggagcgtatcccgttgcaaatcccgctgcaggtggggctggaacgggtggtatttgtggataaaaatgtccgggtgggttttcctccggcactcaacggtaagctgcgtgtgcagagtaccggcggggctgtctacctgaaggccgacagcgcttttcctcagacgcgggtgcagttgcaggatgtggaaagcggtgaggttattcttctcgatgtcactgccggtgaaaaaggtccttccgagcccgttcgtctggtctacagcggtgaggtgaacacggtaagcagtacggccgatacccgtcggcaggcggaaaacagcaacatccagccgggaagtgatgacggtacacaggcgaagcgtaaaaaggtgcaatacagcgcccccgttccggtattgctgacccgttatgctgctcaaagcctgtatgcgccgttgcgtacggtagaagccgtgccgggtatccgcccggtgaatccgcatttacccaaacgcctgacaacactgtatccgtctgaagccataacggccacgccgctggccgcctggggcgtggcaaatcgcgctgtagtggccgtccgtctgcaaaatactgccagccgcaggattgtactggatcctcgggccctgctgggacagtttgtcgcggcgacgttccagcaccgctggctggggccggtgggcacgccggaagataccaccacagcctatatcgtgacgggcacgcggccggaaagcgctttcatcgctgaaccttccccgatgcgtaaggctgttcataccgcgaagaagggggttaaccatgcagattaa

SEQ ID NO: 205141 - DNA, 660 bp, Klebsiella oxytoca
atgagccgttttcgtcatgcggtcaaagaccgggatcagcatattctgacactgcgtattgcctgcggtgtactggcctttttcctgttaatcacctgcgccggctggatgctggccccaaacaaactgactgtccataacccacctgatttacgtaccggcagtacccgaccctggtgggaagtaccggcgtcatcggtttattcctttgccttctatattttccagcagctcaacgcctggccgaaaaatggtgaagtggattatccggcaaaaattcatgcgttgtcagcctatctgaccccgggttgccaggactatctgaataccgaggcccggaaaagaagcaacgctggcgaactgactgaccgtgttcgtgtggtgtatgaaattcccggtcggggttatcagtcgaagagcgtcagcgttatcagcagagataactgggtggttcgtctcgacctggtggcggatgagtattttcatgctgaaccggtaaaacgcgccctggtccgttatccactgaaagtggtgcgctgggagggggatgctgaacgcaatccgtttggtctggcgctggactgctatgacggtgtaccgcagcgtctggaggcggcattgccgacggaaattcccgcgaaatcaggagtgtttcagtga

SEQ ID NO: 205142 - DNA, 357 bp, Klebsiella oxytoca
atgcagatcattcgctttttacctgaccgtctgaacagtgaaccggtggtgtttcgcggattcactacaccggagatggggcttgctgccctggccggtctgggcgtgggtctgctcctgtctctgccatttattcctcttgtcggctgggtcattatcccaaccggcatgttactggcgccgttactggttatcggtttcggtggccggtggctgagccgcattaaacgcggcaagccggaaaactatatctggcagcggctggaggcgttcaaacgtcgtcacagcctgggcaacccgacactgatcgttgatgcccggggatggtccctgaaacgaaccgggagagaaaaatga

SEQ ID NO: 205143 - DNA, 387 bp, Klebsiella oxytoca
atgtattactttgagtctgttgccgcccgcgtgcgtcgtggtattgaccgcgttattaaccgtacgttcacgtgggcattactggtctggctgacctgtaaacccgcatttgctgacctgcccactgtagaagcgcctgaatcaggaggcggcagtggcctgatggggcagatcaaaggttatctgcaggatggtgttgttattggtgggctggtagtagccgccattgcgttcattaacgtggcgattgcagcagttcatactttttctgaggtccggaatgagaaggccacctggacgaagtttggctccatcatcgtggtgggtgtggtgttactggttgccgttatctggctgctgggcaagtccgccgccattattctctga

SEQ ID NO: 205144 - DNA, 243 bp, Klebsiella oxytoca
atgggaatgacctccgcacaatccaccgcctttaaagctgcctccggcaatgtcgaggtcagcattctgcacctggtctgcatcggtgtgttactggcctttctgtttctgtgggctgcatgggcattgtccgatgtgtggaccggctggagtaacgagaaagttcggaatgctgcgctgggtcgctttgctatccgggccgtgctcctgctggttgtgagtatctggatgtttgccagctga

SEQ ID NO: 205145 - DNA, 342 bp, Klebsiella oxytoca
atgaatcatccccgtccggtccgaagcctgagcgctcgtatcccgggcatcaccggtctgttgctgttggccacattgtcaacgactgcacaggcggcagaaaaagacgagcttgcctcagcccagcgccagctggatcaggtgcaggcttcgcttgaacgtgcccgcgtagcggcggcccaggccgatcctgctgagcaggggcgtttcttttttgactaccgtcaggccacatccgatttaaacaccattcgtgccggtattgaccgctatctggagccatcccggtcccaaccccgggcttcatctgtcagcggcaattatcgtcgggagcgtccctga

SEQ ID NO: 205146 - DNA, 1038 bp, Klebsiella oxytoca
atggctgaaagtcaagttccttacgattacgctggcaacgaagctggcatcattggaaacctgtctaaagagcgattcgcgccctacttaaaaaacgctgggtttaatacacaatatgcatttagtttgtatctttataatgcacggttgtcaaaatccttcctttatcctttacatattcttgaggtcactctccggaacaggatgagcgagatatttagcgtttatttcgatgagaaatggtttaaccatagttctttcagatcaggtttatcagctgaaagcatggatgcgcttgatcgcgggattagaagagctaaaaagcccaacaaggaagatattatttcaacattaacttttgatttttggtcaaacctgtttaggccagagtacgatcggtttgtatggcaaacaaatatgcagaatttattgccgaatatctctatgacccgaaaagatttcgagaaaacggtcagggatattaacgattttcgaaatcgtattgcgcattatgagccaatacataaaatgaacttgagtcagatgcatgttaaaatattaaatgcattgcaatggttatcaaatgaaaccagcctctgggtgaagcatcattccactgtcaacgaatgtttacgcatgaaaccatcacctaaaggagacgggaatgttttaataagcgaccgatgtgataaagattttaaagtggtaactctcgatgaagctatcagtgagataaaaatctcaaaatttacagtttgtgttaatggtgaaggtgatataaaggctgttctaaagaaagaacacctggccaagtatttgatctcccaatcggaagatgatgagataattatagatcttaagtctcataatataagcactctaattgaaaagctaagtgttagtaacatgaatttttgcagtgcaagtgagccttataaaactattgaaaagtatttcaaaagtagagtcagttttcttgtcgttctggacaaaggacaaatcatgggcatagtagagaaagcacatcggagatattaa

SEQ ID NO: 205147 - DNA, 792 bp, Klebsiella oxytoca
atgcgccggccattgtgccagcaggaggtgaacttggctgaacctcagcgtaatagtcctcctccgccccggccggagaagccacatggtttgctttataatgtgttctggggctggccctgggcattgttcggcatgctactgggttcgctgatgttgagcctgctgattgagtacaccggcatagcgttcttctggccggaagcgggggcagcccacagcgaggcggtgatgaatactgaactgggctggctgtcgacagaattcacccgcagcctgttgctgtctgagccttctgtgactgttgttcgatgggtaacattagcgtatcagtggctgtttgttgacagtgggtttactggctggataaagcagcagaatgtgttgcagactggcagcgataacgagctgacccgtaatctgaacaactggagtgggtggcttgcgggctatctgcatgaatatctgatggcgaccgtatggatatgcgtgattaccctggtgcgggtaaccatactggttctttcagtcccgctgtttctgatggtagtgctggtttcgctggtcgaagggctgggacgcagggatcttcggcgctatggggcgggttatgaaagttcgtttgtttatcaccatgctaaaaagatggtgaaaccagctatcgtagtacccatgatgctgtatctttcctggccgacggcggtataccccaacctgttgctgttgcctgctgccatattgctgggtgtcgctatcacggtcaccacggcttcattcaagaaatatctttag

SEQ ID NO: 205148 - DNA, 2091 bp, Klebsiella oxytoca
atgagtaaccgctacgtgattgaagccctgttgcgtccggcggttgagctgaatactgctgtcgtggccggtatggcggcatatgtttgtgtacaggctccctgggctgtggcgctggcaccttcagttagttatgtaaccgcgtctggctttgcggtgttatctgttgtgcgtgcccggcaagggatgaagattcttcgttatcgccgcaatctgacccggctcccccgctacatcatgagcgccggacagataccggtcagccgtcagcgcctgtttctcgggcgcgggtttcgctggacgcaaaaacacacccagcgactgcaggatacgctacgtccggaagtggcgaagtacctgcagccgggctggctgtatcaggccgctcgctggctggaaatgaggacggagcactcagctccggggctgggaaaactgctgcgtacggattcgcccctgaacccggttcgcccattgccgccagtgggtggtaatccggtgttgcatggcattgagccgaatgagcaggatgtctggctgacgctgctggagcgtgtggggcacaccatcgtctatggcaccacccgtgtggggaaaacacgcctggcagagctgctggttacccaggatattcgtcgcggtgaagttaccattgtttttgacccgaagggcgatgccgatctgatgaagcgcgtctgggctgaagcacaccgtgccggccggggcgacgcgctgtatattttccatctgggctggcctgaaatatctgcacgctataacgccgtcgggcgttttggtcgggtgtcagaagtggcgtcccgcgtggcgggccagctgtcaggagaggggaacagcgcggcgttccgtgagtttgcctggcggttcgtcaacattatcgcccgggcccttgtagcactgggcgagcgtccggattacaccctgattatgcgctatgtgaacaatatcgccgatctgtatatccgttacgcagagaaggttatccgtgagcagcttccctcgctgcaggctcaaattcagaataacgagcagattctgggggatgatgatgtcccgcggaatatgcaggggcagccggatgcgatacgtatctggtccattgaggtggcactcagttcagaagagggaaagcagctgtatgatcccattctggatggtctgcgtagcgcagtacgctatgaccgtacctattttgataaaattgtggcttccctactgcctttgctggagaaactgactaccgggaaaacagcggagttgctggcaccggactatctggatatgaacgattcacgaccgatttttgactgggagcagataatccgcaaaaaggccgtggtgtatattggcctcgatgcgctcagcgacagtgaagtggccagcgccgtgggaaactccatgtttgccgatctggtgagcgtggcgggtcatatctacaaacacggtattcatgccgggctaccgggagagggggagagcaaggtcccgattaacctgcactgtgatgaattcaatgagctgatgggtgatgaatttatcccgcttattaacaaagggggcggcgccggcatgcaggtgacggcctacacccagacctcatcggatattgaggcccggatcggcaatgcggccaaaacggctcaggtccagggcaacttcaacaatctgattatgttacgtgtcagggagaaccgtaccgccgaactcctgaccacgcagctgccgcaggtggagatttacaccaagacgctggtctctggccatcaggataccgatatcagtgcgggccaggattttacctccagtacgcaggatcgtgtcgggacggtcaaggtgccgttgctggagccagctgatgtggtaacacttccgaaagggcaggcattcgccctgctggaaggcgggcaattgtggaaaatccgcatgccgctgcctgccggtgatgtggatgataaactgatgccgcagagtattgcgaaaattgccgaggaaatgcgccgcaattatcacagtggtgaagcgtggtggaatgatgcgccggccattgtgccagcaggaggtgaacttggctga

SEQ ID NO: 205149 - DNA, 513 bp, Klebsiella oxytoca
atgacattttctttacagcgtttactgcggaccggctgtctcagcctcgcccgtttactttttttgtggccggcgttactgaccggagccgtgatgctggtgatggccttcctgtcgtatcaggggggcgtcacatcgcgtctggattattacacgtatgaggctgcccgctggcgcaacgcgccggaagggagccttatggtgcggcgctgtatcgatgccgctacggacaatgccgtattccctgttgcaccgctgagcggggatgagtggcgtgtgatggcagcaagggaaactgactgcccgacagtggcggaaccgtttgaacaggcagctgaaaacgatatccgtgcattacacctgctaatgaaaattgttctggtgatcagcgtttgcctggaactgtttatgacggttcgtgctcgtaggggaagggggcacagtggcgcggtggcgcatgttcgcatggcaaagggcggcgtccgtatcgtcagggaggaagataatgagtaa

SEQ ID NO: 205150 - DNA, 600 bp, Klebsiella oxytoca
atgagcgcactgcaactgagtgctgcgctgttggtcaacccgttgccggccccgcttctggcggcgctgtttatcatggtgatgctgcgtctgagctttcgccagcgggagaaagccagcgttcgtcgccaccgtcgctatcaggctgcggcggcacgggtgctggaaaaactgggcactctgccgggggacggtcagcgtatgcagtacctgcgcaaaattaacccttatgtatttgaggaattgctgttgctggcgctggaacgacaggggctgacggtcgttcgtaatgcgtcttacagtggggatggcggcactgacggacaggtcattattgatgacgaatgctggttgatccaggccaaacgctacagccgggcgattacacctgcccatattcgcgactttgaccagcttcttgaacagcgtacctgctgcggttttttcattcacaccgggcggaccggacacatgagtcgggcggtctgctccacctctccgcgtctttttatcatcagcggccagcgcttgctggatctgcttgccggccgacatggctggctgtcaggttgttcatattttcagaggacatctgtatga

SEQ ID NO: 205151 - DNA, 507 bp, Klebsiella oxytoca
atgaaaaaactgtttttaatgatgtgtctttttctgcccctgacgggccatgccggactgaacgtcctcgctgacctcggcggggaggatgccacgtcttattttgacggcattaataaacaacccggcctgccggaggcgtcaccggcaaccccgccagtttctgcgatggcagcaatgtttccgatcagcacgccggagatgatgccggggacggtggaggatcgtccgctgcagttgccgggcattggtgcgcttttccttatcggtgatgacgaacagtcacggtactggctggcggagaatgcgcaggcgctaattgcccgacatgcggcaggcatgattgtcagtgttgacagtgcgtcggctgttgagtcattgcgggatctggctcccggtgttccgatggcaccggcatccggctctgagctggcccgccgtctgcagttacgacattacccggtgatgatcaccgataccggattgtcccgacaggtgcggccgtga

SEQ ID NO: 205152 - DNA, 675 bp, Klebsiella oxytoca
atggcatatcgccgcattctgatcgccctgatgctggctgtaagtggcagtgcaacggcagcaggtgagactgtaccggaagggtatatccgggtggccgttgcgcatggagtaccgccggaagcgctctattctgtctcgctgacggaaaccgctatggcgccacgatcaattgctgcggtggtcaggcagaagacaaatctgcctgcggtgagtcgtccctggccgtggacgattaatgtggcgggtaagggataccgctacgccagccgtctggaggcctggcgggcactgcaggtttttatgtcacgctattcccttaaacgtattgatgtcggtctggctcaggtaaacctgggctggaacgggcatcactttgtttcgacctgggcggcgtttgacccgtacaccaacctcaatgctgcagccagcattctgcgcgagtgctgggagcgtaaaccgggtagctggctggatgcggccggttgttatcaccatccggcgggtgggcaagctgcagcacgatacaaaactatcgtgaaacgtcatcttgtccgtctcagcggcacgccccgccagtcctctttgttgccgccttctttattaccgcagacagtggcagccattgcccctgaacctggttttatctggactgagcccgggagtgaaccctga

SEQ ID NO: 205153 - DNA, 705 bp, Klebsiella oxytoca
atgcaactgaaactgacttttcttgcgctggtcatgctgagttcgcgggctctggcggccacggatacctccgtagttgaaaactcgcaaaccactcagagccagacgcagtccctgcagcagaaagccggcgaatgggggctaagcccggaggattaccagcggtatcagcaactgatgaatggccccagggggattcagtccccggggctggacccactctcggcgctggggattgaggcccgcacgccggcagagcgccgtcagtatgcggaaaaatgggttaaagaggaatttgcccgtacgcaaaaagaactggatttccagcgggaaatcaatacggcatggcaacggctttatccggacagactgccggtgaatctggggaatgctgccggtgttgcccgggataccggggggcgtctggcgttgttcgttaagtcgaagaactgtccgacctgcgatgcgcggctgtctgcggtgctcagtgacaatcgtccggttgatatttacctggtcgacagcgaggggagtgacgatacgttacgccagtgggcccgtgctcaccgtatcccggcggagaaagtccgttcccgccagattacgctgaaccatgacggtggccgctggctgcgctttggcgacggaatgatgccggtgttgctgcaacagggagaaaaaggatggcatatcgccgcattctga

SEQ ID NO: 205154 - DNA, 723 bp, Klebsiella oxytoca
atgagcgaaaagaacatcactgagtctgttcccgccggggaaaagaggcgtctgtggtcatggtggtctgctgccggcgtctgtctttgtctgatgatggcagcggccggctttgtattgtacgtgctggtcagtggtatgactgacctggatacgcgcctttcacgtctggaagcacaggataatacagccacaaccagcacactgttatccactcttcagtcgcaggtctcaacgctgcaggccgggctggctgataaccagcagcgtgtgaccgcactacagaaagagaccgaagcccggaccggaccctcgcaggaactggccactctgcaggcatctgccgcacggctgcaacaggcgcagcaggagatggaaacccggctgagtgtgcttgctgaccagctgaatgccctgaaagcggtaccggctgctgcgacttcggctccggaaaaaacaccgacagaagtcaaaaaacagttacctgttaaaccccgttcgacggctgttgttgcacgtcatgcgccgtttgtgctgaccggcgtggaaagacgaggcgcggagtcctgggcggcggtagccccccgcggttaccacagcctgtcgcagatagcgcttatcggggaaggggaaaccgtctccggctggacgctggttcgtgccggttacagcgaagcgactttccgtgtcaacgggcgcctgacagcccttaaggtggagtaa

SEQ ID NO: 205155 - DNA, 600 bp, Klebsiella oxytoca
atgaaatttcaaccccgttataagactctgtctgttgttctgccgctgcttttactggccggctgctgctcctctccacctcagaaactacaacagcgtgaagccgctgtacccacgccttccgtggctgtcacccgcaatgttcagactgtcgcgcctgatgaatatgccagaacgccggaggtggtgcgttatgaccgttatctgctggtcagcacggatccgatggctgcccagcgcgatccgctgtcgcagattattgatatccgtatcccgtcatccctgcatccgaccgtggcggatgccctgcgctataccctgaagcagtccggctattcactttgcgccacaggaccggcaaacggcgttctgtaccgccagccactaccggccgtgcagtatcagctgggacccatgcgactccgcaccgccctgcaggtgatggctggcccggcctggcaactggaggttgatgatgttcagcgtgtggtctgccacagtctgcgtgacgggtatcagttaccggccagtcagttaccgcctgtccaggttccccggaaggtacccaccccggttacgggagggttcctgaaaaaatga

SEQ ID NO: 205156 - DNA, 1086 bp, Klebsiella oxytoca
ttgaataacagtacaacagtgatccttcctcaagtagagaaaaccttggtactgaacactgcgccttactgggcatcgttctactgtggaattcttaaaactgtacgctaccagaaaaaccttccatctagctggaataacagcaaaagcctccaagactatagaggtgcgctcagagaaagcggcttctttaaaaacatggagaaaaccgttcttaatcatgcatttgaatatgtcatggtcgacttccttagaacaaaaactggaattgagtgctttaaaagcttatgcaccagtatcttggccgactatgacataaacgggttcaacatcacgaagatgaatatcttcaaagtcggaaacgactccgagctatattttgccaagcaaaactacaacttggatcgagttcttatgcttttgcctggaaacaaaaaagcataccccgaaacaaagggtctcggccttacattgaacggaacgctagacaattcagatcttttcatattgatatcgaacgatgaagaaacaataggttttgtcggcgaagtagaaggcaacaatggagaagatttgttccttgcctcttacttcaaacgaaagcctgtcaaagacaaatattgcactttctgcatagggatttcggaaaagacaaagcataacaaggtccccatcaaaggggaggtcagtttaaacaaaagcgaggctgtaggacgctggattctaaacttttcaaaatctagccattttgcaaaggattaccgcagcgcggttcgaaatatccaagggcttgtggatggacacttcggccatcttgaagacatcgaggatctcggacatacgaaaatactcaatgcaataaaaattgattgggccagagatattgaccaactaatctcgactttagagtctttcatcgattacgttttccctacagacaccttttactatcaagaaataatagacgggaaaacgacgtatagaccctctccgctagctctgcctggcgaactgccattatactcaatcgagccgggggcggtgatcgactcacagctgtcaccgaccatatacataccaaaatag

SEQ ID NO: 205157 - DNA, 870 bp, Klebsiella oxytoca
atgtctatctatcttaatttcccaccacccgcgaactggcaggattttcaaattctaacattgcgacttgtagaacaaatgtgtgaacctgatacagtgagagaatatggaaggcaaggacagcggcaagatggtgttgatgtgtatggagagatgtctggtgaattgcatctgggcgttcagtgtaaacagatggagcccggcaagaaactaactatgaagttgattcaggatgaagctgacgcagcattagcttttaagcctgacttacatgtattcataattgcaacaactttagccgaagatactgcaattcataaggcagtgactacacttaatgcgtcaaaaaaatataatttcaagattagttattggagctggaatcatttcaatgacaagctaaatcgatctagtaaactaatggaggagagctactgtaactacgctaaatcgtttgatgataatgaatatcttcgtgaccttgaagcgattttcgaagctttttctcgacccgcattcattgacaattttaagcacgagctaaactacaatgattttcttcacgggttaggtgacacagtactttttctgcaaacaggcctcctaagagatcggcttactggggaattacttcgtggcacctatcctcttagcatgttgcctgctggtgagagcaaaaagttgcgcaaacgcctacttgacgaagtcaagaatcttcgtaagcgcgctcttgaagattactcgaatggacaactggatcagtctaaagcacaagaatacaacgcttcacgatatcttcttatctcagaagttaacaaattatttttatctagtgggatgccagtaattgtcccattatatggtttttag

SEQ ID NO: 205158 - DNA, 516 bp, Klebsiella oxytoca
atggcttcacgtggaattaacaaagtcattctggttggaaatttaggccaggatcctgaagtgcgctatatgcccaacagtaacgcagtgaccacgctgtcgatagcgacttcagagagctggcgcgataagcaaaccggcgaaatgaaagagcagaccgaatggcaccgtgttgtgctgtttggcaaactggcggaagtgaccagtgaatatctgcgtaaaggctcgcaggtgtatattgaaggccagttacgtacccgtaaatggcaggatcagcatggccaggatcgttattctaccgaagtggtggtcaacgtgaacggtagcatgcagatgctggggagtcgtcaacggtcgggtagctcctcttcccaacaccagggctctcaacagcagggatggggacaacctcagcagcctgtatcaggtggtcagccgtctcaggttgggccgtcgtcaaccggacgcaccgctgccggcatgccgatggattttgacgacgatatccccttttga

SEQ ID NO: 205159 - DNA, 204 bp, Klebsiella oxytoca
atgaataattcaacaggaattctggcagcagagtccggttttactttacctttgcaggtgctcaaaagcggtcgcggttattatatcggtacggcaaatcatgagggacctgtttcccgtgagtctgaagaatacttcagtacccataaaaaagcggttcaggcgttcaccactggtgcctggactcaacgtgagtgggcataa

SEQ ID NO: 205160 - DNA, 465 bp, Klebsiella oxytoca
atgtctgcaaataatacgacttccggcaaaacggaatatttcaacctgaccattaaaggtctgggatatctcagcaatattcgccaggtcaatcttcagaacggctcttttctcagttgtgtgattaacgcgctgagtggtccgacggataacccagtatatgttcgctttgatgtttccgttgccggcaaagaagcgaccagcctgattggccgttgccagaaagccgttgatgaggataaaaaagtccttatcggcttcaccttaagtaatccgtccacggatatctttacgcttaacaaaggcgatcatgccggcgagcagcgtgtcagcctgaaagcccgcttaataaaagtggactggataaaaataggccaggatatggtttataagactgaaaaaccggactccatgccgcctcagaacggtactgctcagcccgaatacgctgaaaattctttctga

SEQ ID NO: 205161 - DNA, 2046 bp, Klebsiella oxytoca
atgcagctttatctgtgtgagaaaccgtctcaggcgaaagatattgcgcgggttctcggcatcagtaaacgaggacatggatttatcagcggtggcaatatcaccgtcacctgggccattggccatctgctggaacaggccaacccggatgcttatggcgaacagtttggtaaaccctggcgggccgatgtgctcccggttttacctgataactggaaaatggtggtcaaaccccagacccgggatcagttcacggttatcagtaagttgctgaagcaggccggagaggtgattattgccaccgatgctgaccgggaaggtgaggttatcgcccgtgagctgctggcgtattgtggatatcgtggcacagtacgtcggttgtggttatccgcgcttgacgaagccagtgtccgcgaggctctggccggtattctgcccggggaaaaaacggcaaaactgtatgaagccgggctggggcgcagcagggcggactggcttatcgggatgaatctgacccgcttgtatacccttatagctcgtgaatccggtgtttccgacgtgttgtccgttggtcgggttcagacgccgacgctggcgatagtggttaaccgtgataaagaaatcgctgattttgtcccggtcccctggtggctggtgcaggctctgcttgagaaagatggcgtgcgcttcagggcgacctggcaggcggcagcgcagtactgcgatgacgaaaagcgctgcgtgaataagcaggctgcgaacgctgtcggacaactctgccagcagcagaagggcgcaacggtactggacgtgagccagaagcgcgataaaacaccggctccgctttgcttcgatctgggaacgctgcagcaggtctgctcccgtaaattcgggatgggggctaaagagacgctggctgtcgcccagtcattatatgaaacgcataaagcgacgacctatccgcgaaccgactgtggttatcttccgacatcgatgcagcaggaaattcctgatgtactgaccgccgtcaccaaatccgatccgtcagttgcaccggtgctgacccaactggaccgcgggtttgtctcccgggtctggaatgataaaaaaatcacggcacaccatgccattattcccacacgccaggcatttgatctctcgcgcctcagcgcggatgagctgaaggtttatcagcttattcgacagcattattttgcgcagtttttgccgttgcaggagtctgatgtgaccgacgtctcttttaacataggcgggcagttgttccgggccagagggaaagtcaatgttgtcacgggctggaaactgttatttcagaaggaccatcagaatgagcaatctgaagataccagtgataatgatgccgacatggcgctgccaccgttaaacaaaggtgacacctgtattgtcaatggcgcagcggtggaagacaaaaaaaccagtccacctcccccgtttaccgagggaacgctgattgccgcgatgaaaaatgctgccagtttcgtcagcgatccgaagctgaaaaaagtgctgcgcgataatgcgggactgggaaccgaagcgacccgggccggtgtgctggagacacttttctcccgtcattacctggagaaaaaaggcaaacatatccacgccacgttgctggccagggaactgatagcggcgttgcctgaaacgctgaccagccccggtatgaccgcgctgtgggaacaggcgctggatgatatcgctcaggggaaaatgccgctggatacctttatgcagaaacagctgcagtggactcgccatctggttgacaaagggaggagtgatacagtgaagattaccgcgcctgtgacaccaccctgcccggtttgtaaggggccgacccgcaggcgtaagggaaagaatagtgatttctggggatgtattcgttatccggagtgtagcggtattgttgcagggaaaagtggcgggaagggccggaaaaccgcgcggggcaaaaaaacggcagcaaagacgaaagcggaattctctgcaccgcaataa

SEQ ID NO: 205162 - DNA, 756 bp, Klebsiella oxytoca
atggaaaagggtaaaaagaacgcggatgcgaaggtcggtaatgaagcatcttcaccgcgggcaggcgcactacagtccgcactctcggtagagcttcatactcactatgccatcagattatgggaagggcgtaagcaaagtgacagtaattcccgtagtctccatgagaaaaagcggcctgaaatcattagtatgccaaaggccattcagcgtgccggggtggcttcccgggattcagcagcagataacccttatgctgatatggtactggtgaagctggaaaccacgcttcacatggcgtccaataagatcagtacgatagtgaatgaactggatgtgattctgtcagctgttcccaaagggataacgctttctgacattgcgtctgcgtatcctctgaatatcagcgtttacagtcgttccccccttgggtaccggtgcgtatggctgctggtcggttacgaccaactggcaatgaaagcgtttcaggctttccattatgggctgatttcacgcgctcagcgcgatcagtatctcaacagaggcgggcatgcggtcagacaggtttatggggctattcagccttattacaccgtggcggttaaccggagtgacattattaatctgaccgcccgcgggaaagaggccctggcgcggttgggtgaacccgatcccgatattttctccggtaaaaagcgatcttctttttcatcgcctctgcgggaacacactgttcgccagggcgaaaagcgctga

SEQ ID NO: 205163 - DNA, 219 bp, Klebsiella oxytoca
atgattaaaaagtatacggtgctgatactgccgacagtggtcaaaaagcatacggtgttggcactgccaacagtggttaaaaaatgtacgctgttggcactgccaacagcggtcaaaaagtgtacggtgctggcactgccaacagtggtcaaaaagtgtacgctgttggcactgccaacagtggtcaaaaagcgtgcggtacttactggcaatggataa

SEQ ID NO: 205164 - DNA, 1239 bp, Klebsiella oxytoca
atgacgctgcctgcggacaacctgatagcgtttacgctggaaaaaatgaatgcccgtctggtggctaatccgctgctcgatgacggacgggtacgcagcggcctgctgtttacggggaacatgcatgatgccatcccccgaaggctgttgctggatccacggctttccccccttgataagatgggctggatgatgatccgcctgtatgcgcagaataatgaaggcgcgatattccccagttatgatgagctgcaggtgcaactggcttccccgggtaaaggtaaagcctcccgtgaaaccgttagccgggtgttgctgatgttacgaataaccggctggctcagcctgtgtaagcgggttcgcgacgataaagggcgggttcgcggcaatatctacgcgcaacatgatgagcccctgactttccgggatgcagaatcactggacccgcgttttcttgatgtggttgccgatgcctgcctgagtaaaaaccggacggtcagtcagatcgcccgggatgtgctgggcgagattaaaaacgatcccaccatgcggcactatcacagccatttgtctctgcttgaaacccgtctgggtcgcccacaaaatgccggtcagttagcagtgcggcagcatacctcattattaaccccgaagccgggttcgggatccgaactcagtataaatcgaataaaaaacaaccatcaagaactgagtacggaaaccgaactcagtcagaatccgatgcgaataaaacagagttcggattccgaactgccagtaaaatcaggggattatgacagagttcggaaaccgaaccattacgtacgtagtttcacacacagtgtgaataaaaaaacgtatgtggacaatccagttgtgttgcctgatgcgctgaaagccgtagtgtcgcaggaagaccaggcgatgttgattcgccagcttcaggctcttcctgaagaacaggcacaacaggtcctgtttgccctgcagaatctgatggccaggcagcgagtagacaatccgctcggctggatgctggcggtgatgaaaaaagcccgggaagggaatttcaggcccgttaagcaaccgcaatcggttcagccggagactcagacgcgaccatgccgacctgaacagcagcctttttccgcgcctccgcgacctgtggtagcttctgaagagcaggtcaggaattacgtcaccagtctgcgggaacaactgagacataatacccgatga

SEQ ID NO: 205165 - DNA, 249 bp, Klebsiella oxytoca
atgaggatgaaaatcgttggccccgacctgtgggcttctcccggtgtgccatcgcagtgctgtcgtaaagccttacggctggtcagtcagtatcatcgtggcgatcgtaattatacccggcttgaggaccggggctgtggatacgtcaagattaatattggtccgttctggcgtctgctcagtcgtaacgggggcagaacctggttactactgagtcacgggcggtacaactcagcgatccgcaaatag

SEQ ID NO: 205166 - DNA, 609 bp, Klebsiella oxytoca
gtgactaattccggtggtttatctcaggctgccaacgggctgctgatgcagctggtgatggatctgaaaagtggctatctccgtcgctgtgagtcgctggggatcaagcgagaagagatgcagatgttgcagggactctcccttgaggagctgcattatctcgcgaacagcgaagtttctgtggtcagcgtcagcatcgatcacagcaatctggtcagcatgctgcaacgggccagaatggagcaaaagcgcatgcaacgcatcgaccgggcgctggcgctgggcagttcgatagagctgatgcagacatttttcgggctttccagtacagatgtggcggcccgtcgcaggatcgccggtatcgaagcccgatccggacggggcaatacgctcggggatgaagacaatgcagaaatctggcggctgtggcagaaatcaggcgttgaagaagtggaaagcccggacgggcttgacgtcatgatgctggcagcagagcaactgaatatccctcttacctctgtctggcatgctgtgaaagggtggcacagaaccacaccccgcaggtctgtgggtcagtccccgaaaccctcagtgaggaagcgtgcatga

SEQ ID NO: 205167 - DNA, 426 bp, Klebsiella oxytoca
atgacgaagcatcaacgggtgttgctgtcgggtacctcccattgtctgtggtgcggtgtggtatttgggctgctggccgcagatatgtatcccggtgtcgttccggcattttccgggaccattttacgggggctggctgttgccagcttcatttctgtcctgctgtggatgatggtgagttacctggaggacatttcctggacgtatatctggggggcgatgttcctgcctccgctggccgcattactcctctgttatgtgggctggctgggttacagctttattttctggaaatgggactatgattttgctctcttcatccgggaggcggttctgccagttgttttccttgtgtggggagcatgtaacttcttaatagtcccctttatctttttgtttatcttgtctcccggaggtgttgagtga

SEQ ID NO: 205168 - DNA, 723 bp, Klebsiella oxytoca
atgaataattacaaacggcaggagcggctggtcagtctggtcaggaaactgctggaactgagccgaagcaacagcaatgcgcatgaagccggactggcgctttcaagagcgcagcgcctgatggaaaaatatggtatcagcgagctggacgccacgctttcgtcagttcgtgacgttgcctctcagagcgcgccatcagaggccgaaaaggtgcctgagtggatgacccgtctggcatgggcggttggtcatgcctttggctgtcggccttacttctcatggcgcaatacatcatcgggcgactgtcgacgaaccgtatcattttatggtttcagtgaacggcctaccgtggcggcttatgcttttgatgtgctgacccgccagttgaaagatgccactgcggtatacctgaaaacccagagtaaaaagctgaagctgtcgacccgccgaaaccgggcagagctttttcgtgccgggtgggttgacggcatgcgtcgcgtcatcacggttttccgggttacagaacgggaaacgcaactgatgacccgctggatggataaccagaatatgaaggcggcgaccatccgggaactgaaaagctgccgcggaggcgatattgcccgccaccggggttatgaggcgggtaagaacgccaggttgcatcatggtgttgaaggtgaaaatacggccgccattggtcaccgggaggaacgtacgtcatga

SEQ ID NO: 205169 - DNA, 1680 bp, Klebsiella oxytoca
atgagccgtaaccgcacgaatattggggcctccatgctccagccgggccgcaggacctcgggtagcgttgagagcacaatggtggttgaaatgccaatggttctgacgattgagcaactggcaccaaacccggataacccccgaacatcgcgtaatccacgctatgacgagataaaggcgtcaattaaggcccgcgggctggatacggtgccgaaagtcacccgcgatccggatggtgacccgattaaatatattttcagtgatggcggtaacacccgttatcagatactgacggaactgtggcatgaaacgggggaagagcggtttttccgcatccatgtgctcgtgaagccctggcccgggcggctccagtgtgtgattggtcatctcgcggagaatgaggttcgtggcgatctgtcctttattgaaaaggccaggggagtccataaagcgcgaattatctatgaagaacaacaggataaaccggtttcgatgcgggagttgtcaaagttactgactgagcagggattaccgattgatgcctcaagtatcagccgtatggaaagtgcactcacccacttatatccctggatgccggatcttcttgaatccgggcttggtgctccacaaatcaggctattgcttgccttgcgccaggatgcggagaaagtctgggatcaattttgccttctgtctgaacgaagcgataaatgctttaccgatgtatttggtgaatgttgccgcaagttcaattcccctgaattgtggtcgccggaaatgttccgcgatgaatttattggtgatctgctgttggcactgccgcatccggaactgaattatgaccgctgggtgatggaactggatcccggcgagcgtaaccggcgctatcactttggcgaaccggaagcggctacccgccctcagggagtggcgctatcaccatccactgatgacgttcaggaggctgcacccgagcctgattttaccctgccgaaagcactatctgaatcgccgcctgccacgtcaactgttacggaggaacaacctcttcggggtgcaaattcacgggtaacgccagagatcaataaggaagcgcatacgtcgttccctcgtacagaaatacagcccgatatgtacggcggttctccggtaatttcgggggacggcatgggccctgggctttctccggagcatgatgaaaccgacagcgatgagacgcttatctccatgctggcgccggggctggaggatgagggagaggccctgcatccggcctgtaacattgccggagatgcgatctggtctgttccggcttatcaggatgatatcgaacatctgcagaatatggccttcatcatggcgtgggaactgggggaaaagctggggtgtgaagatgaaatcctgccagaccgcgccagtagtctgtcgccaggctactgcgctgcaggtgaccactgcagcgcacccgccgccttccttttgtcccttgcggggtgttgtccggcacagtgtccgacaaccgggatggatgttgtgctgatcggcggttctgcacagcaggatgtgccagttcttgatgatgaaaatgccataaaactgctgaggctgatgcgtgtcatgcgccgcctgcgggagctgcagcgtggcgtaacggcggtagaggaggagcatgatgaataa

SEQ ID NO: 205170 - DNA, 1371 bp, Klebsiella oxytoca
atggacaaaacaaatattccccactcggcagaagcagagcaggccgttctgggcggattaatgctggataacgaccgctgggatgaagtggttttattgctggcgccggatgatttctttgtgggctggcaccgtgccatttaccgggcaatggctgagctggtcggtgaaagcctgccgctggatctgattacgctttctgaccggatggagaatgctggtttgctggagcgggttggcggctttgcttatctggctgagttgagtaagaacacgccatcggccgccaatatactggcatatgcaggggtagtggcggaaaaaagccggctacgcaaactgcagagcgtcggcaatatgctggttgctgacgtgcaggcgttgaatgcgcgctcttctgacgttctggaggtggctgagaaccagctgttctgcattgctgagcagggcatgctgcaggcaggaactgaaaccacagtaaacgatgccatggacaagctggtcagccgacttgaagccatgatggcgctggacggcctgaccggtacaccaaccggtttcagccaactggacgagatgacctgcggccttcagccgggcgatctggttttgctggccgcacgtccatcgatgggaaaaaccgctctggcgctggctacatgtgccgccgctgttcggggaaaaccggatgattacgtttttgtctacagcatggaaatgccggaagagcagctctccatgcgcctgatgtccatggaagggcgggttgaactcagcaggcttcgcagcgcatcactggatgatgaagaatgggcccgtctttcactggccatgaaagagataattgagtggaataatcgtctgattattgatgacacaagctatcagacaccggcaaccttacgcgcccgtacccgccgttatgtccgtaagtacggcaatcccgccctcattatggtcgactacctgcaactgatccgctcccccgaacaggaaaaccggacgcaggaaattgccgaaatatcgcgctccctgaaggcgatgggcaaggagttcgggtgtcccgtgctggcgctttctcagctcaatcgccaggtggagcagcgggcggataaacgtcccaataacggcgatctgcgtgattcgggggcgctcgaacaggatgctgacctcattatgtttatctaccgggatgaagtgtataacccgggcaccatgacgccgggtgtggcagaaatcattatcggtaagcagcggcagggaccaaccggaacggtgaaagtgcagtttgatggccgctatacgcttttttccgagtatcaggaagggggatatgacttcgggtaccacaggacaggaggtcgggtatga

SEQ ID NO: 205171 - DNA, 243 bp, Klebsiella oxytoca
atgagcaacatgactatcaatgccattctgacgcagcatctggagcgacagccttatgacgataatcccgttggaactgaaccagcaacctgtgttggatgcggttgtacagacaataacgcctgcgtgaacgaataccgtgaaatctgctactggcttaaggtgaatcgcgaaacagggatgggggtttgttcctgttgtcctgagttcctgagccacccttgcacaccagatttcgactga

SEQ ID NO: 205172 - DNA, 357 bp, Klebsiella oxytoca
atgagccgtaatcaaatttggcgtgtcgttgcttattccactgatacatacaaggggcatgaagaggtttatgtgtttgttgatgctcctgattacgaaacagcaaatgatcgtatttacgagcgtctggctgaggaatggggtcttccgaggggttttattgatatatacaacctgtggaataaatcagaacttcgcgatatgtccacaggagcacaaatgccagccgggctgccgttgctggagtctggaggcgggaatggagaggtgtattacgatcgggagcccttgattctggttgcgtctgcccgcctgcgtaaagttctggagtgtgcgctgcaggaggtgccggcatga

SEQ ID NO: 205173 - DNA, 873 bp, Klebsiella oxytoca
atgaaaattttacccgttatttccccaaaaggcggtgaaggtaaatcgactttcgctgcttacctcgctggttttcttgccgatgctggtgtgaagacacttcttattgatgccgactggacccagccgacggccagcagtatttttgctcttaataaagaagcgctgttcggactgtatgagcttctcatgcagacgatccccgacccaattcaggctatttctcagacctcaatagataatctggaccttatttactcaaacgatccagacgaacttctgccgacagctatgctgcacgcggcagatggtcgtatccgcttaaggaatattcttcagcatccagccttttgccgctacggggctattattatcgactccaaaggtgccaccggggtgatgacggagctttccatacttgcgtcaactggccgcgtcatgggggttgtgaaacccatacttcccgacgttcgtgagtttattcgcggttccctgcatatgttttcccgcctcaaaacctacgaaaattacggtatacacctgcccgaaatctctatcctcgtgaactgtttcgaaaatacgcttcttgaccgggaggcgatggacagtctctcaaaaattatcagcgagaagcagtatgacagcagtgtattgggagagcgaaatatgttcagtctgctcgatacctgtatcgagcaactggatatcttcaaactgggccatgttaagtcacagccagttcaccggcttgaatataaaacccggcgtaagggacttgcggcggcagataccatgcacagccttgcctgcgagttgtttcctgagtggaaagcgttctttgatgacgtcctttcccgggagattcgcgtatga

SEQ ID NO: 205174 - DNA, 3414 bp, Klebsiella oxytoca
atgacagaacaaacctcccgcctggccattgttattgatagctctggggcagagaagcaggccgatagtctcactgtagcactcgataaaatgacccagtctggggataaggcagtaaccagcattgtcaaagtatctaaagctacagatgaggaaaaagaggccctaaataaattacgagctgcaattgatccggttggcgctgcaatcaatacggtaggccgtcgctttagtgagttgaaaaaatacttcgaaaaagggctaattgacgaggaagaatttcgttcactttctaagatgctgaatgacaccaccgaggagttgagcggtgtcgcccaggctcagcgggacgcggaaaaggctggtaaattatcagcagcgcagcaggaggcgcaagctcagtcgcttcagagaatgctggataaaattgacccattatccgcagctcttcgtaacctggatcagcagcaatctgaactgaatgaggctcttgagtctgggaaaattaacccatcacaatacgatgcatacagcaaaaaattgatggagacgcgccgggaagttaccgggacggctcaggcagaacgtgatgccgcaaaagctcacgaagagcaggtagcagcgttacgacgccttgaggctcagattgatcctgtaggggaagctttccgacgtttgaatgagcagcagcgccaactggatagcgccaaatcatcagggatgctgtcgcccctggcttacgatcgccttaacagcaaacttgcagaatcccgcgatgccctggagaaaacccaggcgcaattgggtaaaacaggccaatctgcagctcagactgccaatgctatgcgcatgatccctgctcaaatgacagatattattgtcggcttatctacaggtcagtcgccattcatggtgctcatgcagcaaggcggtcagcttaaagacatgttcggcggtattggtcctgcggttaaaggggttagcgggtatgtgctgaggttgattaatcctgtcactctggctgccgcggctgtcggtgttcttggtctggcatattacaaaggctctcaggagcaggacgaattttacaagtcgctgacactgaccggtaatctggttggcaaaacatccgggcaactggctgatatggcggcccgtgtatcagtcgccgcgaactccacaactggcgcagcggcttcaacgcttaatcaattggtatcatccgggaaagtcgctggcgactctctggagcgcgtgacaaccgctatcattaagaccagcgaggcgacaggcattgctaccgataagctggttggtgattttaacgacattgctgctgatccggttgcagccattaccaaactaaacgatcagtatcacttccttacgctcgcaacgtacaaccagattaaagctcttcaggatgaggggaatcagcaggaggcggcacgagtagccagtgagtcgtattccgctacgctgattcagcgctctaatgatattaaagataacttgggtttacttgaatccgcatgggccgctcttggcagaggggcgaaaggcgcatgggacgcgatgctcgacgtagggcgtgagcaaacactcgaagataagctaaaaaccctgaatgaaagcatagccgaagcccaaaaaggacagtccgaaggtgggctttggaatggactaaatgcaagattcactaacctcccagcaatgatgaaactgagggatgacttgcaaactcaaattaccgttcagggtgtgctaaatgactctattagcacttataacaagcgacaacaagaagggatcgaagcccaggagcgtattaataagctaacagaccaaacccttacaaattcccagaaacggaaaaaggcactggatgaattaacaagggatttggcaaaggcaagggcggccggcaactcaattagtgcagaagaagaggcaaaacttcgcgcaaatataaacgagaagtacaaggatcccaaagcaccaaaaacgccaaaagaaaaagcctacacagaagatgccgccacccgcctgctcgaccagatcaatcaccagactgccgctatgcagtctcaactggacgcaagtgacaagctcaacagtgcgacacaggctcgcgttaagtttgaacagcagattgctgatctcaagtctaaaacgcagcttaccgccgaccagaagtcgattctttcccgttctgatgcaatcttgcaggcctacaagcaacaggaggcgttacagaactccgttaagactttggacgactaccggaaaatgcaggagcaggtcgcaccgaaggaactgcgacaaaatgagactttgcaaaaacgtctcgaaatcctgcaaaagatggtcgatctcaaaaagttgtcaccggaggatgctggaaagcaggccactgacctcattagcaaatcaatactccccgattccgtcatatcaggggttaacaaggttggtggaacgctcacttcaagtgcgactaacagcgacctggcagggcaaggcctgaacatgatagggctgcaaatcgatccgcagcttgaaatcattgagaagttaaaacttgcccagactgattatgcggcttggctgaatcagcagcagcaggcaataacgcagagcacagtcctgaatgagcagcagaagcagcaacagctcctggacttgcagcaacagggccagcagaaccaggaggcgttaagcagagcggtgtacgttgctcagatgcaatctgcccaaaattccttctccggtatcaccgatgcgatgggaacgatgttcggtgagcaatccgcgatgtataaagtcgcctttatgacccagaaaggattcgccatcgctcaggctgccttacagctccccatggcgatggggcaggcattagccggattaccattccccgctaaccttgctgccatggctaatgttgtggggattatggcatccatctcttcgagcatcaccagcgctgctgctgttggcttcgcctccggcggttataccggccccggtgataagtatcagcccgcgggtattgttcacaaaggtgaatacgtctttgaccaggcatcaacgaaccggataggggtgtctcagcttgaggcgcttcggaatggtaaaccgctcgatgccacgctcagcaaaccgggttttgggaccggggtgcagaacgtgaatagtgataacagcaggaaaaccactattcatgcaccgatagaacagcatttccattcacctgctggtgtaacccctgaccagatggctatctccatggcacaaacgcagaagcgggcgacaacagatgcgcttaatcaggttgcagcgcaagtgctgaagggggacgggaaggtgggtaacgcgatgcgaagtaaatatcctggcagggggatgagttga

SEQ ID NO: 205175 - DNA, 477 bp, Klebsiella oxytoca
atggaaaaattcgatagactgcttcaaaaagaaatgcttacgatccttattgatgcatatccggatcaacctgatgacatagattaccattcagaccttatagataaagcagacccaaaagttttatcagcaaacatttactaccttgcggaacatcgattaataagaattatggaaagtgcggcaactttagattctggtgattctcgctggcttttcgaaagtgctacggttacgtcaaaaggcattgattttatgctcaacgacggcggcctctcagcaattctcaacgttcagaccatcaaatttcatcgcgaagcagtagtcgtcctagaagacctgatcgcgatttcaaacatgaatgatgagcagaaagaaaaggctaaatcaacacttggtgaactatcaacagaagcccttaaaactgtggtgcaagctgcgactaccgcggggctatctaaactatttgggcaatga

SEQ ID NO: 205176 - DNA, 1425 bp, Klebsiella oxytoca
atgcctgatatttcaacacccaacctcgactataacgacatggttgaggcctgggatatcaacgatgcgctgatgggcggtacgcttgaaatgcggcggcagaataaaacctatcttcctcggtggcctaaagaggacaaggaggcctacgaacaacgtctggccgtagctacgcttctccctgcatatgaagaggcgattaagcaaaacatcggtcgcgtgtttgctgagccgacgaggcttagcgaagaaacccccgagaagattgtcgagttggctgaaaatatcgacatggaaggcgaccgacttgatgtatgggcgcagcaattcttctcgctcgcgttccagtacggtctggcgcatgcccttgtggactatacgcgaacagatccagaagcggttaagacgagggctgacgagcaagcagctggtggtcgcccatacgtgacaatgctcaatccccggcaggtcattggctggaagtctgatgttcggggaggcaaagtcattctgacggatttgcgcgtaaaagaggttatcgtcgttgatggcaatgactacgggcagacaaaggtagaacagattcgccacatcatgccgcgcaaggttgagatatatcgccgcaacaagggcgataacggcgaaagccagtggcaacttcatgaccagtggaataccagccgtgatgatattcctctggtgacgctctacacgaagcgaacaggatttatgcgcggctctccaccgctgctgaacctggcattgctgaacatcaagcactggcagagccagagcgaacaggacaatatcctgcatgtcgcgcgtgttcctttgttatcggcattcggtctcgccgagggtcaagagttgactatcggatcatcggtcgcaactctgttctctgatcgctctaagcaagggctcgaatacactgaacacactggatcggcaatcggctcaggtaaaacgtctctggatgacctggagaatcagatgcgccaggctggggcgaagttgcttcgggtagaaaatacctcgaccaaatcagtcgatcagacgcatgaagagcacatgcaggagaattcgccgctgtacacgatggcgagttcgctggaggacgcgctcgataacatcctgcagatcatggcggaatggcttggtgaatccgagggtggaaacgtcgatgtcagaactgagctggatgtttcggcacagacattcgattccgcggccgctacggctgttcagtcacttcggcagggtggtgatattcgccagtttgatgcggttcgcgttcttcaggcgctgaaattcatcgacccggacgcaaaacctgaagaggtgatcgacgaactgaggaaccagcaggtgacgcttgtcggcggcctgagtaaccagggtggtgcaaatggcaacggcgaatga

SEQ ID NO: 205177 - DNA, 321 bp, Klebsiella oxytoca
atgggcgtaaagatattcagaagtgaacttcaaccggatagtgagtctgcatatcgtcagtggcttaacgataatcctgatggatatgtcatcaacgctttaaaaaccgccagcggtaaggcaagcaagagtgatgaacgctttaccaggattcatcgggctaattgtaaaagaatcaacccgctacttggactgacggaaaagaaaggcttcacaaccggtagataccagaagctttgcgcagctacctttgaattggcagagagagaagcaagatcggttactgggctggcaagagtgaaaaaatgcctatgcatctga

SEQ ID NO: 205178 - DNA, 135 bp, Klebsiella oxytoca
atgaatatttatccaaataagtacagaaaaccttggctgcgctggcttgaagcggcaattcaagttgtctttttggtgagctttttcttcatggtttggtgtatcagcatgatcattgaatgggtggcggaatga

SEQ ID NO: 205179 - DNA, 951 bp, Klebsiella oxytoca
gtgccggtctacaacctcgttctctccgataccatcgaagggcgaattttcttgatgcttgatgaaaagctgacggaaatagccaagacagtcggtaaggttgacgatcaaggtaacgtagctgaagacctgcgtgcacagattcttggtcagctatctgagcgtctaaattatgaccgactctaccaagaagctttgtcagaccctgaattgaaacgaacacaagtggaacttgaggctgcgctctcaaattcacgggaagctcgacaggttgtttttgacctattccaagaccttgatggtttcagtcttgatgactacaaaccattttccgatgtttcatctagtctggatcggctggtacgcttcctttcggcagcggtggcagatcgtcagcaacgcttggtcaagatcgacaacgagacctatgacttagtgactattgatgggtcgagtcaacaacgattcacattgaaccgagatttagcgacaagcagcgataacttggagttgatgggcttggatcaccctctggttcaggaagagcttggccgctggcgcagtgttccgcctgaggaaattggcattgccgtttctggcgacttagatacccctgttctgctctctctgtggatggtcgaagcttcttctggcaatggtgaacgtcgagtcgtggttcagccgattgccgttaagcaagatggtacacgagttccggtggttgagcggcaggttgagcaatatctgcaggcaccggtaacattatcgaagtttgcgctcgaacaacggcaggaaatattcacgcatgttattgagccgactctgcagcgggaactgaaacataagggggccgccaatggggatggtagttactctgcagagctaattggctatgtcgagatcatgaaccagggggcacaggtcagtccagcctttgcttccgaaatttga

SEQ ID NO: 205180 - DNA, 240 bp, Klebsiella oxytoca; identical to SEQ ID NO: 111900

SEQ ID NO: 205181 - DNA, 498 bp, Klebsiella oxytoca
atgtacggcattgaaacgctgtgcgagctgatgctggccattctcgacgatcttgatttacgggactggcagatccggcacaaccttgaaacactggctgaacgcgcaggcctggcaacgcgcagtgatggcggtcataagtcgatttcccgggccagccgcggatgcgatcgcctctcctggcttaatgccatcatcacagaaaaagctcccttcaatccttatgacgcccgttgcgcctgtaagcacatagaggtgactgaggagttctttgccattctgggaattcccctgaaacaggcataccgtgaacgcgccaggctactggaggctgatccgaatgaagtcatctcgtcgggagatattcgcctgattgccatcagagtcgagaactggacccgcaaagccgccgccggtttatcgcgaatgaaagccaggcgcgacgtagctcgccagcgtaaacgggaatatttctcccaaccccccgtactggcctga

SEQ ID NO: 205182 - DNA, 252 bp, Klebsiella oxytoca
atgtctgaaaacacacaaagaaaaaaagcccgccgcgataacgatgtacaaatcacgacgcgcgagtttgcgctcatgctgggtgtacctgagcatgaactaggcgtcgcggcagccactaccaatattttccgagaaataacattaccggcaccggtaagtctgttaaaggggaagacaaggcaattctggctgtctgagtgtctggctttcgccgaacagttaaaaggaacatccgcagaaaaaaaataa

SEQ ID NO: 205183 - DNA, 534 bp, Klebsiella oxytoca
atgttaaaaaaaatagtggtggcggccgtaatggccaccacactctcttcgtccctgtcagcgatcgccgctccttccgtgcaggtcggtttcagcccggaagggaccgcccgggaactggtgctcagcaccatccatcatgcccgtgagtccgtccgtatgatgggatacaactttaccgctgcggatattgcgaaagccttggcgtccgccagccggcgtggtgtggacgttaaagtcatcctggataatagagaaaaccagaacaaatattcgaaagcggcactcaatatcctggtgaatgccggcgtgaacgtgcgtctgacggatgcctataaaatccaccatgacaaagtcattatcatcgaccagaacacggttgaaaccggctcattcaacttcagtaaagctgcggagtattcgaattcagaaaatgtgctggttctgaatgatatgccacaggtggccagcgtctatctggaacactggcagtcccgctgggacacgggacgtgactggaaatcgacgtattaa

SEQ ID NO: 205184 - DNA, 2193 bp, Klebsiella oxytoca
atgcaacagaagcagaaaccggtcgatgccgcccggctgcagcgtcaggtacatcagagcatggtcgaagagatggcgtatcgcaccggccccctgctgctcgccattatcgccatatttggtgcggcaatagtctggcctgtccttctgtgggcggccattccggtcatgctggtctgggtcccgatgttcatgctgaatgaattccgaatgccggcgaggatgccaatggacatggacaggctggatccgtcaacggaaaccatgcgacccggcaaactgctgggctttctgcccgtcactaagcttaaccggcatatggaaaaggcggcgggcgtgttctataccggatacgaacgcacgctcgatggcggccgtgagatatggctgcgcatggatgacctgacgcgccatctcattcttatggccaccaccggtgccggcaaaaccgagatgttgcttggttttgtgttaaatgcactgtgttgggcgaaagggctgatcttctctgacggtaaggcccagaatgacgtctggtttgctgtcgcctccctgtcccgccgctttggccgtgaagacgatctgcggttgctgaactacatcaccggcggccagagccgctctcagcgcctgctggagaatgacaaatcacgccagcagtccaataacacgaacccgtttgcgctggcccaggaaacctacatcacgcagctgatggattccatgatgccggaagccggcaacgaccgtacctggcaggagaaagccaaggggatgaaccaggtcctgacaaaggccctgatttacaaaagccgcaaggaacaaaaggtgatgtcgcagcggctgatccaggagtacctctccctggataagttcgcggagctctatctgcaggctgaagctgaggaatggcacgaagaaattcgaaccgggctgcgtaattatctctcaaccagcgtgccgggctttgatatgagcctgatcaccaagccatcagagtggtcgcaggaggcgcgtaaccagcatggttatctgacgagccagtacaaccgtatgctgtcactcttcagcgatacctatggccacgtgttttcatccggcgccggcgatattgacctgcgggatgtggtccacaatgaccgtattctcgtcatccttatcccggcactggagctatccgcgtcagaagcgctcacgttggggcggctgacaacctcccagctggcgatgatcctgagccaggacctgggcgaaaggatggaggggaaagcggaagacatactggttatcaaaaaattcagggaccgctttccctttttatggctggcagatgaggtcggttcgtactactccgataccatcggtcagctggccacccaggtccgctccctcggctatgcgctcgttctggcaggtcaggacctgcagaagctcaaaacggccgtgggggataagctctggacgctgctcggcaacatgttcacccgcatcttcgggaccatcatcgatccaactgaaaccgcagagttcgccgcgaaatcagccgggatggaataccaggccattcaggacagtatggaataccgcgccggcgcgattggggggagctatgccgataccgggcgcgttacggtccaggagaaaccgaaactgccctttgatgaactgcaggctttaaaccagggggagcaggccacggtcttcaaaggggccgtcatccggaacaacgccctgtacatcgcggatgacgacaaaatcaccgacaaggacgtccgcatcaaccggtttgttgaggtggaatggccaacgtatgacagcctgtctcacctgctgccggcaaaagtccgccgtgaccgccctcgtccggccagtatcaaccgcattatggccatcgtgaaaaacgacaacatcagacacgcccctgacagcatgatcattcaggatggcgtgctgtatgccattgccgatgaagccatgtatttcgacgaagtctcccccgtgccccccgatacagtccggcgcgcgacgcagctgctcagcctcgccgcctcggtactgaccgagacccggggccgttacagcgtcgaatacccggagccggaaaaactgtccgtcaaaaaggatgaattggaaaaataccagcacattcaccagtcggccgtcactcaacaggttgacggtttcgtttactga

SEQ ID NO: 205185 - DNA, 1122 bp, Klebsiella oxytoca
atgaacctgcttttatataaggccccaacgatgatgactccgacatttaatgcccgtatctccggtaatcacctgattgcttcactgaatgacgacacaccgattttttccctcaatgtgagtgaggacccgagtttctggatcgaagggggcacgctgatggtcagcctgaataccgacagtagccatccggtataccgggcgctggactacaaagaggcagaacaactgctgtctgtcattacacgggtactcagcgatcgtaagccgaaaataaagtggaagaacaccctcctgcccgcggcggcgctgctggttagctgttttgccgtctggcgttttgcgcctgcaacaccctcagcgggcatgccgccgttcggacaggaagagccccagaatgccacggcggaaacagccgcaccgcgcttccagggactaccggagctgcgcaaccctgcgccgggtaatccctattttggcaaccacacaacaccgaatgccgacaatggccagccgatgccgacagcttcccctgtccggccctcagcaacccggccggtttccgtggccagtcaggaaacgctgagcccacacattatgcagaacctgcagaaagcagcaggccgcggctatttcaccgtccccctgtcttccggacacgaacggacactgtacgtttttgccgatccggagtgccctaactgcaaaaactgggagccggtcgtcgaagcattaggtaatgaatacaacgtggtggtcttccccgtctctgcgattggtaaagagaaatctgtccggaaaatccagtctgtcctgtatctggagacggcgcaccgcgctgcggcctggaagaaactgttttcggttgacgagggcatgctcaccattggcaaaaagaaaaccggtgacgatcaaaaagaagccccggtacaacgcgattataaacgctggaaaatcgccggcgaggcgctggccattaacgatgtcgcgttcaggcaataccgtatccccggcacgccctgggtcattgccgacgacggccgccatgtaccgcagtcaacgatgaaagatccggccatcctgcgcgccttcatgacagagcacagcaacgcggagaactga

SEQ ID NO: 205186 - DNA, 1419 bp, Klebsiella oxytoca
atgtctcagaaccgtcaggccgcttccggccatgatgacgcctacggctttctgctgatccctgccgccctcgtgattatctgctggctgtggttcagtaaatttgtatgggtatcgtgcctgctgctctactggctatgggggatggtcgattttcagcgtatccatccctgggtcgcggaaaaaatcaaactgctggcccgtaccggcaatcacgctcagtctatctcctggcatgactggttcgccgtgatgaatgaaacgtccggcatcctgctgatttttcttctccccatcgccatcagtgcgctggtcggcatcaaaaaccatccgtcccggccgatgaagagcaagcgtatcgtcaatatccacacgctgccgcagatcatgagcaaatggtcgccggccattgtgccggtgctggcagaaagccggtcgccggacctgttaatgaacgatgacggcccggaacgccgctgggcggaaaaaccggaagagttcgccgccaggcatggtcttatcgcctcgcgcatactggaccgagaaaaagcccgtgacgtttttatctctcagctgggtacacggttgtctgcctctccggacacattgcaggattatgagaaagccctgtttgccgtgttcggcctgcaggtgttgatgaatgaccgtaaggctgccaaaaaactgctggatgatctgaaccgcagctgcctcccgcgcaaccgtaaagaacgtaagcgcacgaaaaatctgtaccgtcctgatttttcccgagcagaaaaagcctttctgacggtctggcaggcggaggggatgaaagaaatccatgccacacaccagtacgtcagaacggctctcagcggcctgctgggccacgatattcgcctgccgccgtcacagtatctctggctgaagcccatcgatcgcacgctctggtatgccctgcacggtgccgataccgccagcgtgtttgtggagggggcaggcgtcattgctcagacgcgttttgaaatcgtggtacgaaaagagaagctgccattgcagatcgattatgtcgaatccgccatcgacgggctgcagtacgagctggaagggctgggtctggtgcatgagcgacgcgtgaaaaaaaccgaacgccggaagaaagcacctgactggttacccccgacgctcagccaggacagctttactgacctccagggcgatgaaccggaacctgcagaagcagaacagcctgaagataatgctgctgcagcggaggcgcatcccgaccaggacgccgggagacacaccgggccgtccactccccccctcactgataccgcctcagctgccgtatcgaccgtaaccacacctcacgtatcacatgacgccgcagcctgtgaggcgacggacgacgatgaacctgcttttatataa

SEQ ID NO: 205187 - DNA, 624 bp, Klebsiella oxytoca
atggcaagccagcgggaacgtaccggcatggagaccttcgtgtcactgttaaaattctgggccgcgatgatctatctcccgatatgcctgttttttgccttcttccacacgatttcttcagaagatggtgatggggaaatagcgctaatattttgggctctttttgtcgcaccgttcatcattcggcagtttaccctgcaaaaacgccgccgcgccctgaacagcgtggtggcggccgtcagtggtgaggagtttatgccgcagaaagggaacgtcatcatctcgggcaaccggacctatctgggtgtggatgccatccggggaaccctgctctacgtcagtatgcgccgcaagggagaatacgatgtgatggggatggacatgtccagctggacgcgggtggcgtataagggcgatgtcatcaccctcaaaaccaaaaacccggaactccccagcgtcagcgtcgatgcaccgggcggtgagaaatattctgccgcgctgtatgacgtcatctgtgcgatggagcaccggcagtatgccgacctgcagttccctcagaaggcccatgagcgtgcccgtaccgcccgcaaagagaccggtctgacggtgttcagctacacctga

SEQ ID NO: 205188 - DNA, 2145 bp, Klebsiella oxytoca
atgaaactatttaagcagcccctgcagggtctgttgctgctgctcgtctcactgccggcgctggccgatgacgtgacgtacagcaccattcgtgacgctgctgaaaattcaagtgacctctcccgccaggcgctggttacaatctttggcgacgtggtgacgtcgccctttacttcaacagataccaccgttatcggttccctcttcggtatcctgaacggtgttatctgtgctattgccctgttctggtttctgacggttaccctcaaaagcattgtcaaagcgggtaatgccggcaaagtcttcggcagtacgcgcaccgcgatggcgcccctcatgtcctttgtcgggttcatcaccctggtaccgacaacgagcggctggtcgctttcgcagctggtcatgctctgggcggcctccatcatgggggtgggcggcgccaatctgctgacaaacaaagctgtggatatgatggatgacgggtattcactggtcacgcaacccgtcgccagctcgacgagggatgcagcccagcagatttttgagatgaacctgtgcaagtatgccatcaacgaacagctcagcggcttctacgacgatgccggctcagcgagcacgtcagagatgagcacctccggcagtgacggcagttatgaaaccagcaacggcagcgcctattgcgggaccgcgaaaatccccacgaccacgcgcagcagcagctggtcggtcttgtttgattccgatgtggataccgacgccattgttgatgcgcaaaagtccgcgctggaaaccatgcagacgaccctcgacagcgccgcgcagacgtttgtcagtacctatatcagcaaacgtgatgatgactccggtacgctgaccgatgccgaaaccaccatccagaatgcagcaaccgcctatgagaacaccattaactccgcactcaatcagattgactatgaagacaccctgcagagcagtctgaccagcaacatgaaaacctacggctggatcgccctgggtgcctggtatcagacgtttgcgaccgcgaacgccaagacctccgacgtaggtaaatcagcaccgaccgtcagcgggccgacaggactgggggaaatgggcaacaccgacctctaccagcaggtgttcgctgcctacaacgcccagctgcagaacagcagctacactgcagcactcggcacccagaccagcaagaaagacatcgaaacggggcgggcaaaagatccgaaatcggtgttcgtcgggctgtttaacagcccgatgcaaaaattgaccaactatattgcgacgaaaaatatcggacaaaccgataacagcagtgaacaggttaatccattgcttaagatgaaagccatcggggactacaccctggacacggtcggcacggccctgacggcctatgtgaccattcaggggtcgattgcatggagcggtaataatatcgtgggacgaatcacgaacggactgaccggctggaaagctacagtcgcggcggtggtgcaggcgctgtcccctccgttctacttcctgctgctgatcctgttctcggcgggcttcagtctgtctgtgttgctgccagcgatcccgttcatctactggatgaccggcgttctgaactggtccgtcagcgtgctggttggctgtgccgccggcccgatgtggtccgccacgcacctgggcaccgaagaggatcggggaagccgcgcggcctacggctatgtctttcttatcgacatgatgctgcgccccagcctgatggtgctggccttcttttttgcctctgtagctatcgtggcggccggtacgatcctgaacctgctgtttgcctcggcactggccaacgcacagattgactcctggaccggcctgtttaccgccgtcggctggctgcttatctatgccaggatttgcaccaccgtggccaccaaggtgttctcgatgctggtcgtcattccggattacgtcatcggcttcctgggcgggcgtgaaggggcctcactgttcagcggcctgagcgattcggtctcgaatatctttgccggcgtcgggcgtacggttaaccctggccgcatcccgggaatggatgctaaagagcgtactcccggggacaaggatggatttaaggggtga

SEQ ID NO: 205189 - DNA, 582 bp, Klebsiella oxytoca
atgacacacaatgcccatgatgaccagaccgaagcggccggacaggcgctgcgttcaacggcagtaaaaagggcccgcaaggccctttccttgtcggtctcgattttaacgcccattaacgacatgcgccgtatgggggcggacgtcagccagtccgtgaagaccagtatctcccggctgaaggccttccggcgtcaggcgcgcgaggaaaaacgcgagaagctgacatttgaacaggctgtccaggccagtggctacagtctgccgcagctgctgtggaagtatcgttttctcaagcgactgtggtgggtggtcgccggactgttcctggtcctgacgcccgtactgatgagtatgatattgctgacggcgtccaccctgcccccgatgacgttctggcgggcgattatttttgtggtgatcttcgccgcgctggccagtctggcggcacttaaagtggtgatatgtcagtaccgcctctggcagctgcagcaacgtcgcgtcagtgacgaagaaggcggacgcttcagcgatttcctccaccacgcacactggatcaaagacgccctgaaccctgtctga

SEQ ID NO: 205190 - DNA, 1197 bp, Klebsiella oxytoca
atgaaacgaaaacttttagccgccgcattgtccatcgcatgcggacaggctcttgctgcctacccggttagcgttgtttccagtgtgccgatcacaagccaggttgtgccccatctgacaacgatgcaaaccacgctggcagaaatcctgaccaccaacacggaaatcggcagcgccattacccaggcgagcgataaaaacacggcgaccctgacagaaggcttccaggcacaacgtcaggcggacaatttcggccgtgaaaccgaacgtctggaaaaggcacgcgccagctttagcgtgccggacagcatctgcagcgaatcggcgtccggcgtggcgcatcaggttcataatactgcccgggccaccgcgtcctctctggcgtcaggaagcgggatcagcaactcggccattcagaaagccgtggcttccgcgccggttctccccgcgcaggatgattaccgcagcgccgccattcacgcgaattactgcaccagtgccgaatacgcggtgtatggcggcaccgcgctgtgccagtcggtgtcctccgacatgcctggcggcgacatccaggtccagtcgctctatgacggtgccggtgccgcgggtaaagagtcggaactcaccttcagtgatgaccagatcgatgccgggatggcgtacatgcggaacagcgcgaaacacagtcccgggcgcacgctcggcaagggagaaatcaagaatgaaaccggctggcagtaccagggcctgctgacgcagtacaaggcgattcagagtgccgcccagcaaccgcagttatcgatgattgcggacagtaaacccaacagcagcacgaccaccgcgctgaaagaagtgctggaaaatgcatccgccaggtcgtatttcgatgacaccgcgtcagatctggccaaaagcaactaccagatgtcagcccgcgagtttgaaagtttcgaagtcggccgccggtatgccaataccgattaccaggaagacctgcaggcaatggatggcgataacctgatgcgcgaactgatccgggtacagtcactgtcaaattatctgcagctcggcattaagaaccagctcagggaaagcaacattatcgccggccagcaactcgccctggcggctgaccgggaatatcgcccgcagttgcaggcactgatgcaggaaatcagcggaggcgtcgccaaatga

SEQ ID NO: 205191 - DNA, 3048 bp, Klebsiella oxytoca
atgtcattaatgaatgcggttgaagatttcatcacctcggtcagccggcacacggtttctaatgcaatgccggactactgcgacctgcggaccatcgtcaatctgacggagtcagatcgcaacttctatccggatatgcaggtcccctttatcgccgttaccgccgccggccattatgcctctacttttgaggtacagggtggcttctgtgaaatggacgaggacgcccccgccagtcagaaattcagttttgacgggtttatcaataaagtggccacggcaatggccacggattttaaatcgacgggccacaaaatctcgatggtgatggagaatgaccccaaccagggcaatgcggaactgaagcgcctgctggcacaccagtaccgctccattgcccgcactggtgtgagcatggcggacattctggatgaaaagatcgccaaaatttccccgtgggtaagccgtgaacgcgtctggctgacctgctggacggggcgagaaaccctttcgcctcaggagctgaaaggcgacatgcgtcggatcagcggactcgtcagtaaagcgcccggcacgcagtttggccaggtccccgcgttctccgaactgacagggctgaaaattcgccatgacgcctttctcaacacgataaaaaccgccctttttgacgggggggatggtcagcttatcgacctgatggatgtccatcagctcggtcgggaaattcgccgccaggtggacagaaagggcaccgatgaaacttaccggccggtactggcgtccgatcgcgtcaggcctcacggaaaacgtaaccgggaagacgcttcaccgctcttcgccccctggctgaactaccagctcatgggcgtggatgccgacgccgaaaacaacttcattaacattaacggcatgtggcacgccacgctctccgtggcgatgggcccacagcagctattaaccttcgctcagctgaaagcccggatcccccgctccataccgtaccgtattcgcatggacgtcatgccgggaggactgaagagtctgtcatggaaaggcaccctgctcacatataccgcttatatcccgccactgcgccccatctgggaggcggtggaagaactgaagaagcgcgacagtcacgatccggtctgtgtgatgacgatagtggcttcaacctggggagaaacgaaggaagaggcaacgctgaacctcaccctgctgaccaaagcgtttcagggctggggcgtctgtgaggtgaccagtacgtttggtaatccctaccgtgcctgggcgtcaacgttactggcggcccggaccggtggtggtccacacaacctgtatccaccgctgaaagatgcgctcagcctgctgccgttaagccggcccgcgtcagcctggtccgatgatgcctcgattgttttcccgacccctgacggcaaaatcattccggtggggctggcgtcagctaagcagaataagcacaccgaggtgattgtcggtgaacccggttcgggtaagtcgctcatcatgaacatgctcagcaatgccattgtgtgcaacgcccagcaaaaactgccctttatcgcggttgtcgataagggctacagcgcccagggacaaatccagcttatccgggacagcctgcccccggaacgcaaggatgaagccatcggctgggcactgcgaaatcacagcgatcactgccgcaatatgttggacatccagctgggtgcccgttaccccatcgccccggaactaacctggatgaaaagcatgctgaccgcgatgtgtattgactccaacaccggtctgccgcctaactcccgcgatatcgacgtcctgctggagcgggtgattacgatggcctatcgcgataaggatgaaaccagccccaataagttttcagacggcgcatcgccggagatcacccgggcgttaaaagcgtccggcctctggacccggtatgacgaggaatggtgggacgactgtccctggtatgacgtccgcgacatgctgttcagcgccggctacgtgaaagaggcccaactggcacagttcctcgccgtgccggaactctccgacatgagcgagtacatcaacagcccggagatcaaagcgagcttcggcaacgtctttcgtgataactcccgggagctgctgacagagtatgtcgcccgcgtgatcggccaggcttgtaacacttataaaatgctggccggccggacccggttcattattaacccggccacccgcattattgccatcgacctgaataatgtcgtcggggataaaagtgctgaagggcagttgcgtactggcatcatgtacctcttcgccggccaggtgagcggcggagacttcatcctgccgcagtaccgtaaagagctgatggccgcggtaccggagatgtaccggccgatgcacatggaaaaactggatcagcttgaccaggaagtgaagtcgaaatactacgacgaactccacaacgcttcggacgtgccgttcatcttcccgatgctggaaacgcaggaccgtgaacagcgtaaatttggtatccgtaccgtgttgtgctcacagtacctgaccgacttccctgacacgatcctgaaatcggccaactcggtgtatctcatgcactgccgccccgaagatgaacgggcgcttgtcgaccacttccaggtaccggaagtcaccatccggaagttcatgcaaataccgaaaggcccggccgctgatggcagcgggacgagctttcttgccgtattccgcacgaaagccggtcgcatcgcccacattctgaaaaacaccgcgggcccgaaagaactctgggcgctgagttcatcgccgggcgacaccgcccttcgggattatctgtatgaggaactggatggcgccaccgcgcgcgacattctggcggaaaactttgagcacggttcggctcagcgtgtcattgaattccgtcgcaagaaggccggcgaacaggacgccgggaacgtcacccgccatctcgcccgggaaattatcgaaaaacgcggttaccgcctctga

SEQ ID NO: 205192 - DNA, 564 bp, Klebsiella oxytoca
gtgacacaaaaaggtgttgatgatgtcgcctggctggatgtcagcggtgatgacacgccgccctcaccggttcaggtaaatgctgaatgttgctcacggtgccggtggcccgcccggcggcttttccggctccgtgaagcagagaacgacgcggtctgtgcagtctgctggataagccacaacctggacacggcgtcagcacaccagggcgacctgtgctggttaccggggcttcatgccgcagacgtcgtgaacctgcaacggatcgcctgtatcgcggccatcgccggcaacagtcacgcgaaaaaacaggggcaacgggtgctgctatggatgcgccgccacaaacgggaaaccgaacgcgcctgggatacgtcccgcccggctgaatttgcggcggtgatgtcacgcttacacccggatgaccggcgggcattccgtcagcgactggcaggctgtcatctggtcctgccggccaccgtgttcagcgatctcacattgctgctgcctgccggcatggacgcggacgccctgctgaacactctcacactccccaggctgtag

SEQ ID NO: 205193 - DNA, 402 bp, Klebsiella oxytoca
atgtctgcaatcttcgatcgtgtcttaaaagcttccatcactgcacatgagctgcgccattccatgaaacgtaaattcactgccggtatggcaagcctggtggcgttaaccccgctcagcgccctcgctgacggtaccctgaccgacatggttgatgagggggcgagcgggatgagcgatgtggaaaaagacgcgctggttttcgccgaaggtgtcggcgtactgatcgtgtttgcgaccatcatcgccatgaagaacaaggagaaaagtccgcacatcaccaccaaaggcatcattatcggctgggttgtcgggatcttcctcatcgggctgggtgaaatcgttcgccgttcgcagagccaggtgggtctgaccgaagtcaccgtcggttccggtagctaa

SEQ ID NO: 205194 - DNA, 534 bp, Klebsiella oxytoca
atggttgatgccctgacggcactggtcaacctggccagtgcgatccacaccagtggtaaccggttcatcttcgccctggccgttgtgcttggcatttatggggtgatgttcgcactgaccaaagaggcccgactggcccgccaggtgccgggccacaacggtacgggaaaaatcatcggcgtcgtcattctcggcggcatgctgatagggctgtcccagataatcaatgccggggccgcccagctcggctggtctgatgtcacctttgatgaggtctcgtatgtttccaccgacacctttggtcagggtgccgatgcggccaatgccctgctgacgcttctccagacgctgggtatagcctatgcactgtccggcacacagcgcatcaaacgttcactgaaagacggccacaccggtctgtcagccggtgaagatgtgggaaccggcgccgtgaaattcattaccggggtgtttcttatctgcgccccgacactgctcgatgctatccagaccagccttggtctgtctctctag

SEQ ID NO: 205195 - DNA, 720 bp, Klebsiella oxytoca
atgaatgaatttaatcatcccgccacagacaaggatgatcagccagatatatcggctatcgtgcagcatgagaaaccgagtctgaaatatcttattctggagaaacagtatgttatgggactgaatggtccctggcttatcggcattctcatcgccgccaccctggccatctggtatctctttggcacagctaccccgtcttcacaggatgagctgaatgcggcggccggctttgaaaacgttcctccggcagcctcacaaccagacaaccggtcaatgtcctcaacactgtccccgccggccggcgataacgtgaaagaggaagtggccacgatggtgaacggtgtcaaaacctacgcggaagccaaccgtacagccatccagcggctgtccgacaccgtgaaaaccctgcagcagcaggcggccaccgcgcagcagctgcagagccagtatcgggaggagatcaacatcctgaagtcacgggtggcgacactggaggtggagaaggtcaataccgcaacgtccgccccccatcgcccgcgcctgctgacgtcgggcatgaaggtcagttcagtccaggacggtgcggcgtggatcttctggaaaaacaaaacctgggccgtccgtgagggcgataccctggctgacggtaaagtcaacatcatccggatcgattcggcaaaccgccaggtattcacgactgaaggcgtgatccgttaa

SEQ ID NO: 205196 - DNA, 1329 bp, Klebsiella oxytoca
atggccaacgaaaatgacgcaagtcgcgataagacattactggtcgggctggctgccctcgtctgtgccggcgttgccggagggggctacctgctctggaaccacttctttgccccggcgccgacaccttcccgtatcaatgtgaccaacgttgccagtgcggggaaacaccagagtgcagaaactgagcagtaccgtcagctcctgcacgaatacaaccgggagggcgccagtgccgcacgggcggataattccagttttatagccagtatcccggtaggcgggagcaccccggtgcataccgtggaagcccccccgaaagagaaaaagcggaagcccgctcacgaggaaaaacagcaggagaagaaaaaggacgagggcctcagtaagtcagaccaggccgccctgaataaactcctcgcatcaatggacacgtcggcacagtcgccggatctgcagcaggtctctctggccgtggcaaccgagccgggcgctgccgccgaaggcagtcaggccaaatcggcttacgctgactggacatcgtccatcatgccccggacaaccggcgggggtttatctggcgggggggaaagcacggccccggtcatcgagctgatcccggcttatacacgtgtgcccggctcagtggattttggtattgattccgacaacaaccattcgccggcggtcgtcaggctctataccggcccctataagggggcggtgttgaaagcctctcaggcacaactcggcggggacggcatggtgatccacatgacaaccatgtactggaaccgcaaaaactaccgtgttgacgcctatgcgctgaaagacgacacgctcatggccaatgtggccactgacgtgaatcaccactatatgtcccgcatcctgttgccgtcgattgctgccggcatcggtaaagccggtgacctctatgcggatgccaataccgagatcctgaccaacggctacagcacggtgaccagccatgccgggataccggatggcgaggcggtggccggcgtggtagccggtggcgccgcatccaatgctgctgacgtactgaagtcggacgctgccaaaatttcaccgactcaggtcacggtggatgccggccaggccgtttatgtcgagtttatggctgctgtcaccacggccgatgaaatcaagcctcgcggtcagaacaccaccggcaacacggccaccccgcaggacagccataccgacaacgcactttcgccggtcagccctacgctcgcacagctacgggaacaaacgcagtcacgcatccggacccagtcacagcctgaaaacacgtcggagtaa

SEQ ID NO: 205197 - DNA, 1104 bp, Klebsiella oxytoca
atgaaacagtattttgcactctctttactcgccgtgatgtgctgcaacgtcggggcggtggagactcaacagaccgtggtacctaactctgccgatccgatactggtcactgacggcccccaacaggatgccgcgctgatgaataaagccggattaccgccgcagcccgctgaacagccaccggcgccgccggtgcaagcgccagaaaccactcaggccgcaccgccatctgcatcaacagtcgccgcgccacaggccagttcgcagacggacccggcaccggcggcgacgccaggcagtgacgaactcccgccgccttcgccgctgtacagtgccgcgcagaagcaggttgcgcccctgacaccggatgaagtccgacaactgcgggggcagaaagagaatatcaaccgggcgctggcttccccggcgatgacggtggtaccccgcatcagtgcgcagacggtgaatctgtcaccgggttccagtctgcctctggtccgcacagcggtaaaccatcccagcaacctgagttttaccgatgctacgggcgccccctggcctgtgacaggcaagccgacgaacccgatgacgaaggactttgatgtgtattacatcccggactcacccatcgtcaccattgtggccaaacggccctatgcgagcggcagcattaccgtcctgctgaaaggcctgtccgtaccgatttcggtggaagtcaccagcggtgacaccgacagccagtcccgggtgtggaccgtcgataaccgtctggatctgcgcattccgcagcggggaccgtccgcccgcccgatggccgcgccggaatcgaaaatcggcctttacgacaacacgcttcaggccttcctggatggtacgcccccgagggaggcacaccgcctgaaagcgaccgggcaggtgcctgataccaccgtctggcagctgggcgacgacctctttatccggacgcgcgctgagatagtcgatgagtttgatcagacgctgtcctccgctgacgggatgcacctctttaagctcccggtcacgccctatgtgacgttctccgtgatggggcgttctcaggcactgaacattactctggagtga

SEQ ID NO: 205198 - DNA, 705 bp, Klebsiella oxytoca
atgaatacacccgcgacagggggcacagactcgtctgtgcctcagacaacgcgttcgctttcagcgcaggaacaacaggtctacgacgaagccattcgcctgcagaatgagcaggcgctgggggcgaccttcgcccgtaagctgctgacatcaaacctcattctgggcaccgcgttcctgctcaccacttccctcagcggtgtgacgctgtggaaagtgtatcacccggataatcactacttcgccacggaaagcggccgtgtcacaccgatttatccgctgaacaaaccggcctggtcgatggaagacattgctggcttcggcgccgacaccatccagcgggctttcacgatggacttcgttcactaccgtcagcagatgacatcggtgatgacgcgctttaccaatcagggatacgccgattattacaaggcgctgacgagctcgaacgtgctgaagatggtgcgcgatcaacgcatgaacctgtccaccaccgtctcgccgggggtcgtacacagccagggcattattaacgggatctataccgtcagggttcagtatcccgtctccctgaagctcgatggccaggagcgcagcctgcctgcagcgaattacatcatcgagctgactatccagcaaaccgatccacgggaaaagcccctcggcctggaggtcaggcagaccatcatgacttccagtcattaa

SEQ ID NO: 205199 - DNA, 354 bp, Klebsiella oxytoca
atgccagtacaaaaaacactgggcgccctggttgtatgcgccctcttcctgacacccctctcgctgcaggccgctacctgccgggctgccaccgcggccgagaaaggcagtgacacgggataccagacagcaaaaaaagcggccgaagcctggtatgaacgggaatcagatgtctctgactccctgcagagttgcctggataaaatcaggaccctgtccattaccatgccaaatttcagcagcctgtcttccattctgaacggctatgcggatgaaatttgcagcaccgtggtcagtaaagtgaacagttacatcccgtccagtattgacccctgggatgagttaaccgactaa

SEQ ID NO: 205200 - DNA, 3216 bp, Klebsiella oxytoca
atggctcagcatgctcaggtcgcagaccgacgtttgtggctcgcagtaccccatgaagaaaaagatgaagccgtcgccgcaggcggcctcgccagtgacggcaaacccaatatcagctggtcaccggacgataagctctggtatgcacgggaaggcaccgccttagcaggcatccggttatggctccctgatacttccgcgcgggcaacgggtgacgccgacccccgggtggagtttgctgacaggttaaaggaagccggtttcatcctggaaggcctccccgtcatggacgggaaatggcaccgggccaaagtcgaagaggataaaaaaggtaaatcacaccgggaagggggcggtgcctataaagggttcactgacggccatcccgccggcatttttgtgaattatcaccgttcgtcggaaaaagaagtttcccggtggcgggctcaggggggagaaacggacccgctgacacggctgcacattcgcgctgcaacccgccaggcgcaggacgatagcgaacgtgtccggcagcaggcctatgcggaaaaagcccgtgcggccagccagctttatgaccagctggccccggcgacagactcacatccttatctgatgcgtaaaggcgtttccgccgatccggcattacgtgtcacccgcaacaaccgactggtagtaccgttttataaccaggacggtgaatttcagtccctgcagtacatcgccgaagacggggaaaagaaactctattctgaagcgcccaaagccggcaatttttttatcaccggcggcatgccggtgaatggccagcccattttgtatgccgaagggtatgcgacggccagaagcctcactgcagcgacaggcttcccggtcgtgatggccatcgatgccggcaatatgagaacgatagcggaaggattcggacagcggttccccgacagcccgcacttcttcatggccgatatggacctgaagaaaaacgataacaaagacgatctttaccttgccattcagtcctcccgttttgtccccagcgatccgggtttctatatggatgaagaaaaactgaaggaaatgaagggactgtttatggcgttacaggccgccgatcgtgtgcctgacggacatgttgtgataccgccatttactgagcaggaaatgaaagcagggttgtctgatttcaacgatctccattcagctcgcgggctggattcactgaaaaccgtactggcggagacacccggccttgctgcacatctgtatcacccggagacgcaaacaatgacagttccagttgaaaagcaggcacctgcgcagcccttccctgagccggtccccgcgtatgacaacgtatcacaggaagggcctgacaataccagcgcagatatggagagttatgaagccatgatggctgcggaagcagcagctgcaccggaagcagcagcggcaccggaagcagcagcggcgcccaccttcgccagccttctgaaagtgacctcagcgcctgcggaaccagaggtatctgcagatccggcggcagatgacaatccggcaccggtaaaagcaaaaaccacggcagaaaacgcgacgaccgctgcgaatgagccggatgaaactgaaaatgccatcgtatgggggccccgcgcgccgggcgaaggtaacttcaccccggagacagcgcccgcatcaaccttaattgataccaatgccctgcttcagcgcatcacgcatgaaatgcagagcaacaccgtgctgtacaagctcgatggtcagccggcatttcgcgatcatggcaaccggatgacaatggaaaccccggatgccagtaagcaggatgacatggtgatggccgcgctgctcacggcaatgcagcattatggtcgcaggatccagatcaccggcagcgaaacctttcagacgaaagttatcgggctgattgcatcacacgggctggatgtgcagatgcgcgatccggtacagcaggccatgttaaacgaggcgatcaaacagcaggccgctgacaggccggatgtccgcgacagtatcaatgccacgcccgtgatgcctgcggatgcgcccgttcagaccagtcccggcaaaaacgcgcccggtccagcaccggcaggcgaacaaccctccccggtcccgcccggtggtacggccgtaccgccggttaaggcctctgaaccggcggggcaaccacctttagcgacgaaagccgaggactttaaagacggcgtgaaggggcgcctgctggagcatggccgggcgcattaccagttcaatgaacggaacagcatgaactattacgttcatctcgaaacccgcgagggagtccgggaggtctggggaaaagagctggaacaggccatcaatcagagccgcgtcagtgaaggtcaggtcgtcagtctgaagtttgaagggaataaacctgtcaccgtcaatcagcccgtcatgaaggacggaaaaatccagggatacgaacagatcacggcgcacagaaattcatggagcatgacgccgctggttaatccccgcgttcgcccgccggcgacacccactaccggggaaacactctccgcgtatgacctccatgagtacagcaaaatacaggcccgtctgttgcgcaccgtgcaggcagagaacgtgccaccgatcgttgggcagaaaaataacctgctgtggatacggcccgacgggcggggaacgggcgatgccggcgacccggccacggtaaaacttccagctaaagatagccagtccacgaccccggtcgtcagcgcctggcgggatgacggacagctggcactgcacctggtcaaagggcatggcccttacctgcagggcattgcgcagattaacggacagtaccagcacgtcctggcttccatgacgggaaatcagagcaatgccagtctgattatcaacgcgataacccctgatggcctcaaaaccgtgggatacggacaggccttaaacaaggtggaaggtaagcccgttgcgcgggatgccatggcctttcgtttcgcgggggaggccggcacggacaaaaagctgattggtaagctggaaaatccggaaaccttaccccggactatccacgccagactcggatttgatgaacctttccgtcccgacaccgactacccaaagtcgcagccccgggcagaacatcatcacaaggccgcaccgggagccggacgcccggggtaa

SEQ ID NO: 205201 - DNA, 267 bp, Klebsiella oxytoca
atgagaagcgtggaaaaccgctggcgtgaatccagccggccgctgaccgtttacggtgtcccggtcaggatgttcctgatctatctcgtctggtgcaagttcccgaccttcatgacgttgtggatctgcacgggcgtactgacgttcttcggcgttatcgcgcatttcggctggtcgtggccggtgttgctgcaacgtcttctacacatggtgcggggaagccggaaggccggtcgtccctggtggtatcgccgcttctatgaataa

SEQ ID NO: 205202 - DNA, 1188 bp, Klebsiella oxytoca
atgaatcccaccaaaccttctgatccctccacctccgatcttgaaatgtttgatttcggtggtgcggttaatgtgcaaagttacaaagcctttctggtatgggcagccaaaaatgccgtcagcgacattcacgttcagggcagcaaccccatcgtcatcgaacgctatggccggatggtaccggtgacgcccttctcgttaccggacaatatcctctcggacattattgacggattatttgacccggaacttcgcgctaaggtccggggaggaaccccccaggaccgggccatacagctcgatggggatcagaataaacgctatggcctcgatcgcggtgaacgcctgcgctttcgctgcaatgttgtgcaggcaaccgcagccaacatgctgaccacctgtgccatgacacagcgcgtcatcccgacagccattcctgagctggaagcgatggggatcgagccggacctgtttgaagcactgctgccccataaaggccttggtctggtctgcggtgaaaccgggtcagggaaaagcaccctgctggccgccatttaccgttactgtgcgaacctcttccctgaccgcaaaatcaccaccgctgaggatccggtggagtacattatcggccgtaaaggcgatgtgctgccggcgacacagctggagctcggccgggatgttgccaccttcgctgaagccatcagggcggcgcttcgccgggcaccgtccattatcggcgtcggggaaatgcgcgacaccgagaccattctggccgccgtgctgagcgcactgttaggtcacctgtgcctgagcaccctccacacggattccgttggcgaaacgatcccccgtctgttagccggtatcccgattgaaatccgggaggcgacggcacgcgatgtgatgggcacgatgcagtacatcatcgtccagcgtctgctcagaaccacagacggcaaacgtcaggcggtacgcgaatacctggtattcgaccagcctctgcgaaacgaaatggctcaggtgccttataccgaatggggccacctgctgaaccggaaagtgcgggagaagaaaggccgcatcgctgataaagccttcacgctgctccgggagggcatcattggccgcgatgaaatgctctccgttgtatcgcctgcagaacttcgggaaatggaggcctgcgtatga

SEQ ID NO: 205203 - DNA, 819 bp, Klebsiella oxytoca
atgaaacataccgctatcgcgctgctctgtctgtgtgtcgccggatatgcgatggcagacgacagcgagccgtcaatcccacagggtatggaacactacctggacatcagcaatgacagtgagagtgacatcactgacgcccgggccgccgtcatccgatcagcaggtcacaccatcggattccggggcgggaaagcgcaacgtgcatttgagctggttaacgcgctgaaggcccgggaaagcgcgctgaatgccctgtatgacttcagaacgctcgtcagtcaggaaggctggttaccgcctgtcatcgacgaagcgcaggatgtggcgcatatcaccgacgatcagatccgcaccgcaagccgcgtgtaccaaatcattctgccggaacgctttgtcagtaacccgccgtcctggcgccgctggttactggccgggttgagcacgacatccccctctgcccaggaaggtggcgtcatccccaaaaacagtgatgaacagaaaatctggcaggaagcggtggagaaaggctggcaggacggacgtgacggtgccgatcacacgctggaggccaactttaaccgcctgacccgggattaccggggcatgttgctctactcacgcctgttgcgggaaggctatatctctcgcccggaaattaccgagcaacaacagagcgtcagcggcggccataaaaaactggtcacaggcgatcgcgtccgcaatctgcgcaggcatgccgagttcaatccaaataaaggtcactggaaaccggtcatcaacacggagtcacaccatgaatcccaccaaaccttctga

SEQ ID NO: 205204 - DNA, 468 bp, Klebsiella oxytoca
atgatagaaaagcttctggccacggtagtggcttcgttcatgctggccggctgccagcaaccgaaatccgtcattacggcgccgtacgttccgccggaaaaaacgtcacagaacgtctcggtagtgcgagctcagcaataccagctctgggacgagaaggtcatcaatatccgcacaccgctaccggcagacacgatatacgctaacagcacgcgcctctcactcgactgggacggcgatgcgatcgaactgctggcccagttggccagacagcgcggtcttcagtttaactacagcggcgtccacctgccgttaccgctgaacattcatgtccgcgatatgacgttccagaatctgctgcgccttgtcgaatcgcaaatcagctggcgtgccacgctgcaccagtatccgggcctgctgcaggtcgagtttatgccggtgaaagcaacgccggggggccgccgatga

SEQ ID NO: 205205 - DNA, 480 bp, Klebsiella oxytoca
atgaaactgccggcaatttttctttgctccctgctttttctgccccaggcgcaggcctactgttttaactatgccgcatcgaagtacaaccagaacccgctcgtcgttgaatccatcgcaatctgggaaagcagcctccgccctgacgctgtcggccgtaactacgataaagccggcaggctgctcagctctgattattgcctcatgcaaatcaatacggcgaacgtccgggcgctggtatcgatgggtgtcatttcttctgctgacgatctgttaaaagacccgtgcttatgtgttcaggccggcgcctgggtgcttgcaaaacacctgaaaaaatgtggtaacacctggcgttgtctcggctcctataacgccggtttctcagatgacccgaaacaggaactaaaacgtcagaactacgccgcagaaatccgctccatctacgaacgcctgtacgccaggcagcaccgtgccagttaa

SEQ ID NO: 205206 - DNA, 606 bp, Klebsiella oxytoca
atgaaacatctacttccagggctgcttatccccgcagttctggctggctgtgtctcacactcagccagcactgacgcccctgccagcatatacatcgatggtctaatcgcagacagcgctcagactatcagccaggcccagaccggccttcaccagacaggaccgaatccggcccgaccggtatcccctactgcactgattaaaccgttaccaccttcaacgcctgtcagaccaggagtgatcgaaccttaccgaagcccgtcccttccggtatcgcaaaacgttcaactgccggtactgagccatgtttcctacaacgggcgcccgggacctttatcattcccgcaacgcgctggttacgcccggaacattaccgttcaggatgccgcacaacgcatcattcctgtcggctggtcagtcaactggtccccgggtctggaaaaagtgcgccggcaacgggtgaacctgtctcttaacgatcagtggccgcgcgtactcaataatctggtctcggcgaagtcgctctacgcgacggttgaatggggacagtcacgaatcacgataacctcatacagcccccgacctcgtctcttcagccatcagtaa

SEQ ID NO: 205207 - DNA, 462 bp, Klebsiella oxytoca
atgttaaaatcatatattgtccctatcaacatgaaaaataataattattataaagaaataaagaaaaccttggatacaataatcatgtctttgcttggagttgtagtatactctgctatatctttagatgtgaatttaaactaccctcctgattggatagttagtttactctatgttttctttatactgtttatagttagagtaacgtttgcgtcatcaccaaccattatatttatcaagccttcaaactgtaaatttaaaaaatgcttagctaaaatatttagctatattacaacgttactgataggtgtgacttgctcagcattatatactgccatcaactctacgccagaaaagatcataaaaacatctataatcttccttctgtgttattgcctgactacaatttctttatgtttttttggttacttttctataaatcaaattataaaaaagaaataa

SEQ ID NO: 205208 - DNA, 828 bp, Klebsiella oxytoca
atgatggcttttaagaaaggggttacagtttattttactgatgaaggtaagtatgaggagtttctgaaaaaccacgagatatccggaaaaacaaaatctaaatttgtactggaccatcttaaccataagaatgaaaaccataaggctgtaaatgctaccagtcggctaatgggtggtttttattctttctacccactggcttattattatgatgttttttttagcttgccacagaatatacctttggggttgtttggagagtcaaagttaaaaaaacaactgctgaaatctgttgatgaaaatataagaagggatttttcagagcgtttatctacgagtggcgctaattgtccgggagcgtgttatcatttaataaaaacaaaaatcacactgatgtatacacgaaataaaattgatggtgttgaatgtgtctccgggacatgtttatgccgatacggggttgtaactatcaatgaatctttatggaaaaagtacgatggcctttatgacttcacgaaaataacttatcagaaatatattgatgtattcaggtcgccaaggaaaaataaacaacttgccctggtcctggagccggtttcaccggatgatatggtcggcggttttttcatttcagtctatccggaaggtaaaagttaccccagggatttttcgaaatgtggatttcaggagtatcctgagttgctatatgccaaagtgaaaatatctggagtaagtgagcatcaaaacataaacaggatatcttatcaggagcattctcgcattgacggtggcggcgttcgcattacagagaaaacaaaaataaaataa

SEQ ID NO: 205209 - DNA, 429 bp, Klebsiella oxytoca
atgctacccggacaacccaccgattatgggcgcttctgtaacgtatcaggcatcgccagccacggtgaaacctaccgtgtcagtgacagccaggatttctggttaaccccgaacggccgctatctcagccaggctgagtacagcagtccggcagatacgcttcagaaactgacgggtgtggtcagtggtgaagatcctgaccaggcgcggaagaaggctgtcagggtgcgggtgttccgagtcgaaagtgagagcgcgagtaaaggtgcgtgcctgcccgtacgttatgacgacaacaacgcacggcggaaaatggattcgctgactaacggccggcgtatgaaggtgtacagtgaagatgctggtcagtctggccagctgatttacgataatagtcgcggtgccggcttcagttacaggttactatga

SEQ ID NO: 205210 - DNA, 900 bp, Klebsiella oxytoca
atgcatggcaccaaagccgctaacctggcggtacaggaatgtgacctgctgatcgccgtcggcgcacgctttgacgaccgtgtgaccggtaagctgaataccttcgcgccgcatgcgaaagttatccatatggatatcgacccggcggaaatgaataagctgcgccagacgcacgttgcgttgcagggtgacctgaatgcgctgctgcccgtgttgcagcagccgctggccatcgacgcctggcgtcagcacaacgccgggatgcgcgccgagcacgcctggcgctatgatcatcctggtgacgctatctatgcgcctctgctgctcaagcagctctccgatcgtaaaccggcggaatgcgttgtcacgaccgacgtgggccagcaccagatgtggtccgctcagcacatgacctacacccgtcctgagaacttcatcacctcgagcggcttaggcaccatgggcttcggcctgccagccgcggtgggcgcccaggtcgcgcgcccgaacgatacggttatctgtatctccggtgacggctctttcatgatgaatgtgcaagagctgggaaccgtgaagcgtaagcagttaccgctgaagatcgtgttactcgacaaccagcggttagggatggttcgacaatggcagcagctgttcttccaggaacgttatagcgaaaccacccttaccgataaccccgatttcctcatgctggccagcgcctttggcatccctggtcagcacatcacccgtaaagaccaggttgaagcggcactcgacaccatgctggcaagcgaaggcccgtacctgcttcatgtctcaattgacgaacttgagaatgtctggcccctggtgccgcctggtgccagtaactcacaaatgctggagaaattatcatga

SEQ ID NO: 205211 - DNA, 267 bp, Klebsiella oxytoca
atgatgcaacatcaggtcaacgtgcaggcccgcttcaacccggaaaccttagaacgcgtcttacgcgtggtgcgtcatcgcggctttcagatttgctcgatgaatatggaaaccgccagcgacgcgcagaatataaatatcgaattgaccgttgccagcccacggtcggtcgacttactgtttagccaattaaataaactggtggacgtggcctcggttgccgttcagcagtgtacaagcacatcacaacaacaaattcgcgcctga

SEQ ID NO: 205212 - DNA, 930 bp, Klebsiella oxytoca; identical to SEQ ID NO: 141625

SEQ ID NO: 205213 - DNA, 642 bp, Klebsiella oxytoca
atggggccagtctacaactatcgtggttcaatgggttccattaacggtggttacagctatagcaaacatagccagctcattaactatggtatgagcggtggagtcctgctccacgctgacgggattactctgggtcaggaaatgtctgaaacagcggtgttagttaaagccccggggttagataatgttcgactggaaaatgatgtcagtattacaacagattatcgtggttacgcaattatcccatacgttacaccataccatcgaaccagtgtgactttagataacaccaccctgagtgacaatatggaattaccgaataccacgcagaaagtggtgcccactcgtgccgcaattgtacgggcaaactttgaaggcaatattggccgtcgcgctttcctgatattgaaaagaacgtcgggtgactatgttccttatggtgcgacggtaaccttaaccacggataaaaatgctcaggccagcatcgtatccgacggtggcatggtttatatgtccgggctgaaagataacggtgaaatttatgcccggtggggaactaaaagcggccagcagtgtaaggcaacttatagcttagctgcgacaaccgaaggcattgcgcaggccactgcggtttgccgttaa

SEQ ID NO: 205214 - DNA, 783 bp, Klebsiella oxytoca
atggacttaggtgaaattgcgataaaaaattctggctggatttggagtacattaagagaggcaaaaaaactaagctatcaaattggagaggagtcaataactgactttcttgtgcttaatataaaaaaatggggtaggggaaaaattattattaatacgtttacccgccacaaagaatcagtgaatggctccgactgggagtggtggtttacaggtcaaagtggtaaatggttaggcatgcgtattcaagcaaaagttctcaacttaaattctgagaaatatgagcaccttcatcacacaaataaaaatgggcatcaagttgatcttctcattgcggatgccaagaaatatgaccttattcccttgtattgcatgtatacaaactggaaatcggggagttataaagttaattgggagtgtaaaacctacaaacgtagtatccttcattatggggcagcaattcttaatcctcttaaagtaaaacatctccagcaaaatagagcaaaccatttaactgatgttattgatgatttaagaccgatgcattgtttgttctgctgcaaaggcttctcgcaaggggatcttcctgaaagggctctggaatggttaagtggcgttggtctcctaattgagcaagacgctccttcacttgagtattttataaaggatgcaccaccatactatgtcactcaaatgttagagggaggtatacaagaagatgttatcgatttacatgatgataggctcaagcgtgtgacaattttcaacttagtaggtgaataa

SEQ ID NO: 205215 - DNA, 570 bp, Klebsiella oxytoca
atgaaaaaacaaaaggttgaatatggtttagaacttgatccaaatgcagattataagatggcgtggcttcatgaaagaaataaaaaagatttcgagtcattaacaaaatggttatatcttggagctgatattaaagacagcggatttgctaaggtaggtttgaccatggatgacctttcaagtcgatcatatagttctgccaatcctaactattatttgttttgtgcttttaaatgtcgagatgatcttacgaaaaccgaggttgaaaagattgaacgaagcatactggaatatctagaacgcgtatttgctaatgaagatggtacttcaaaccgagcgagtcacgcggaatctggtcgtttgtctgaatgtttttataacattaactttacaaacttcttcattagctatcatgattatctttttgaacaatttagcaataaatttatagtctgcgggtttgagaacgagtttggagatgatgagggcgagtttcttgattgtgagtttaatccaaagttcacgctgcaagaaaaaaataaattcatcaggatgatacttcgtaggtaa

SEQ ID NO: 205216 - DNA, 225 bp, Klebsiella oxytoca; identical to SEQ ID NO: 140388

SEQ ID NO: 205217 - DNA, 321 bp, Klebsiella oxytoca
atggtattaaccggtattgaaacagtaaaggtagcggtgatctgtacaggccacgtcagccatcaagattcagagattatccctgagtttctctggaaaaactggaaagaatccggagagttctggataagcagtactgctcacggttggttatttcggttgtgtgctctgcccgatgaatgggaggagcgtctgaaaaattttggagtaagtgatggctgcatatcaaatcttagagtgctggaatgtgaaggatatgactgggttcatttccaggctgatgcacccatcgtggaggagcttcagcactgggactggtaa

SEQ ID NO: 205218 - DNA, 132 bp, Klebsiella oxytoca; identical to SEQ ID NO: 109862

SEQ ID NO: 205219 - DNA, 312 bp, Klebsiella oxytoca; identical to SEQ ID NO: 109863

SEQ ID NO: 205220 - DNA, 312 bp, Klebsiella oxytoca
atgagtaagagtgagcgacgtaacagaacagccactcttccgccggtaagatgtcttccggaagagcgggatgagatacgtcaaaaggcggaggatgcaggtctcagcattggtgcatttatgcttagggctgcgttaggaaggaagattgccccgcagacagatcacaaactcattaacgagctttcacgtcttggcggtttacagaagcacctctttaaagaagggaacggggtcggcagtaaggagtacgcagagatactgcaggccatcaaggcagccattttcaggatagagcaaaagaacgactag

SEQ ID NO: 205221 - DNA, 1929 bp, Klebsiella oxytoca
atgaacgccatcattccacccaaacgtcgcgacaagaagtccagctttgttcagctggtcgcgtacgtttctgtgcgtgatgatgtcccgttaaaagacgaactgaaagaagaccagcgtttccagcgaccgtcacgttcccgccaggccatttttgatcgccttgttgattacatgaaccgtagcgaaggaacgatcaccgagcagataactgacatgagtccggaaggagacgtccgctgttctgttgacggtgttatctgtcagcataacctgatgtcggttgaaacagccgcaatggagatgaatagcattgctatgcagaacctgcacgtaaaggatgcggtttatcactatattttgagctggcaggaagatgaaaatccttctgacgatcaggtttttgatagtgtgaaatactcactcaagcgcctgggtatggaagaaaaccagtatgttgcggggattcaccgtgatacggataatctgcatgttcatgttgcggctaaccgcgtccacccggtttcttatcgtgcggctaatgtctggaatgacgcggataaacttcagcgtacctgccgcgaactggaactgaagcacggatttaaagtggataacggaagctgggttcgtgatgctgacaacaacattgtgcgggccagaaaagggtaccgcaatgcaccacgttcagcgcgacagcttgaacacttttctgataaagagtctcttcatcattttgcagtccagcatgttcgtaaacctgttaatgccatgttccgagagaagaacgcgtcatgggaaaaactgcatcaggtcatgaatgatgctggtttaatgttagagacttccggcaaaggattgatcgtgcgtgatgtgtgtggcgatgagaaactggccgttaaatcatcgcgggttcaccctagtatgacgctttcccgtcttgagcctgcgctgggaacctttgttccctccccacgttctgcggaaatggttaagcaaagtgttcagacgccttacagtgacaaactgcatgtccgcgatcgtggtgcccgtgcgaagcgccggcaggcacgcgctgacgcccgtatcgatttgcgcgaacgctacgggaagtaccgcaacgcctggaaaaaacctgaccttcacgccgctgaacgattccgggctgtgtccgctgcatttaaagaacagaagacccatatccgggataacgagaaagacgcgcatatgcgtaagctcatgtaccacatcgtggagtttgaacgtgagaagtcgatggcagcgctgcgtattgcactgaaggcagaacgccagaagttgtatgacgagggcatgatgcggccgctgacctaccgtgcctggaccgaacaacaggcgcttcacggcgatcaggctgcgctcagtcagttgcgtggctggtcttaccgacagaatcgtaaaaaccggacaccgcaggcctctgaaaatattatttactgtgcacctgcagatgacacttcgttgctcaaagcagatggttacgaggcccgcctgcatcgtgacggcgcggttgtctattcccgccaggggcaggatgccatcattgatcggggagaccgcgttgaagtcattaatccgtatgatgacggtgacctcaacacgcgcattgccgttgacatggtggcctggaaatcaggcgagcgtgtcgaattcagccgggatggctgtttcgcatatgctgccggcgatgcggtggctgcgcacaacctgcatcatcgtgacagtatcatcgtgccgagtgaccgggaacaatacgactatacgcgggagaagtttaaccagctgaaaggccggtatacggacagtgaacgggaggcacttcgtcagcaatatgacgaacgttattacgacgatgtccgtaataatgacgacagcagttataagccataa

SEQ ID NO: 205222 - DNA, 954 bp, Klebsiella oxytoca
atgaagaaaaaaaacagcacccccactccccacgatgccacattcaggcagttcctgacgcaaccggatattgcccgggagttcatggaaattcacctgcctgcagagctgcgcaccgtctgcgatctcagcacgctcaaactggaatccggctcgttcgttgaggatgatctccgccagtatttcagtgacgtgctctacagcctgaaaacgacaactggggaaggctatgtccatgtactcattgaacaccagtcgtctccggataagcatatggcctttcgtctaatccggtatgcggtagccgcgatgcagcgtcatcttgattccggccataaaaagttgccactggtgataccggtgctgttctatacggggaaacgcaccccgtatccttactccacccggtggctggatgagtttgacgatccggcgctggcaggcaaactttacagcagcgctttccctcttgtagacgttacggtcatcccggatgatgaaatcgccggacatcgcagtatggctgccctgaccttactgcagaaacacattcatcagcgggacctggctgaactggttgatcgactggcccccattttactggccggatatctctcttcatcacaggtaatatcgctggtacactatattgtacaggcaggcgaaacagctgacgccgaagcctttgtacgcgaactggcacagcgtgtgccgcaacacggagacgcacttatgaccatcgcacaacagcttgaacaaaaaggtatcgagaagggcagagctgaaggtctgcagctcggtgaacagcgcggtattgaaaaaggtcgttcagaaggtgagcgtcaggccactctgaaaatagcccgtaccatgctgcagaacggtatcgaccgtagcaccgtcatgaaaatgactggtctgacggaagacgaactggcgcagatccgccactaa

SEQ ID NO: 205223 - DNA, 1695 bp, Klebsiella oxytoca
atgaaaaagaaattccttattcttttgtctggaatggcagttacattaacttttgttgtatcgacaatagttagatacgattctatgttgtctgacaagtctttttatgccataagcggcactcaggaaaactatgcatgggctattgcaaagttttcaatccaattgtctgagttttactctcttgttaagagcgaagacaaagatatggataaaatccgattaaagctagatatcctttattcccgaattcatgttattagagcaaggagcgaatcgactgaacctttatataatcaagaagggtataagcagatcatagattctatttattacaaaataaaagcggtagacacgtatataaacacccccaacccaaacattgtaaaagttattgagttagttaataaaattgagccagactcaaaatcattgaacaacttagcagaccatgccgaggtcaatcaaagaacaaaagcccttgaggactttaaagaaaaaaggcaaagccttattattttactggcaatcgtaacagttttaatctttgctatgtttatcatagtagcttttcagctatataaaaccaataaattattagaagctgaaaaagctgcatttaataataaaaatgcttttttgggtgcattaggccatgaattaaaaacgtctctacaggcaatcacatcttcaattgaaataatatccttaaaaaactcaggattggattcaaaacatattgaaagactggagaatgccgcgaagaggatggaaaaccagatgaaagacctggcagagttcgctaaggttgacaatggaaatatagtggtaaacaacatatcattcaatcttgccaaacttataaaagatacagttagcgaatgtgaatcaatttccaataaacattctattgatattagaataggcaatattagcgatagtcatataataagcgaccctttcaggattgcacagatcacagaaaacttagtaactaatgccataaagtacaccgacaaaggtcacataactataaatgcttttttagaaggtgatagaacacttgtcatagaggttgaagatacaggaagaggcatcccaaaggataaactaaaatcgatattcctccctttcatacgagtagctgatggagtaaaagtccccggatttggtatggggcttgccattgttatgggggttgtcaaaacaatgaatggacgtataagtgtcaaaagtgagttagggcttggaagtctattcagaataacgctgcctgtaaaaaaatcgactaaagaagaattggctatttccgatgttattcgaaatgaaggttttacggctaacgacctcagcatattgataattgatgatgatgagttggtttgtgagtcgctcgcatcaattttacagggtatatttcaagtagaatatacctcatctccggaaagggcgctggagaagttgcgacgtaaaccatacgatcttgtgcttagtgacctgcagatgccaatcatgaccggcgacgagctttatatggcagtaaaaaaaagctcaggtcccaacacacaaacaccctttattttcatcagcgcttactccagcgagagtccagtcgatggggttgagcttcttacaaaaccagtcaggcttaacgatatacgcaaaagtatcgagaaaatatattcagatagatag

SEQ ID NO: 205224 - DNA, 495 bp, Klebsiella oxytoca
atgcataagtttcaactttcatttttcgccacgattttgtttgtgacctctcaaacaatggctgcgactgaagatataaatattgacggaatgattagccataaaaacaatgacattggatacacactcacattcaatgactttattaaaatgccaatggcacacataaagacaatgacaccgtggacgaaaccaaaaactaaagtagattttgagggtgttagagttaaagacatattaaagttagtcggtgctcaagggagaacattaagaatgagcgcactaaatgattactcaattgatatccctgtctcagatgttgaaaattacaacatcatttttgcttacaaaatgaatggtaaaaaacttaaagtaagaaattttggtccttacttcgttatatacccactcgatgagcacgctagtgagataaacaacccattgtatttatcaagattcatttggcaggttaacaaaattacggtgctaaaatga

SEQ ID NO: 205225 - DNA, 930 bp, Klebsiella oxytoca
gtgtctccctatggagtgaataaaaaaaagcctgttggtgatcttgcaccattggcatataaaacagtatataacaatgcattaaacaaggttgaggttgattataaaaaaataaaaaaagtcaccataattaatggattaggggtaacccttggagattcaatcattggaatctctgctctgcatgcaattaaatctataaatccggatattcatataacattgattaggccggagcattgccaggactatgtcgaacaaatttatcacatggcatcaggcattattgataagttattatacttaccttttgacatcgctaaaatcaaccatacagacgttaatatagatatgggaaatcagctttattgggaagattttgatagcatcgagatgcatgatttttttctaactaatcttggaatcaaccccaaaagcattaatgataacatcaaaaataactcctggcttttaaacacagatgtaccagattttgatctgggggagtatatactgttttgtcctaacgcgagtacaaagataagaagcatcccctcacgatttcatgttgaaattgttgaagaattgagccacgagttcggcgttaaagtattaggtttcaatgacgtagatcaccctaatttctttaatataagcaacatatccagtgatacgttatctttcgcaggaatcataaaacatgcatgttttttgtatacctgcgattcttctgcgcttcatttaggagcaggctttaatatacccacaaggtgtatatttaccaccgtcaaacctgagttgcgtagtctttactatactaaatgtgaatcaatttatatcggaaataaccataccgcaggtgttcattgcagcgaagatgattatatgctggaagtattaaataaagaatttgaggaattttatgcataa

SEQ ID NO: 205226 - DNA, 843 bp, Klebsiella oxytoca
atgaataacaacacaaactgggtcggagatctggttgcaaaagttctaacgagtggtggcgtaccggagaagaaacattcaatgcatgtggggcatgtccttgagatgtcttctactgcggccactaaaaaattggcaggaggaagtgaatggcgagttcagcagttgcttgaagttgtgcattccgttggtatgaggctggatgatttttttcgactttactatcaggaacaatctaataaggatgttgaagttcatgaggcagtttggagcgatggggaattgaatgagccctgtaagatctatatttctgaaaacccatcggaaccgacaaattactctgcattaaaaataaatgatgtgtggcatgttgttaaaacgagcagtatccgtgatgatgtgctatttgaatcaaaaatgaatattgatttaatcgaaattattccaaaaaaaatagacaaagaaaagcatagaattgctgtgcttgatgacgataaaaatatcgtccagagcctatcatctcttcttgaaggggatagatacacaataaaggaattctatagtatagatgaattagatgatgctatcgaacaaaccccgttcgatgcatacatattagattggattgtagataataaaaccgttttcaatacaattaaaaaaatcagatcatcaggaaataagcatgcgatggttatggttttaacaggacagttatccggggcagttgatagcgagatctcaagagctattaacgaacttgatattattggcccctatgaaaagcctataaaatctttcgttataaaatcaaatgtagataagttttttccaaacaaatag

SEQ ID NO: 205227 - DNA, 228 bp, Klebsiella oxytoca
atggcaattaatgcgccgcctgaaaaaaggaaaaaccgtacatcagataatgtcatttacattggtgctgaacgtaaagatagaatagatcaaatgactattgagatttcttacagtaccaagaagaaagtctctacagctcgttttttccaatttttaattgatcattatggagaaaatgcaaagaatgaatttattgaagcgataataaagtcggatgattcctga

SEQ ID NO: 205228 - DNA, 309 bp, Klebsiella oxytoca; identical to SEQ ID NO: 167744

SEQ ID NO: 205229 - DNA, 1050 bp, Klebsiella oxytoca; identical to SEQ ID NO: 166343

SEQ ID NO: 205230 - DNA, 771 bp, Klebsiella oxytoca; identical to SEQ ID NO: 166342

SEQ ID NO: 205231 - DNA, 813 bp, Klebsiella oxytoca; identical to SEQ ID NO: 166341

SEQ ID NO: 205232 - DNA, 1818 bp, Klebsiella oxytoca; identical to SEQ ID NO: 166340

SEQ ID NO: 205233 - DNA, 948 bp, Klebsiella oxytoca; identical to SEQ ID NO: 166339

SEQ ID NO: 205234 - DNA, 1560 bp, Klebsiella oxytoca; identical to SEQ ID NO: 166338

SEQ ID NO: 205235 - DNA, 432 bp, Klebsiella oxytoca
atgacattttcaatcgtagcgcgctgcacaactacaggagcgattggcgcagcaacggcaaccgcaggccctgcagtcggggcattggttcttcacggcgcgagcttagctggggctattgcgacacaagccatgaccaatccggtggctggcttgaaggcgacgcaatggctgcagcaggggatcaatgcgcgggcctgtttgcaaatgatgctcgatgaggatgaggggcgagatctaaggcaatggatcgttatcgatagccaagggcagagtgttgattggactggcggctgctgtttgccttggtgcggcagtttatcggaggaaaacctggctatcgccggtaatatgttagccggcgaacaggtgattcaagcggcactgttgcaaatagtcggtggtgataaacttatcatccccttttgctga

SEQ ID NO: 205236 - DNA, 123 bp, Klebsiella oxytoca
atggcaacgcacgactacaaacacttcacaatagctgtcgctatcccactgtcagtcctgggcaaggagcggttgttagggctacaagatgttgtgattaagtgcaggttatggacttcctga

SEQ ID NO: 205237 - DNA, 219 bp, Klebsiella oxytoca
atggattcattggtcaccggacgtaggataaagctccttatctgcgtggatgattttacgaagaagtgcctggcggtcattattgcctttcggatttcaggcgtgcaggtcatgcattttctggacagtatttcgcagtttaagttgaccactacaacatcaggcttgcgatgtgatgctttttcgcagccaccacatgtcattaaatggcacgtatag

SEQ ID NO: 205238 - DNA, 1245 bp, Klebsiella oxytoca
ttgtatctgagttttctggaaaaacaaccctatgaggttgatgtcattgattatctatctgttttattacttatcgaggatcactcatttactaaagaagaaataaccaaatgcattcatcacccttctcttatctctgatgagattctatattctctggatttagacattgaaagaaggaatgatttttcggttctctactctgaattttcagatgacttagaaccgaataagaacaaatataaaaaatatgctaatggccttgcattgaggtttataggcattatcgatgagctcgaaaataaataccaaatccaactgttgaggcattttttccttgaatgggagcaaatccacaacgcgcatgcttgttatatttttaaacctcataactttgcaagtgaacaattttaccctcaagacaagattttctgtagtttttcatggcgagcagaagtatccattttatctgcttttgtcagaacattagcgtatgctatgcaaaagcactccttacctgccgaactttgtttggcacatgcccaagaggttttaccattcggttctattgctgtaaatctttctccttctgactcaccatacaattggcccgtaatagaagatttagaaaaagacgatcatttgcctgatcagaaagaacttgaacggtatttggaaaatttttccgcttctgctgatgaaatattactttatgccaacggccccgtgctaagaaatcactctggtatatgccttgatctaagggttattttagtcaaacttcgaaactctgaaattgacgatcctaaggcaatttttgagtcaatagattatatgcgaaattctgagcaagggattttccctttagcaaagaagagctggccttcctcctttggaagatgggaaattgactggttaatcagaggttattttcgaccgacctactccgtaggagatttaccttttaactccgttaggcaaagcgattatcacatagagtatttcggcggaaatgtacataatggaacctggagatactgggtcaaccagtggtatccagtttatcacgctggtgtaggcaactctcttggaacttattttacagtttctaacgattttttaaaaaaactaaaaggacacactggcggcaattattatttaattggcgagatgacttgtgttgacaggcgtaatttctctaactctgcggagtcaataaaaacctattccatttttccgatatag

SEQ ID NO: 205239 - DNA, 1308 bp, Klebsiella oxytoca
atgaatgaagtattatcagacctcacagtagaacttgaaagtataatatcaaagctaggtacgatcattccaactaatgatccatttaatattgcccatgctaattggacatttccgggcttaactaaaaatgatctaatcaataaagctcgaaatttaatttcactaattgaatgtatagaagatgatatacctgatgaaaatataagtatcctcacggactacaaaaaaaggctcaggtttatctccgattcaactattcctaatttatgggggaatgtggcggcaggcgtccctccctatttgatgacattagatgagcttaaggaagaactcaacaagttatttgataaaaatcataatgcagatctacaaagagcagtgagagggcttagagctcttgaggcaagattaaaacaagttgaaccaagaactgcatcgttatcttctatggttgaaaggatagagcaagcattcaatacagcagaacaacttccagccgaccttgaattactaaccgagtctcgcgaaaaaattaaagaaacaatctcaaaaagcgacatgagtgctagtaagattgagctcttaaaagaagagggaaatgatattttgaatgagctcatatcaatgagagttaatgctgatgacatactaaagcgttgcgaaaccgcatatgctgcgtcaactagtgtgggtctggccgcagcttttagtgagcgttcagcagctctcaacaagtcaatgacgttttggataggggggctaattgtagctcttataactgcggcgattttcggaacaataaacgttcatggtctattggttgcgactggcagtcctcaaccatcttcatctgttataacaatacgattatttttatcaatattatctataggtgggcctgtctggtttgcgtggttggctacaaaacagatagggcaacggtttcgtctttcagaggattatgcgtttaaagcctcaatatcccgtgcatatgaaggatttagaagtgaagcttctcgtatagataaaaatttagaggttaaacttttagcctcagcactttcgagattagatgaactacctctacgcttagtggaaaccgaaacacatggaagcccctatcatgaattattgacgtcagatacctttaaggaagcgttaaaagtagttccagggttttcagataaaataaaaaaaattgctgagcaagcactaaatgctgcaaatgatgtttcaaaaggagcgttaaagactagcgaaaaaattgcatctaatgaaaaaaatgattcaccaatgaatacttag

SEQ ID NO: 205240 - DNA, 291 bp, Klebsiella oxytoca; identical to SEQ ID NO: 16838

SEQ ID NO: 205241 - DNA, 330 bp, Klebsiella oxytoca
atgaacccattcaaaggccggcattttcagcgtgacatcattctgtgggccgtacgctggtactgcaaatacggcatcagttaccgtgagctgcaggagatgctggctgaacgcggagtgaatgtcgatcactccacgatttaccgctgggttcagcgttatgcgcctgaaatggaaaaacggctgcgctggtactggcgtaacccttccgatctttgcccgtggcacatggatgaaacctacgtgaaggtcaatggccgctgggcgtatctgtaccgggccgtcgacagccggggccgcactgtcgatttggcactgttgcaaagttag

SEQ ID NO: 205242 - DNA, 585 bp, Klebsiella oxytoca
atgtttttatcttggatggttgtagcaataatatctttctttttcttcaggcgatgggaagctacctatcagaatcctttactttgtgctttgttgtggccacttgtcttagctttcttcttactatcaatgatatacatggcggctaaatataatctcgcactatataaaaataaagttttacacaaagaaagcccaagcgccacatcgccagtcagcattgaaaaaaaagatgaggttacaattaaagcgcatgaattactcggagtggatctaacggataagacagtagctcaaaaaaatgcactatgtgaacatctcataatattatcaagatccttactattcagtgaattcgctgcattaggggtgtacgcaggtccagaacgttacgattcaacgcttgacagccttaacataaaactaaatgaaaaattcatacttattaataacttagttcttatcaaagatgaactggatagaagaaaaacgattgagggcaaggtatctcctgaagacttcgatcccttactcgagcataatgaaaatttagatgtgttcgatttacatcatatatacccgtga

SEQ ID NO: 205243 - DNA, 135 bp, Klebsiella oxytoca
atgctccgcatcatcgtggagtttctcacaaaggtcagcctcagcatcgagatcaagctcgttaagcttctccagcaggagcagagactgattctggatgaatttagatgttcagcgctgttttatgttgtttag

SEQ ID NO: 205244 - DNA, 420 bp, Klebsiella oxytoca
atgcggttttacacgcccgttgagttacgtaagattatcctgatcccattgtacagcgaccttgttcagtgtggttttccaagtcccgcccaggattatgttgagcagcgtatcgaccttaacgagctgctagttaaccaccccagcgcgacgtattttgtcaaagctgccggcgatagcatgaaggacgccgggatcggtgagggggatcttctggtcgtggatagttcaaggaccgcagtccatggcgatattgtgattgccgcggtggacggggaattcactgttaagaaactgcagttgcatccgcgggttcagctaaacccaatgaatagcgcgtattccccgatagtcgtcggtagtgaggacactctcgacgttttcggggtcgtaacttatataatcaagtcggctggctga

SEQ ID NO: 205245 - DNA, 840 bp, Klebsiella oxytoca
gtgggctcggagatgtgtataagagacagcggtataggtgcggatcactgggacgtattgcataaaaataccaacgttgcatatcttgggaatagtcccgctcagcaacaagcaggtagtgtcttcaagcgcagagggaaaccaattaatgggtggtctgaagctgataaaaatattccaaaggaatactatgaatggtgtcaatcttgggcaagtgaatggcttagggttttaaagccaggaggctccgctattgtctttgcgggaaggcgttatgctccaagatgtattgttgctctcgaagatgccggttttaactttagagatatgttatcttggataaaacctaaagcaactcatagagctcagaggctgagtatagtatatgagcgcaggggcatggaggatgaatctttaaaatgggatggttggagaattggaaatttaagacctatgtttgaacccataatctggtgctttaaaccctataagtacactattgctgacaatgtactcgaaaacaagttgggggcttataaccaagtagaatttgaagaaagaatggggcattgtaacaatattttggaaataggtatgtcttctaaagaagggggtttacatgacgctcaaaaaccggtcaaacttttagaaacattgatttcattagtcactataccgggtcaaacagtgctagacccatttgcaggaagcggctccacggcaatagcggcacaaaacctaggaagaaaattcatcatgatcgaaaaagatatagatactttttcaaccatgatgagcagaatcaaaagaagtgaaacttccaaaggattatttgactaa

SEQ ID NO: 205246 - DNA, 1104 bp, Klebsiella oxytoca
atgaggatagttaaagtcgttaaaattcctgaactagcacgtgatgaagattacgatgaacaaaggctggatgccaaggatgagctaacagagtgggattcacaaataaaaagatggtttggtgatgggttttcaaactattcagagcgttttataagctatgaatttatacaacgtttcattaatgatgagcatcatgattgggatttttcaccaaatactaatttaattgcagatagattctctaacgccttgaaagaattagatgatcttcagttttcttttttattaagccacaatgggtatattcctgagatctataaggcggattctagccaagaaactctttattcaaaactagttgaagtaatcgttagtgaatgggctcatagaataggatttacttcatcaacgttaccaactcaaaaatctagtaaagaagatattactatttctgatggtactaacattattgtggctgatgcaaagtcatatagactaggcagaagccaagcagctcctaacgttaaggatgcgttgaaaaaaggtgatattttaaaatggttatcacactataattcatcattattcaataaagtaggaggattagttgcttttccatcacagcatgattggaaaaatgggagtgatttttatttatatttaactgataagtcttcaccaataattatgctcttctatgagcacatggcttttatgcttttaactggcatggataaaagctcgattttaaagttctttcaaaaccatcacgaaattttccctgaagaagaactaaataaaattggttctagatctgtatattttgaaaaattagaatcaaacttgcttaatacagggaagataaaatggagcgagttctctaagattgcagattatatttccagcgagaaagcaacagcaacactttcagcattagagaattatcttgcagaagagaaaacaaaagctctgacttgggcaagttcattaactacagagcaagctaaaatacaactagctgatataagttatcagctagaaaatcaacatttaatacgacaaaagaaaaatatcgaaaactttaggaaattagtcaaataa

SEQ ID NO: 205247 - DNA, 1845 bp, Klebsiella oxytoca
atgacagataatcaacagagccagcctgagaaacggagtgcctcaggtcagccggtcccggtcacccccgccccgccgggaatggtttcccttggtgttaacgctgacggcgaagaggtgatgaccgtggtgggtggcgacggggggaccagtctgtcggggggagcggcgaatattatgccgggcagtggcagcgtacaggctgacctgggtaaaaaaacgccttccagactccaggccgaaagttctgccgccattcacgccacggcaaaatggacaaccgaaaatctgaaaaaaacgcaggcggcacaggcggagcgggtccgggcgactatggcggcgcagcaggcggcaaaggcttcacaggataaactccggcagaagctgacagatgtgacaaacgcggccattcagaagggcagagaaggaccgagtgtcactgatgttgcccatcagaccatcaaggagatggaggcgttcgctcaaatggtcgctcagaacgaggccgtaaaaagggcagaaaaagaagccagaaaggcagaagaggcttatcaggccgctatgcgggcggaggaggaagcccggcgccagcaggctgaaatcgagcggaagctgaaggaggctgaggcgcgtgaggcagccgcgaaagcgaaggccgatgcggacaaaatagccgcggagaaagcagaagcagaccggaaggctctgttcgcgaaggcaggtattcaggacacgccggtttacacgccggaaatggtgaaagcggccaccgcggcgatgatggtacccggcgcggcactgctgaaccgtgcgccgggaatgatacagctgtccgccgtcgcgtcagccctttctggcgcggcgagcgctgtgatgactgccaccgcagaattctcaggctggatttcctcagccctgtggcggggggtggtgagcgtggcaggaacggccaccgccacgacagccggtccgatgatagccgcggcatcaacgatttttttctcgccccgcgccggtgaaggcagcgacagggttcccgggcgcaacatcgacatgcttgccgcccaggcccgcctgtacacagcaatgaagacgaacattcagccagggatgaaaactgtggacctgccggtcagggggtatatctcggacgacggcaacggccggcagtcggttaacttggtcaggacggggaccggggggatttcggccacggtaccggtgctgaacgcggtgcgtgacaaaaccaccggcctggataaaatcacggtaccggccgtggcgggtgccccgtcgcggaccattctggttaacccgttcccggtggggccgaacgtgccggcacacaccgggaacgagggccctgtgccggtgacgccggtgcacaccgggacggaggttaagcaggcggacagcatcgttaccacgacgttgccggcggcagatattcctgcgttgcaggactttatctactggcaaccggatgcgaccggtaccggcgttgagccgatttatgtcatgctgagcgacccgctggattcggggaaatatacccgcaggcagctccagaggaagtacaaacatgctattgactttggcatcagcgatacgaagatcaatggtgaaacacttactaagttccgggatgcaattgaagcacatctttcagatatggatacctttgaaaaaggaacatatcggcgtgataagggatcgaaggtttatttcaatcctaaaacaatgaatgctgttattatccgggctaatggtgactttctatctggatggaaaattaatcctgcggcagataatggtaaaatttatttagaaacgggtgaattatga

SEQ ID NO: 205248 - DNA, 681 bp, Klebsiella oxytoca
atgggctacttcgaaaaaatctttagtggcaacccgtttctgattgaggaaaagcaactcagctatatgaccccggataaccgtttgtttcagccgccccatttctttctcaccacacttgaacgattggcagaactaagtatcatcgcaatgcaacggggtaattatgtatggcatggtgatgataggtattccatcaatggagagatacaggaagaagctctcttagagagtttgcctgatcaattcgaaaaaacggttatgctggaaattgatctctcaagtggtacagacgaagaaattgcagaatcactcaaagcagcattaccacaatggcgtaagtacatggaaatagatgagaacccattagactcggttcgtttcgggtatgggacgataaagaagcttatcaattatcgcatcatacctatgcttgacatcctagtttgggctgaaataaaaaaggttcggatctctgacgacagattatctagattattgtatgcagatgatatcgaagaaagtgaaatgcgattatcacagcaaattaaagatactgaccgacctcttgcccttaaagcctcaacaattgacttcatcaggcagtttcatttttttataaacaagaacaatcatttgaaaaaaatgaaaatttctgatgtaattaaacttacagattaa

SEQ ID NO: 205249 - DNA, 396 bp, Klebsiella oxytoca
gtggctcttatctgtgaactcgatgagcaatggggtttcgttggcagtaaagcccggcagcactggctctggtatgcctacaacaccaaaacaggcggcgttctggcttatacgtttggaccgcgcacggatgacacctgccgtgaactgctggctctgctcacaccgtttaatatcggaatgataaccagtgatgactggggaagttatgtcagagaagtcccgaaggataaacacctgaccggtaaaatcttcacccaacgcattgagcgcaataatctgacactgagaacccgaattaagcgtctggcccgccggaccatctgcttctcacgctctgctgagctgcatgaaaaagtcattggggctttcattgaaaaatatatgttctactaa

SEQ ID NO: 205250 - DNA, 555 bp, Klebsiella oxytoca
atgaatgaagaccgtttaatccttgaagggcagataagagaatgttacggacgggtcgtttactcccataaaactcatgaaaaatgtgctgacatacttatccgtaagcatgaaaacataaaattatggcaaatagtcgtgtcagcattagttacaggtggaatagtttcaactttctttgacaagggcaacgttagcgctattatcagtgttgtcctctcaaccatccttttgattttaaatacatatactaaaaattatgatttaggagaactagctcaaaagcatcggcaagctggctgtgatctatggattataagagaagaatatctttcattgttgactgatattcgtattggggatatatcccttgataaaataagagaaaaaagagataaacttacaaaagaattacagtctgtatatgcaggttctccgagcacaaattacaaagcttatatagccgcgcaaaaggctctaaaggaactggaggatatgactttttcagatagtgaaattgatgcctttttaccaaaagaattaaagcggtcttga

SEQ ID NO: 205251 - DNA, 1314 bp, Klebsiella oxytoca
atgactatatctgaaatgttttcagggtttatatcaaatttatctatcaataatgcagaaacaatcagctctcgctatggtgaattaaccactgctttaaacaaacagttcagagataccgaatctaatacagcaaatactttacaagtgggttcatttgggagaaaaacgggaatcagaggtatttcagatctagatatgctatatattatgcctaaatcaaaatgggataattacaaagacggtaaacaattagaactacttcaagatgtcaaatcagcgatattaaaaaggtatccgacgacgaaagttcgtgtggacagacttgttgttactgtaacttataccaatttccatgttgaagttcagcctgtttttgaacaagaggattgtagttataaatatcctgacacgaaaaacggtggcagttggaaaataacgaagcccagagctgaaatgacagctataaataaccttgacgcaaacaaaaatagcaacctccgtcggctatgtaaaatgataagggcatggcgtaacaaacatggcttagctatgggagggcttctgattgatactctggtatacaattttctaaactcaacaactgagtatgatgataagagctatcactattatgattggttaagtagagattttttcaagtatattcatgagcttgaagaacaaactgagtattcagcccctggcagtcgtcaacgagtgaaagttaagaaaaaatttcaaaagaaagctaaaaaagcataccatctgtgtcttgaagcaattgatgctaacggtcaatcgaatgaaaatgataaatggaaaaaggtctatggccgcccgttcccgaaagctgaaactgtatcaaaggcatccctttcgatccatacccacgcaacatggaaaaacacagaagaatttatcgaagataaattccctgtggatattaaggaaaacataaaaattgattgtgaagtgaaacaaaatggttttcgagagttttttctgcgtgatatgatctcaagacatattcctctacgaaataaaaaggatttaaggtttgaggtgaaagagatttcagttatacaaccctatgatatatactggaaagtattgaatagaggtgaagtggcaaagagaaaaaataatattcgaggacaaatagttgcagatgccgggatgagacagaaaatagagtccaccaattttcgtggggatcacattgtcgaatgctattgtgttaaagacggagttgtcgttgccaaagatagaattcatgtaccaatagtaatcgaggggaaccgtgatgaatga

SEQ ID NO: 205252 - DNA, 207 bp, Klebsiella oxytoca
atggaacatgccgaagattcggagatcgtcaaatgcataggatgcggaaaaatattcccttacgatgagttaatccaagaaaatggtgtaagtattgatgcgcatgttaatgaagtaaaagaagaattgacgaaggatatacaaaagcagtttaacgacatactgaagaaagcttttaagggaagtaaaaacataaggatcaaataa

SEQ ID NO: 205253 - DNA, 480 bp, Klebsiella oxytoca
atgactacaagtgacgtcatcgctttaggagcgcttgcagtatcaatctacaccatcatatcatccgagcttaaatcaagaaaaagcgatagagaacaaaaggttattaaagatgagcaagatagattacgtaagttgcttctggaaaaagaaacaaagtcagctatcaatgaaatgaaggctgagcttggtgctcgcttggtaaaaatagccagaaataattacaggctaaaaatatacaatagaggcaaagtcgaagctaggaatatagaaattcactttcctgataatgacggtgatgaataccttgtaatatcggatgtagaagacaagttcccatatgagatactgcatccgcaacacggaattgagatcatcgcgggactaagtttcggtagcaaaaccaaatatcgaataaaacttatatgggatgatgattataataggaaaaatgaagaggagtttttcatttcaatatga

SEQ ID NO: 205254 - DNA, 1797 bp, Klebsiella oxytoca
atgagtctcattggtatcgaggaaagagcattaacggcagtaactttgggagaaagccatttcagggagttcaaaagtgcacttcaggggccaccagacaaaaaagaaaaaagacccaccaaagatatttcgaccaacatcgcacaaactcttgttgcatttgcaaatgctgatggcggcgagctgcttatcggcgtcgaagataacggagaaatcactggaatagatgttttcaatgatactgaaataaacaccctcctggatgcaccaagagttagagtacacacggatactcctttaaactctgtcaggaaaaaactaataactataggggacaaaagagtaatttatttttcagttgaaaagagtactgaagtcatacatataacatcagatggaagatgcttacaaagaaaggatttagagtcagtgccagtacctcatgaaaatataaaatttgaccgacaagacaaattatccagagagtatgacaggcaattcattgatgctgccaaagtcgacgacttagacattgatcttatccgaacagtatctgatgttattttgaaaggaatgtctcctgagaaatgtcttcaatacttaaatttagcagagttcggaactagtaaactcaacttgagaagagcttctttgctcttattttctaaagaatatattcgatggcaccctagattacaggtcaggattataagagtagatgggacggaactcttaacaggaaaaagttataatgttgttatggatgaagcaataggtggtaatattttaaatcttgttgataagtcatgggaggcattgagaccacatttagtacaaacaaaaattgataaatcggctcgattcgaacagaaaactatttatccagaattagcctgccgagaagcgttgctgaatgcaatagcccatagagattattctcaagaaggcaaaggtgttgaagtatacatcttcaatgacagattggaattcaaaagcccaggagcattactttcgaccattaggattaaggatataattaatcaaacaggggcacatcaatctaggaatacatatatagcaagagtcttaagagaattgggatatatgagagaattgggcgaaggaatgcgaagaatttatcaactaatgcaagagaatgaactgacacctccagaacttagagggagccaggatagttttagcataacattatttaacaaacccatatactcgaataaggaagcatttttcttagagcagtttgatagatttaacttggataaggatatgaaagcagtgatccttttaggtatggacgaagctgtattctctgcgcagaatatatgggatgctgtggggatagtagacaccgaacattatagaatattggttgaaaaacttttgcgtttaaaaattttagaaaataaagtcgatcgtgaattggctaaaaaaatctgccgtaaagaaaaaataccttttaaaaaatatccacgctattcaatctctttccctggaaaatcttcacagacttcacagacttcacagacttcacaggcttctcaagagcctcagactcctcaatccgtagtaataaaaaattccgccatcattagtggaaaagtaaagaaagtttctcctaaaggattttttggatttgtagttgatgagaaaggtaatgaatactatttcagacttagtgaaaataaaacaaatgataagttgaaagttgatcaacctgtaaaattccagataagtgatggtaaaagaggtgatgttgcaataaacattacaaattaa

SEQ ID NO: 205255 - DNA, 1101 bp, Klebsiella oxytoca
atgaatcagcttgaacaactaaagcagcgaaccacaattgttgccgacagcggggatattgacagcattatggcttaccagcctgaagatgcgaccaccaacccttcgcttatttataaagcggcgcagcttccgcaataccagaaactggtgaaagatgccgtcgcggcggtgaagtcccgccagaatggaaagccggtacagcctgcggatattgccgattacctggcggtgagtatcggggtgctgatcctgaaaaacgttccgggtcgtatttcaactgaagtggatgctcgcctctcgtttgatacccaggccagtattgctaaagcgcgggaaattattgcactgtatgaagagaaaggtattggtaaagatcgggttttgattaagcttgctgccacctggcaagggatccgtgccgcagaaacgctggaaaaagagggtatccagtgtaacctcacgctactgttctcctttgcccaggccagagcctgtgccgatgccaatgttttcctgatttccccgtttgtgggccgtatctacgactggtacaagaaaaacaaccctgataccaccttcaccgtcgagaacgatccgggtgtcgaatcagtgcagaagatctatcttgcccaggccagagcctgtgccgatgccaatgttttcctgatttccccgtttgtgggccgtatctacgactggtacaagaaaaacaaccctgataccaccttcaccgtcgagaacgatccgggtgtcgaatcagtgcagaagatctatcgcttttataaaatgcacggctaccgcaccgtggtgatgggggccagtttccgtacgccggaacaggtgctggcgcttaacggatgcgatcgtctgaccgtttccccggcgttgctggcgcagttgcagcaaactcagggggcggtaccaatgccgctgacgtatgaaggtgaaatccaggcgaagcccacagcgatgaccgaggctgagttctactgggctcataatcaggatgcgatggcagtggaaaagctcgccgaaggtattcgcctgtttgccgtggaccagaacagtcttgaggcactgctgagtcaatatctgtaa

SEQ ID NO: 205256 - DNA, 2490 bp, Klebsiella oxytoca
atggctcatatcagcgccgtcgtaaccctacgaccaattcgattcgcattcctcgttaaacctaatgacagtaaacggttactggaaatcttccaaataaacacatgcctttggggcggtaaatttaaccctatcattccaatttttggccatgtgcctaaatggtgggatagggatgactacaaacctgagagcgctttgcagatcgtcaatggctatcttgatgctttcgaacctgatttccttgtagaagctgaagcagggctggctaaagggtttggctatgacccagaccgagtactgcaactttcagccatgctaaggcgatctgatgaactgcggggtcaagctgggcttgatgtcttcgacctatataaagatctgtataagaaacaatttcaattcgtgcgtcgacatgagcacaatatcgtggaactcatacctcggacgaatgcattgaagtcgttctgtgcttgcctatctggcagcttccctgaggatgaagaccttaaatattttggccaagggttctgtgatgcttttgatcccaaacaggttgaattatccccagaagctctagtagacctgtacaaggatggatttaattcagcactacaaatcggtcactcgaatattgaggttaattatcatgacaatgcggatccaacgctctttgtcatggatgcacatgactcgcgcgatcttattgacttctggaaccttcgcgctatgcggaaatatgtccgaccaattccactccaatggattgatgcgctttccccatactgcagagaatacattgaagattgccatcgccccgttcgagggaatcaatttggcttaatgactcatgctaccgtaatgtttgcaagatctatccctactgcgaatatcgaacaactttacgccgactatttgcgggttaatcaagatgaggcaaataggcgtcaagattggtatccaccgatttggcgaccatcatctggttttacagttcgcagtactcgacctactctatcctgtgcagaaaaaacgtttgacacacaaatcgaaggtgaccgaaccgaagttcgatttgattatctccatccagaattcactgaaagatatggtgccaatgatgctcgctgggtgaacgtagtgaaattaaaaaattggtcaaataccagtcgggctgcaaccgtttatccttgtaattacaggtcgcccaagatgccacgtttccagtcaatacagagaagcatcttatctacaactgaaggttttgttgtattttgccgtttccataatatgtccgatctctggcgtttgagtgacggcacaacggcgataagtgaatggctaaaaaacaatggagttgaaagccaaatctccgatgcaggacaagctacacagcaaattattaatacgctcggaggtttcaggggaattagtagttttgctcatgcagagatagtgaaacttctcaataaaatttctcgacggcccatttcaccctcaattcaacaccaagaatttcagaacaaaattaataatgtggtgaagggtgatatatggcgaaataaaaatgctgaaactttagttgagcttggtgctgttgagcttggcttggagttaaagtgtgcaaaatgctctacttggggatggcacgcgctacgcgaactggatcttgtagtagcatgcggcctttgcctaaataagtttagctttccaatgatcgatccaagttcgagtcaattgtcccgttgggcttacaggttgataggcccctttgcactacccgattatgctcgtgggggatacgccgcatccctaacgctaagatttctcgccaacacatttggaaatcatgatgccacgattacatggtcaaccggccaaatactgacattggccccaaaacaatatattgaagctgacctaatactctggcaccgacgcaaagttttcaatgagctggatcaccacgcagaactcgtatttggagaggcaaaaagctttaggggcgagaattccgaagagaaaaaagctgttgctgatgcatttgaagttgaagatgtagaaagaatgaaacaacttgctatccgcttccctggcgcaattttggtttttgcaaccatgaagcaggcaggagatctttccccggccgaaattcagcgaattacaaaactcgcgtcttgggggcgtgaatacatccacgagcgccgacaaacaagggctcctgtaatactcttaactggtctagagctgttcgcaccatattcgctttctcaagcctgggatgctgcaggtggccgccatgctgaaatgggaaagggacacttcggctatacagataatcttcgcgttttggccgatatgacacagcagttataccttaacatgccggcatatagcgaatggttacgagcaaagtgggaaaaaagaaatcagcgtcgtcaagtgcgacaagctgctgcggtgccagcacgagatgctggagatcattaa

SEQ ID NO: 205257 - DNA, 123 bp, Klebsiella oxytoca
atggccttcatcaacagccttttgatagtaaggcacagcatcaggagaaacgccgtgcaggtagccgaacatttccggagacacaaatcctattccaccaacgagtttagcgccgtcgcctga

SEQ ID NO: 205258 - DNA, 663 bp, Klebsiella oxytoca
atggattattattttatctcagataattactattatcttttagggattgaacatattgctgacaaaattgatatgtcaggtaatatcatttgcattgatattaacgaagacctttatgattttcatccggctcctggtgaagtggttgtaatagctgtaaccagtaactatctccgccagagaataatgagattttctgaattgctttggtgtcgcttgataatattattaaatgcgccaatttgcaggaattcttttcaacgcattaacccctgtataatgccctggaaaatgcctgtgaaaaggctaattaattctctgcacaaatttgtaatggctgatgtcggttatcattctttttcggccagaaatataaaaataatagaccagttaattaaaggtcgtgatgtattaacactgtcaaaacaaacaggcctatctacaaaggcaatctatagcatcagattgaacgcttttaataaattaggtttgagtggttgcaatactgcaactggcttattgttatgtagagatatatttgaaatcatgcagcttattgcagatagtggcgtaaaactatttgcccgaaataaaacagactgtgaaatgtttgatttaagggggtttatgtttcctgtcttcatagatgaggccaatttctga

SEQ ID NO: 205259 - DNA, 570 bp, Klebsiella oxytoca
atgaaattgaatcatatcctggcttccgtgatcgcggcttctgctttactgtctgctggtgcaatggctgccgatggcaccatcacttttaatggtacggtcaccgccagcgcctgtaccgctctgactggtgtgtctgtcggcggtggcgcgccagcagtgaaccagactatcaccctgccggctgttcctgctacggcgttgaatgttgcttccggcacctacctgggccatacggcgttcaaaatctctctgaccggctgtgccgctgctggagccctgtctaacgtccgcgccattttcgacacgccgttcgctccggcatctgatgcctatgtggctggcaatactgcggcatcaggcgctgctgatgtggctgtagcgatcctgactccggccggtgcacagattgacatgaatggtggttcaaatgtggctccgggttacaccctgccggccactgctggtgccatcgatatggacttcgtggctgcctataaatccctcagcaccagcgtgactgcgggcccggtgacagggactgcgaactacaccatctcttacttctga

SEQ ID NO: 205260 - DNA, 2631 bp, Klebsiella oxytoca
atgcgcataaaaaatccgccttcactcacccctgacacaaaaaatacccggaagacatcagccggatggcataatccgggtattttttgtgtcttaggttgctgtctggccgggaatgcggcggctgacaggagctttgacgagatcttcctgcgtcgcgataaaggcggggccacaccggacgtatttgtctggcaggatgcaattacaccgggcctgaagccggtggatatccgggtcaatgacaatctggctgaacacacggaggtgcgctttgttgacgatggaaaacagcgggtggtgccgtgcctgtcaagggagcaactgaaaagactcgggataaagatggagttgtatgatgatggcgcgacaggagcgtccgggacatccgatgccttatccgacgacaccattgtctgtgagccgattgaacagaagataccttcgtctgctgtggtttatgatgccactcagcaggtactgagtattacagtgcctcaggaagccgttgaccgactgcgcttcacgatgatttccccggatgagtggaaccacggggttcccagcctgcgcaccagttacaacggctattattacaccacggagacaaaaggccacaccagtgacaactcgcatacagatgacaccacctcccgcagcgcctaccttaatctgaatacggtaggctctttcggcgcgtggcgtttcttcagcatcgactccttctaccgcagtccgggtcagggctgggagtcaaaccatgaccgttcctacctgagccgcgacattgctctcctgcgcagtaatctgcaggccggtgaaatttataccagcacctcaggatatatggtcggggcgcttcccctgaccggagtatccctgagtaccagccagaaaatgttactggacaaccagttcagctactccccggtggttcgcggggtggcccggaccaacgcccgcctggttatccgtcagcgcggcaatatcatctacagcaccaccctgacaccggggccgtttgccattgacgatctgtacagcgcccaggtaggtgctgacctggaggtggccgttgaagagtctgatggtcagacacaagtttttcatgttccctacactgcccttccgaacatgatccgtccagggacttcccgttacagcctggcggccgggcgttatcgtaatcagggcagtcggacagaagagccttgggtaaccacgggtagtcttgagtacggacttgaacacttcacactaaacggctcggctgttgcatcagaggattatcagtcactctctgccggcgtggcgtggaatatgggtaatatcggagcattctccactgaagtggcccatgcgcgtcaccatgaaacctggaatggcggtcatacaaaggatggctcggccgtacgttttctttacgcccgtcattttgacatgaccggtacctccctgcagatactgggttaccagtaccgttcgaaaaatttccttgagttccctgaattcctgtcccgtcagagtcgagacaacatcagcggatacaactggagcgatgatgagtggcaggatcgtaagcgtagtcgtgtggaaatgacgttaaaccagagcctgaataattacggtagcctctacatgggcatgagcgaggatcgttactatggcaccagccgcaaaaccacctccatcaccggcggagccggtactacgatagggtcggccagcatctccctgtcgctgacccggatgcatgacgttcataattctgacacccaaataggcctgtcagtcagcctgccgctgggggctgcagacagccgtagtcgtgattatggttctctgaattacagcctgaaccgcaacagtgacaaccggtacagtcagtccctggggtactccgggagcgcatgggataatcgaattaattactccgccaacgtgatgcgggatacccaggggaaatacagtcagtctggcacactgggctataacggtagcaagggcaatgtgtccggcggcatgagtcacagcagcggttacaaccagtactcagcgggcgtcagcggcgggatcacgctctacagtgggggcgtggtactttcacccaccctgggaaatacggtggccattgttgaaacaccgggtgcatccggcatcagcgtgtcaggtacgggtaatacggaaacagattatttcgggcacgcgatggtgacctggctgacgccttatcgtcacaacgacatcagtctggacaccagccgtagtacgacttcgcagagcgtggaactgaaagactccaccctccgggtggtccccagcgacggggccgcagtgctgctgaaatttgcgacacgggtgggacgccgggcaatggtggagatacagagcagcaggaaaatcccgctgggcgcgatgatttacctggaaagcgagaaggaagaggccgggattgtagggaaccacggtctggcttacctgagcaggctggatgcacgccgggaccagatactaaaagtggtctggggtaagggccagacagagcagtgtcactttaccctgcaggcactgccagaggggcggcaggcaccagaggactggtataaaaaagtggctgtgaactgccgttaa

SEQ ID NO: 205261 - DNA, 732 bp, Klebsiella oxytoca
atgaacatcaaaaggaacaccagagcggtactgagcgcgattctactggccggggctgtggcaccggcagagtcggcggtcaggccacagctaacgcgtattgtggcgtacgcagaggacagggaaacgccggcggaaattatcaatgagagtaaagatacgtacatggtgcagtcctggctggaggatacagagggaaaggacaaggatattcctattgtattgacgccgccggtgatgaagctggaagggaagaagagtggcaagctgcgtctggtggtcatgaagggcaatattccgcaggacagagagtcggtgtactggctgaacctgcaggagataccgccgaaagcgaaggatgcggataacagtctggtgatagcgatacgcagccggctgaaggtgtttgtgcgtcccgcggggtttgatgcgcaggggagtgtggaagcgccctcaaaactgacgtggaaaatagagacggcggacggaaagcgctggctgtgggcgacaaacccaacgaaatactatgtgagttttggcgagcttgcgttggcggtacagggcaagaagggccaacgcctggaggataagtaccggatggtgccacctgtggggagcgagcgttatgaaattcccgcaactataaagggcagtagtatcagcgtcacctggagcgggatgaacgactggggcggtgcgggtaaggagcagacggtggaggtgcgccagtga

SEQ ID NO: 205262 - DNA, 1248 bp, Klebsiella oxytoca
gtgagcgggttaattaaggcagtggtgtatgctggtgtgacgatgatggccgggatgattgctccgcaggcaggggcggctacttatagtggcgttacttactggaatacctcagctggtccgggagcggtcgctgcgacctgctcgatcacactgccggatgaacagccgctgactgttccccggaccctgattgttggaaatgatgttccgaatggaaccgagattctttcgtgggggtatggggagtggtcctcggatgttgtactgtcgtgcgttggctccggaatttccaactattctactgccattgctggttttgagccgcgagttgattttcaaatggtaaatgccagtagtggtccaggagttgcgttgaataatccggggcttcgtctgaatatatggataaggccagatattggttcaactccctgcaacaccagtgggtgctctataaatgagaacaattacactttatacagccaggtatctggcacgactagttttattaatgccggggaagataggtcattgaatggttatgcaaatagtgtttcgtatctctatcaaatgattaatgcgccttctgttgctggtaaagggaggctttacccaacgataacagggagatattctataagagtatccattgttaaagtcggtaatgttagttacggcccattgagtgtttctggcgtccttccggggttcgccgtcaatggtaccacttgggttagaagtctgtttcaggggagtggtataacaatagttccccccgcctgcaaactcaaaaccaccgattacaccatttccatggggcgctgggccgctgacagcatcacctatgttagtacgccagtctatggctctcaggtaccagtaaacctctcacttgaatgttctggcagagttaaccacgttcgcttccgctttgaggatactggctcatcgctttccagtaaccgcaatatcagcctctatgatactagcgggaataaaattaacgggctggagatagagttgcgttataacggcgtgaaggtgaacgtggataactccaccctcacagacaccggcaatcacgggacaacgaaaacttcccctgcttcgcttcctctgtatgactctgtgagcacagcaacattctatgcccgctatgtacagaatgcggccatcactcgctctggcattaattatattggtccagtgacgggcaaggtgaatatgtatgttacctacgattag

SEQ ID NO: 205263 - DNA, 372 bp, Klebsiella oxytoca
atggattatgatgggttaatgattaaatacaagtaccgggcctcacctgtactgactgaagatgaacgggctaatcaattacatcagaatgaaaaaatagacctgggtgacaagaaagtcatggatgatgcggcggtgattcatctcagctcgggttatatggaggtggtggataagtggtatgcgataaaaggatttttaaccgtaccgtcactggcattacttgtgctttttgccgcaggtgtaatttatataccctgtaatatgtttgttcatttttttttttgcagcaggattatgacggatggttttataccatcggttttattgctctttttgtgtcaattctggcctctttgttctgttatttaa

SEQ ID NO: 205264 - DNA, 699 bp, Klebsiella oxytoca
atgaatttcactcagatgacaggcagtgtgttagcggcaatgctggtggtcagcggatgcggtgccaaagaaccaccgacgcaggtggtttaccgctttgacgaccatcgttatctggaactcaaaggctggaactgtgagggagaactctggtacacggatacgcaaagaggtattcattcacagctatatttccagttttttcggatattcaccaaaaaatttgtgcacccttcggaacgctatcttgctatcccaaattgggacccaggggctttcagagtatctaaggattacggaaaaacctggaccacggcgacatattctcccggagaaaacgaaccgaatggtgactcatcaccgccgagagacgacattctttccttcacagttgtgaatgaccagggctttttgcaaacgaagcaccggttatatatgtcatcaaagccgtttgacgatccgcgcattcttcccggtggtccggggattacctacactcttgatgacggaacggtacagagaattgatccgcaatatccaggctgggcctggggagtggtgtatttcaccaaagaaggattagatggcaaggttgtgcgtcatgaagctaactatcaggatcttcccgacgaagtaccggaagtgaaaaattaccagggctgggatcatatgcggtgcgatatggacgccggtaaataa

SEQ ID NO: 205265 - DNA, 414 bp, Klebsiella oxytoca
atgagcacaaataatacttttaataaaatcgatgaaagcaggcattaccgtaatggaagcgttagcgaaacgaatctctcgcacgatcagcttcgctcacattgcgtcagtgtcagacttaataatgaagagcttactcttctgaatacgaaacgtggccgtcatcgtaaaggagagtggcttcgcttagcttctctggataagcttcccttgtccattcctgccatcaacataaaagcatggagatcattagctgaaatatctcagaaactgaataagctcgtcatgcaccttgacaataaaagcaaaggaagctcactaacacagacagaaatctttgctgtgaagcgccagatttctgagcttcgcatgaatcttgtcagcgcagatctatggggagagaaaaatgaatga

SEQ ID NO: 205266 - DNA, 375 bp, Klebsiella oxytoca
atgaaaaaaatcatcatcgcagcattcgtttctctagctctggccggttgttcttcagtcggcaatcagtcattgaaaaacgaaacacaggaaagcgtgaagtcgaagattgtgaaaggtaaaaccacaaagggagatgtattggcctccttcggtgaacctgacagccgttccctcattgacggcgaagagaagtggtcttacacgatgtataacagtcagtcaaaggcaacatcttttatccctgtaattggattgttagctggcggtgctaacacacaatcaagctctctcaccatcatgtttaaaggcgagaaagtagattcctacgtttttaatgccgggaaaagcaatgtcaaaacaggcattttttaa

SEQ ID NO: 205267 - DNA, 414 bp, Klebsiella oxytoca
atgaataaaataaatataaatttgatggaaagatacctccttcttctggaccgatttgtcgataagctggttgaatctggtttctccgaaaaagaaatcacagagaagtcttacttgttttgcgctgggttttatataaagtataaaaatgagatagaaaagctgactttttctaacagagaagttgtgttgacttttttgttgttatcgtactatagctatattaataagttagaggatgatcttcttgataaagaacgtatgaagcgagtctgttcttctcttatcaatttcatagtcgagaatggcagtcgcacagaaagaatttatcttcatgaaaagaagatgtatgagccgaagccattaaaaaaggaactggataaaatggcaaaaaaaaggaagtatggattgtga

SEQ ID NO: 205268 - DNA, 2001 bp, Klebsiella oxytoca
atgaaagataacaatgtattatttttcagaacgaagcaaagaataaatgctgaattaaatttggaagagtttatcatattttgcaggttcgagcttactgctacagatagtgatttaagctgggaatccaactggtggaaaggtatcgctattttcaataaaataaatataactcataaaagagaaccagataaaaaagagctacttgatgatgaatttattgattttgctaaagcttatatgaaatatcagttagttttaacaaagtccagatggaagttatcaacttctatagcggttttaaaagttattgagcagactttattgatggtcaacaaaagtgcagatataaccagggttaacatttcagttctggatgaagcagcattaactattaagcattcctataagaagagaactgcctatgactatggacaggaacttcagaagcttgtcggctttctcagtgaaaacggtctcctggaagttggaactctctcatggctgagtccgattaaaccagaggaacagtcaaatcgcatatccagtaaagcagaggaagccaggataaaaaagctgccagataaaacagctttgaatgcaatggccgagatcttctccttaccagacgatgagcttagcgaacgagaccttttcactacttctgtgtttgctcttctgatgtgtgctccttcaaggatttctgaaattctggctctgtcatgtgattgtgaagtcaatgaaaccgactcgaaggggggccagaagtatggcctcaggttttattccatgaaggggtatggagcagatataaaatggataccagaagtaatggttcctgttgctaaaaaggcaatagaaaggttgaggaaaatttcaaaaaatgcccgtgagtttgcactgtgggtagaaaataacccagagaaattcttcagaagagatcactacccagacattgcagaagatgaagtattaaaaccgaatcagatatgtgaactgctgggttataatagtggcagtaaagaggggagaaaaaagtatctgtatcaggtaaatatttatgattgtaatgaaacatacagtatgaaatccctgtggaaaattattctgtcaaagttaccatcaggttttccatactattataaagatataaaatacagcgatacactttgcctgttgaacgttaatcagttagataaagttaagataacaataatgtatgaattacaaaagcccagcaaaaatatttttataccagacatttcattgactaacaaagagcatgtcaggttcgaaaatatatttaccaggcatggctatgttggcccggatgggaagcctttacacctgaggagtcatcaaccacgccatttgcttaataccattgcgcaacgaaacgggatgtctaacctggatatagccaaatggtctggccgtgcgaaggtttcccagaacaaagtttataaccacgtatctgaggatgaaatgcttcgtaaagccgaggcactggatatcagttccattggttcacaggccttcatgatcgattcagtggagccaaaccttcctgtttcggagggaatggtcaatctctgggaacatggtgcaattcatgctactgagttcggctactgtgtccatgactacatgatgagtccctgtgataaatttagggactgcatcaactgcaacgagcaggtttgcgtaaagggggatgaagagaagctccagcgactcgaagaaaggctcaatatgactgaagggcttctctccaaagcaaaagagtcgatgacggaagatgagcttggtgctgaccgctgggttaagcatcatgaatcgacgctatcaagattgagagaacttatctcaattctttccgacgatgcgatccccgatggttcacgaataaaactgggaggtgaaagttttactcaattggggcgagtactaaataaatttgaaaatatcgaaaacaaagggaatactaattatataaattaa

SEQ ID NO: 205269 - DNA, 1542 bp, Klebsiella oxytoca
atgagaactatatttaataaaactacagttaaagaatcgttaccagccagaacgaatggttattactttgccataacagatgatatatggattctcgatggaaaccaccagattaacacaaaagctgttactgatattttggataataaccttaaggatggttatctgaatactattgcttattttgcgagaaattttagtgcaagttttagttgcaacctacatggtatttttctcaagtttattagaagtgaaaaatgttcagttattaataaatctgccgtattgaattttaaaatgaaaatggatagaactggtggagatttaaggtgtttcaggttgtttatcgtaaaatggcactctctgggatacagtggtatagagcaggacgctatacaaataatgcagatatggagattcaacagaccaaatctgggggaaattgttaagagaagagaccccaaacaaggacctttaacagacatagaggtacagagttttaacgatagtgtgataagagcatatgagaaaaaagacatttctcttcttatgttaactatggctctgttagtcagtcataccgggcgcagacctgtacagcttctccagatgaaaatcagagatataatgatgatctcaaaagagaataatgacatttattatcttgttaatattccgagaattaagcagggtttagacttcagggaggagttcagaaccttcagaattaccaaagagctttataaacttgtctgtaaacaggctaacgaatcaataattctgttatctatttttatgggaagagaccttactgcggaagagattaaagatgttccttttttcatttctacggtcaaatttcgtttaatagataagagactaagtttgagtgattatttaaaaagtgacaagttacattattacagagggaaaataaataaagttttgaaaagtattattgggaaggaaaagatctactcagaacgaacaggagaacttttaaacataaatgcaaggagattccgttatacgcttggaacacgagcggcaaaagaaggttatggagaaataatcatcgcagagctacttgatcactcaactactgataatgtagggatctatgttcagaacaatgtggacaatgcttataaaatcgataaagcggtgggaaaggcccttgtaggtatctcggatgcttttaaagggcaagtcaagcgcagagaagatgtaggttatgagataacaccattagttaaaataaaaagtcatgatggtgaagatgccgggagttgtcagcaatgttcgtcatgttcagctaatgtacctatcccttgttatacctgtatgcatttcactccgtggctgaacggccctcatgaaaagatttatcagtacttaatcagcgaaagagagcgaatacataatataactcaggacagaaatgtaactgaatcacttgacaggatcatcattgctgtggggcaggttataaatcactgcaaagctatgagagacttagagcaggggagagaaaatagatga

SEQ ID NO: 205270 - DNA, 1200 bp, Klebsiella oxytoca
atgaaaaaaacaagtataaatacatttattatgagtagtggcgaaagattttgtttggttcttgataaagaaacgggtgtgcctctttttcacccaacgctatatataacaactcaggtcagaaaccaaagtgattccatatctacaatagaactcgttgccggtgctatatccttattctgcaattttctgtttgacagaaatattgatatagaggaacgactccgcacaggagagaaccttgctattcatgaaatagatgctctgagggattattgtgaaaggaaagtaaggttgagaaagtctttaccttatgacattcagaaagcgagacttgtaaacagtgcaacgagacacttcaggttaacccatatagcgagttatctgagttggttaggggagaggttgaatctaaaacagagtaatacaagtgagatggtagaaagaataaaacagagacgaccgaaaataaaaaggagatccagaaaatataagcaagaaagatctctcgatgaaaaacagatagcatcattacttgaaatcacaatgccgggatctacactgaatccatttaaaaagaatgttcaggttagaaacaggattattatacttattctctattcgctgggaatacgttctggtgaacttctaaatatccgtattactgatattaactttagagattcaagtctggcaattcgccgtcgagctgacgacaaatcagatcctcgaattaaacaacctttggtaaaaacacaggaaaggaaactttcattatctgctccattggtcaaagaactacacaattatattaccaatattcgcagacactttaaaaaatccagaaagcatgaatatctctttgtaacccataaatcaggtcccacccagggtatgcctttgtcatcaatggcatatcataaaataatagattcaatcagaaatgtggcacctgaaatcaacaagcttactggtcataaactcaggcacacctggaactatgaattctccaggaagttagatgcaatgccagatcctataagtgaagctgaacaggaagatatgcgttcttccctgatgggatggactcaaggttcaaagacagcgcagatatataacagaagattcattgagaataaggcccaggctgtggcattagcacttcaggaagacattaataaaaagggagatggaaaatga

SEQ ID NO: 205271 - DNA, 789 bp, Klebsiella oxytoca
atgaataacgaacaaaaagccgcaatagaacaaataattaatagctcgcttgatcaagcggaagcccattggagaaatggtggttataaaatagcccttgaaatgaggaaaagccatgctcaagatagccgagattttgctattaacgaatctctgatgcctggtcttccacctatttatgagggtcaaaccattattggtgagttcatagcattagtcgcagatatgcgagactcgaccaatcatttgttacaagcaatttcaccaaagaaagcggatatttcagacttacaacgagtattttacgaaacgtcagctttattgccatctttagcaaaagttgtttcattccatgatgggaaaactacagaatatttaggagatggtatcttggcattttttttagtcgatgaggaagacaaaactgatgctatgtatagggctcgcagggctgcaaatgatattatcggcgaattaagacctttacttaaccgtattatatttgaaagatatagattgccagaaattgatctaggggtgggaatggggatcagtaaagcaatagtttctttagttggacttccaaaggaaagacaagttaaagcatttggtgaatgtgtatttagagcaacgaaactatcttcaggaagaaacgaaatttgtgtggatactaatctacatgcccaatggccgacatctaaaaatggaacactccgtttcagattaaaatcatttggatcaggagacaaagccgtttctggatatttattagaaccgtctaaaaaatag

SEQ ID NO: 205272 - DNA, 252 bp, Klebsiella oxytoca
atgattgatgttaatttatataatgagtcagttactcagttgggtgttttattagatgccaaaaaagttgttgatcgaaaggataatggagcacttactgcatactatattctggaggttagatatccaagtggaatatcatatgaacattatttctatccagatgataaaatccttacactcatcggtaaggatatagtatttgatcgcattgactataatcaagaaaaaataataacacatatttattag

SEQ ID NO: 205273 - DNA, 228 bp, Klebsiella oxytoca
gtgacgggggagatcctcaacgcttacgccatgatatcgcgcggcaggcagtatgcaggaatggctggtgtaccgctcccgttgtccctgggtgatatcgagcgctatctgacctcacgttccattctgattgatcgtaccgagtttgacgcggcgatactggccctcgatgacgcctggcgggatgcgtgggcggagcagcatagtgagtccaataagaagaattaa

SEQ ID NO: 205274 - DNA, 537 bp, Klebsiella oxytoca
atgaatgcgaatttgcagggtcatcagagcaaagttgctgaccccctcgatagttttgtcgagccaaattttatagatttgttatgtggtctcgatcattgtgctgtgattgacttcttcttttacttttcaagattcgagcatgccctaaaaattaaaaggtttatttgtactgataaatcaggccaatatgttgtgggggttgattggcatgctttcatcagaacattacccaataattacccttctgggagcgagaaagttgacaacgccataagatatatatgtaactatcctgttaaacgacaaaaaacggatttgacgtgggtggctcggagtgctattaccccaccttgctttaaaatggcattgaatgaggttccaaaaatacggaacaacattttccatggaggaaaataccttcgacccaacaaagttagagatgaggcattgctaatcaactcaacgattctaattaaaacatgcttgcaaaatgacccagatctatatcaacagtttatttatactggtaagtaa

SEQ ID NO: 205275 - DNA, 462 bp, Klebsiella oxytoca
atggataagtttgaccgagaacttcagaagcacatactatcttgttgtattgatgcatacccagctcacaccacatggaatagctttgacccagaaataatacagatcgacgatgtcaaactctctgcaaacatcatttatctggctgaacatggcttgctcacaatcagagaacagagaagtgacgacccgtactcttttcttgatcatatgcgcgcgacctgcaaaggcgtcgattttatgcaaaacgatggtggcctctctgcaatcctcagcgttcagaccatcaaactccatcgagaagccgtcttagtcctcgaagaccttattgcaatgtccaacatgaacgacgagcagaaggaaaaggctaaatccacactcggagaactatcaacggaagcccttaaaactgttgttcaagctgcgactgccgccgggctctccaagttactcgggcaatga

SEQ ID NO: 205276 - DNA, 3237 bp, Klebsiella oxytoca
atggcagaacaagaatcacgactagcgatccgcctggacagctctggggctgaaaagcaagccgatagcctggcagtagccctggtaaaaatgacacgtgcaggtgaagaggctgaaagagccactgatgatctaggggatgcaacccaaaatctcaactctcgcctgagggatggcgcagccgcaacaggaagagcgacaaaattcactgaggagcagcgagaggcatttcgtaaactccgcgatcagattgatccagtgggtgctgccatagacagaatcggcaaaaaatattccgaactaaaaggatattttgaccgtggtcagattgatcttgaggagtatcgcattttagcgaaaaaccttgacgccgccactaacgagttaactggggttgctaaagcagaacgtgacgcagcaaaggccgctgatgagcaaaaagctgcattacagcgactggctgcgcagcttgaccctatatctgatggtctccgaaaaattgcagacaatcagaagttgctggacaacgcaaaatccaaaggaatgctatcaacggaacagtacgactctctttctggcaagttaaaacaaatgcgtggcgagcttgaactgactcaggcccaactcgaaaaaacggggatgtcagccagacaaaccgcttttgcaatgcgcatgatccccgctcagatgacggatatcgttgtcggcctctccactggtcaatctccattcatggtgctcatgcagcagggcggtcagcttaaggatatgttcggcggcattggaccagcgattaaaggtgttggcggctatgtggctggtctgattaatccttttactctggccgctactgtggtcggtgtccttggcctggcttattacaaaggctctcaggagcaggaagagttttataaatccctcgttctaactggtaatcaggtaggcaaaacatccgggcaactggcagatatagctgcccgtgccggcattgcggcggattcaactactggcaaagcagcatcaacacttaaccagttggtatcctccggtaaagtggctggtgactctctggagcgagtgacaaccgctatcgttaaaaccagtgacgccacaggtattgccaccgataagctggttggtgatttcaacgatatcgccgcagaccccgtagcagccattaccaaactgaatgaccagtatcattttttgacgttggcaacctacaaccagattaaagctcttcaggatgaggggaatcagcaggaggctgcgcgagtagctagtgaatcttatctcgcttcgctgattcagcgctccagtgatattaaagagaacttgggtttacttgagtccgcatgggccgctcttggcagaggggcgaaaagcgcatgggacgcgatgtttgacgttgggcgtgagaaatcacttgaacaacttttagctgatgctcagaagagagtcaaaaactctactgctggttatgaacgggacatttgggggaatgtcacagggctgtcatcccagtcaagcgccgaaattaatttcctgcaaagggccataaatttgcagggagacttaaatggagctcaggccgcagggcaaaaacagcaggatatggcaatcaagtctcaggatgagtttaataagttggttgaagcgggacgatcctctgcagaaaaaagggtaaaagttgaagctcaacttaaccgacttattgctcagaacaaaaaggatgctgaatttggtgttgcaaatttatggacctctgaagatattgctaaggcacgcgctggcatcgagaaacaatttaaagacccaaaaacgcccagatccccaaaaggaaaagcatacatagaggacgctgccacccgactactcgatcaaatcaatcagcagactgctgctatgcagtctcaactggaatccagtgataggctgaatagctctacacaggctcgcgttaaatttgaacagcagattgctgatctcaagtctaaaacgcagcttaccgccgaccagaagtcgattcttgcccgttctgattcaatcttgcaggcctacaagcagcaggaggcgttgcagaactccgttaagactttggacgactaccggaaaatgcaggagcaggtcactccgaaggagctacggcaaaatgaggcgctgcaaaaacgcctcgaaatcctgcaaaagatggttgaactcaaaaaactatcaccagaggacgccggaaagcaggcaactgacctgattagcaaatctatactgccggattctgtcatatcaggggttaacaaagccggtgggacactcacttcaagtgcaaccaataacgacctgacagggcaagggcttaacatgatcgggctgcaaatcgatccgcagctcgaaatcattgagaagctaaaaattgcccagactgattatgcggcctggttgaatcagcaacagcaggcgataacgcagagcacagtcctgaacgagcagcagaagcagcaacaactcctggccttgcagcaacagggccagcagaatcaggaggcgttaagcacggctgtctacgttgcgcagatgcagtccgctcaaaactccttctccggcatcaccgattcgatggggactatgtttggtgagcagtccgcgatgtataaagccgcttttgtgacgcaaaaggcattcgctatcgctcaggcagccctgcagcttcctatggcgatggggcaggcgatggctggcttgccgttcccggctaaccttgcagctgtcgctcaggttatcgggctcatggcctccattacttccagcatcaccagtgccgctgctgttggcttcgcctctggcggttataccggccccggcggtaagtatcagcccgcgggtattgttcacaaaggtgaatatgtctttgaccaggcatcaacgaaccgaatcggcgtgtctcagcttgaggcgcttcggaatggtaaaccgctcgatgcaacgctcagcaaaccggggttcgggaccggggtgcagaacgtgaatagtgataacagcaggcgaactacagttcacgcgccgattagccaggagtttaaccttcaaggtgttacacctgagcagcttagcgctacgctcaaccaaaacaacaggcagctttccaggcagctaaaaggggaattaaccaaggaggttatgattccgcaaggggcgtttggaaatgctttaaagagtcgctatgtgaggggatataaggaataa

SEQ ID NO: 205277 - DNA, 549 bp, Klebsiella oxytoca
atggtgaagaaaagagcgagtggcgggtgtagtgcggataaggcgctgcagcgccgccggggcattcaaccactctgttctctgcaaagggtattctgcgcactgttcccgggggcggcgcttaacgcgccttgcccgggctataggttcaccgccgtccgcgatccggtagcccgggcagatgcgcagcatcgcctccggggaattcagccgctctgttctctgcaaggggtattctgcgcgctgctcccgggggcggcgcttaacgcgccttgcccgggctacaggttcatcgccgtctgcagtgtggtagcccggacagatgcgcagcatcgcctccggggaattcagccgctctgttctctgcaaggggtaatctgcgcgatgctcccggggggcggcgctcaacgcgccttgcccgggctacaggttcatcgccgtctgcagtgcggtagcccggacagatgcacagcatcacctccggggaattcaaccactctgttctctgcaaggggtattctgcgcacttttcccgggggcggcgcttaa

SEQ ID NO: 205278 - DNA, 2124 bp, Klebsiella oxytoca
atgggaaaatatcataatgaccaaccaatacatgggggggcagaagatcctgacctacttaatagacttgattttgcgaaccatctagcaaatatacttctattaaatcctcaagatgaatgtctgactgtatcattagagggagagtggggatatggaaaaacatcagtaataaacttagtaaaatgtgctttaaatgaaaaagaatccttccctactattattgaatataatccttggcttgcaggcaaaccagaatcacttattcaggatttcttacttcaattttcttcacagctcaatataaaagataaatcagaaatagcattaaatgctgcaaaagaaattattgcatactctagtttgtttaatattgcaaagcttgttcctggtgcagaaccatgggcatcaataacagagaaacttctatcggatgttggaaatactactaaggaaattgtcgaattaaaaaaaattgatcttttagatagaaaaaaaagagttgctgattcaataagaaaattaaaaagcccaataatagtaattattgacgacatagacaggctaactccatctgaaacctttcaggtgttacgcttagtgaaagctgtggcagatttttccggcacctcatttctgttagcatttgactctaactatctcgtttcggtattagacaaaaatggtattgttaacgcctcagagtacattaacaagatagtacaactgagagttcctcttccagttatctctgaaagagatatgaacgagcttgcaaatatagaattggagagtctaagcgagaggagtttaactgatcgatttgaagatgatcaagatagattaaactggatttaccatcgtcacttcaaacatcttattaggagcccaagggaattaaagaggttttttaaccacttgagatttatgttagaacaagtagaaggacaggtttgtttctctgatcttttcgcattatcaatagtttccactaaatccaatcaaatatacgaacatataaaatcaacaccagaagcctatataggaaaaagattttctaatgatggaatgatgctaggcaagccattggatataacaaaatcatatgaagatgaacggacaggtcttctaacaaaattcggtacaagagaaagtgaactattaaaaaaacttcttggatatattttccctcttattaattcaggcgggtattccccttatagtgcgtctgacgcagacgctgctggcagagtgtctgtacctcaaagactacatgtagcctttcattataaaacacctaccggatacctttccgaccaagatattcttcatttcatctcaggcgaaattgatagacaagaatttcttagcaatgtaattacggaagatgctgacgatagattctttgaaatgatgatgaattattcacaggaatgtaagggtaaaagttttgaaatattaacatgcatttacgatacatttctattttctgagaaactaataaaatcccaattgagtaattataattttctatcccgaaatctatatcagaagatgaattggctcactaacaaactcattagtgagaacgatgaaaaatatgagttaatagaaagacttataagtagaaaagaaagcgcccctttagctgcagatgttctatatgaggttcgaaaacaaattcgtaaagaacaccatgattctaaatggattgatgaagaagaattatctacgttagagaatatctttcagaacacagccatgcaaacgctatttaataaaacccaccttaagaaccatcttgagtcacatatattttacgaattaaaaagatcatcaaaagcaaaagcatctgatttaataaattctgttttaaaaagtgagaatggcatatttagactggcagagataattggaaatacaggaagtgattcaacgaatggtgcctactcccactttagtgaggaaaattatggtgatatggtggactttgaaagcctaagaaaagaaatcaaagcagtcgacctttctagccaaccattccatatccaagcagctttcaaaagtattattgatggagagaagtattatttgagagatggaacattatgtgaatcgtggtaa

SEQ ID NO: 205279 - DNA, 258 bp, Klebsiella oxytoca
atgattgattacgccaagattcaggctctggcagcgcggaggatgagcgaacagcagattgccgatgtgcttgatatggatcttgaggaactcaggaaagaccgtgaggcgattgctcttttcagaaaggaaatcaggaaaggccgagctaaaggagaagctgaattgcgaggtgctttataccggaaagcgaagaacggtgattcaggcgcatataacgaactggttaagcgagagaaacaacaggacggtgactga

SEQ ID NO: 205280 - DNA, 1401 bp, Klebsiella oxytoca
atgctgacgcttaattttgatattaccagcctcaaaggggctgaatataacccgcgccgcatagagggtgatgaccttaataaactggcagagagtatctgtgaactaggtcttgtgaagccgttaattgtacgcggcaatttgctggtggcaggtcaccagcggacaaaggcgttgagacttcttggagtatctaaagcagcagtgtttgagctgtcaaaggatacgacagtttacgatgagatccggtttaaccagctccacaacggaacggatatggattccggagatgaaaactgtgtaattagcgggcttgatggccagagtgggtttgtccaggtaacggcagaccggatcacgggtaatttccgttctcgcctggcatacgtcagacgtgaaatcagcgacatgatccttaagtacggatcatggggtggctgtgttgctactgagtcaggtgaggtgattcactgtgcgcaatatgcgctggcgtgcaagtatctggcggttccgctaactgtttacgtcatccctgattcaatgcgagaaaaataccggctgtatctggatagaaattacggtgtattcgattacgaacatctggagaaaaagacatttgtccagacttacgctcagatgatgcgtctgcggacatctggtgtaaaaagtctgaaatcccggctgtatgaaaacctcacaattccatggttgcttaaacaggaaaatggcaagcaactgagggggatcgatttcggttccggccagggagattatgcacgtttactcaggaagcagggatataaccttctcgatgtggaattgttccggcgccggggagcagggaacgtgatagatgcaagtgcagttcatcggatgattactgcaatgtgcgaatcagtgaaaaatgatgggccatttgattacgttatttgcgatagcgtacttaacagcgttgactgcctgcaggcagagcattctgttctgacctttatcgcggcattgtgtaagcctgggggagcgttgttcttttctggacgtcgcctgaagttcattcaggacatgatgcgatgtatgcaagcggcgaccagggcagggcagatttatttttttgatgagaataatttttctgcaaagtacagaaagggcaactggttctaccaaaaattccatagtgacgatgagataaaaaccatcggcgaaaaatacggactcaggatcgattctcacattcgttctgactcatcatttcaagtctacgcaacgccattgcgaaaacagcccgttgaagaactgacaaaggcgatcagctttgaattcgagctgttatttcctaatggggaaccaattggacgctctgcagatgtagtgcaggcattcaaaacagggggccgagatgattga

SEQ ID NO: 205281 - DNA, 552 bp, Klebsiella oxytoca
gtgatccaccacactgatgagcaggtaaagcaaattgtttccagcatggaggagtttggctggaccaacccaatattaattgacgaaaacgacgagattattgcaggacatgggcgtgtcctcgctgctgaggttttgcaatatgacgtagtacctgcaatcactctcaccgggttaagtgaggcgcaaaagcgagcttatcgcatagctgacaataaacttcctcaaaacgcggtttgggatgagaagttattgcgggctgaagtaaacgatctatttcaggagggttttgacctctcactgctcgcgttcgacgaatctgaactagatgatcttctttctgagaatgagatttcgattgatttcgcaaaggacgaaggtcacaccggcgctgatgacatgaactggcttgtctttagtcgcaaacgtgtacctatgactgacgatgaatcacaaagtctgcttttggcttttgacggctttgtcaaagagtccggttcacatttcggtttcgttgcacacctgctgggggatcataatgctgacgcttaa

SEQ ID NO: 205282 - DNA, 639 bp, Klebsiella oxytoca
atgccatatttaagcctaattttgatatgttgccaaaactgcaaaagcccgcaaattcgcgggttttattatatcgaagaatcggtgttatttatggagcaattcgaagctgatcttaatgcgctttttgatggtgggaactatattgaacaccacactcatgtggccatacttcgttttaccacattgttttcattttttgaggcaaagatttgcgattttgaaggaaagcagaagctctctgaagagtatgcaataaaattattgagtcatggatttgatgattttgaaagcattgagcgagtttatagctattgccttaatcgctaccttcacgagaacgaagtgacagatcatttcttatcactatgcggttgtgagcgatggaggcaaaggcctgcaacttctgccggacttcaaacagcaataacttcgattctaaaactaacggaaccacaaaccgatcaaaaattgatggtatgtctctttttttgcttccgactccggaacaatttgttccatgggccaaagtggaatcataacattaattaccaggttggtaaccttcaccaagcatcagatctaatctactccattttgcgtgccacaaaaggcaccctttggaacttgatagagtga

SEQ ID NO: 205283 - DNA, 2310 bp, Klebsiella oxytoca
atgtctgacttaaaaacttatatctgtgcagcaatacccgatgaaaaatctattgaagaaagtggagcacgaaaagttgcccgcgcactggacgctaaagacgaacgccatgctcgggcaaaatgctcattaagttttgttgaagattatccaggcgcgcaggatgccgcttataaattcctcatttgcgaagcttcaccagagatcccctgcccatctattgatggctgggatgaaagcttcatgtacgaatgtgattgggatgaagaagtcggacaccctgtgattaaagctgaattaaaagagccagtagatattaatactttatcggctgataccaagattgcagcattagtaatgtatggccatgatgagttaaccaaggatctcatccctgctgctcgcacgcttctacaagaagaaacgccttcatttgaggggcatattgtagaagcaatcactaagacaccagaaatttccgccatgcactcagagcgtattttaaacgcaattggatgggttatggctaaatgcgcccctactgctaaatggcctgaaattaaagccgagttagtgaactggaagcagcgccttgaaggtgagcgcaaacaaggtggcccctcaaaatcagttgccagtatcgtacgagataaggcggcaaataacgcattagacatgaatcctgcaaatgatgctggtgaacgtcctaagcggacgtacaagcatacatatcaaactctggatcaggaactcgctaacgcgttttggccgggtgacgttaatcctggcagcgttgacggtgagatttatcgttgggctaaaaaggaaattatcgacaaggacagggacgactggaagcgattctccgcaacattgcgcaccattaaacgtgtgctcgaatatgacctgctgaccatccgtgatctggttcagatgcgccctgacgatattcacaaagacgcggtgcatttgaatgattacataaatgcgtttctgttatctcacggggtatttgaagatgaaaccaaacaggacacgtcgtacgcagatagctctctggactctacagcgtcaacgactggcacagtggaaccggaacagcacgacgatgactcaacagcggggacgctggaaactgcgccacatgtagagcgtactggcccgttctattacaaggaagtgaacggcgatcgctggggacgagtaaataaatacgaaagattggttgagatcctcagcgaagatggttttgtcgaaatcagcaaagaagaacaccagcaacttaaaaacggggtaaaacctgaaccagaaaataatactccatcatctgaagaagtggacaagcaacttgcagcacaacgtggcgagtatgtagaaggaatcagcgacaaggatgatccccgctgggttgaaggcaaaccgaaagaaactccagcaccgttaatcgtcacagaaccagataccagcttcattgttcgcgccgatgaattagagaaagagcttggtgacagcgagaatatcaaactttggaaatcagttatgaggaccaatccaaagtatacaagcccactcgaaggtgctggatttgaaggtacaagcataaatggcgactacatgaccatgagggccacagaagtatttggcctaaaaggtattggatggggagtagatattgttgacgatactatgctaccaggtgcgcctttggctgaaaacatttatgaaaataacaaatttgtaggtaggcgttttttaaaagatatggatggtaattttataacttctttgcaccactccattactattaagctctggtacattcgcgatggtgtaagaggcgaaataatatcatatggcgctactgactatctctatatgacatccagcaataaaattaaagttgatggtgaagctaaaaagaaatcattgactgatgcaacaaaaaaagcactttccggccttggtttttctgctgatatctggcttgggctttatgatgacgctgtttataaagcagaaagtaaacttgagtttgaaattaaagacgccagtgataaagccgatgatactgcgcgtattcgtgaagaactggacgagcgttttaaaggcaacgttgaaaccatgcgcaaagctgttactcagaatgaagtatctaaaattgccagtagcctgacacgcacaattgctgtgcatttaaaatctgcaaaagatactgctgataatgaatatgcaaaatatttagaaggccgcttgcgccgtcttgaagaagttaaggctgaatgtcttaaaagtctggaggaaaaagcatga

SEQ ID NO: 205284 - DNA, 297 bp, Klebsiella oxytoca
atgatggatgatatctctcgcattgattcaatgattaaacttttacgttctttgaaagcagatataaaacgactcaaaaaacttagttctatggattaccgcgatatgacaccaaaacagtgtcagaaacgtaacgcggatgcagactggataggaatggaaaatatcaggcgaaagcatgagcttcatgctctttccgttgaattgggttttgctgagcgtcgtgagaattataaccctatcgaattaaccgatggctggcacaggtacgcatatacgccgcgcacaccagaatag

SEQ ID NO: 205285 - DNA, 258 bp, Klebsiella oxytoca
atgaataagatagtgaactctttaactcacgcttataaaacaaggctggcgatagcagaacaaaacgggacaaaacttattgcgtataactgccccgcttgccttgagaaattaaaaacaatacagccacaacctggcgaatattgggacactttctctacctgccctttctgtcaggcgctgatatttaaaataaccaaagtcgataaagtagaggttgaactcattactaaaattggttcagagaaaggtggttag

SEQ ID NO: 205286 - DNA, 639 bp, Klebsiella oxytoca
gtgattctgactctgacagcgattctgactctgacagcgactcggattctgacagtgactcggattccgacagcgattcggattcggacagtgactcggattcggacagcgattcggattctgacagcgactccgattccgacagcgattccgactctgacagcgactcggattcggacagcgattcggattctgacagcgactcggactctgacagtgattctgactctgacagcgattccgattctgacagtgactcggattctgacagtgactcggattctgacagcgattcggactctgacagcgattccgattcggacagcgattctgactctgacagcgactcggactctgacagcgattctgactccgacagcgactctgactccgacagcgactcggattcggacagtgattcggactccgacagcgattctgactctgacagcgattccgactctgacagtgactcggattcggacagcgactcggactctgacagtgattcggattccgacagtgattcggattccgacagcgattcggattctgacagcgattcggactctgacagcgatattgaggccaaccccgatagcaacagcccggacgttgtcgcgctggaaggtaacctga

SEQ ID NO: 205287 - DNA, 252 bp, Klebsiella oxytoca
atgtttgtttgtccatactgcggcgccaatgcccgcacccgtaccagccgccggttaagtgagttcactatccggcaatatcaccagtgtcagaaccttgaatgcagcgagtcattcacaacgctgaacaccgtagagcgcaaagtatcaaagcgctcggccgtcgaaaacccgctgccgcccggattcatcccacaggatgcttttcccgcatcacattatggaagggatcagcttaatcttgccctttaa

SEQ ID NO: 205288 - DNA, 396 bp, Klebsiella oxytoca
atgattgatcacaccggattcagcgtcacaaatcttgaagacagtaaactgttttacacgagtgttcttgctactcttggtcatattatccggcttgaattcccaggtaaggcggtaggttttggtcccgcccgacccaatgaaggagcagatcccggtggggggttttggttaacagtgggcactcccttcacgccccgaatgcatcttgccttcagtgcaaaaaacaaacaggaagtggatgcattccactgcgccgctctccgtgcgggtggtaaagataatggcgctccgggatacagaccccattatcacctcggatattacgcggcgtttatccttgatcctgatgggtacaatattgaggcggtttaccacgagtgcgatagtgtctaa

SEQ ID NO: 205289 - DNA, 1143 bp, Klebsiella oxytoca
atggctgaagaagcagggcgcttaacattttttgatgttacaaaagctggattttacaatctcaaagatgaagtgcaaaaaagcgctgatatagtaaatatattggactccctaactaattgggtttgctctctctcgtttgaagagactctgccattagtagacgattctagactaagaaaaaaggtatattgtcgtggtgttcataaagatgaaaaaacaggcgattatttctttgttctctggaaatctgaactagatggaaatggtaatcttcagggtgtagcacctaattcaaaagttaattcatcatcaaatgatgttatgatgttgtctgatgacatgactgatggagtaaaatatatttggggtaagccatgctattactggtatatccctgagttaaataaatttgctgctattcgctttccacattcaaattctgatacatatctttttggtcgttatattagagattatgctaatttcagaatgccgtatgccgggcgaaaaatatcagaagtatgtagaacaaatccgggtggaaaagatatcaaattcagcactgttacatttgaaagcgatgacggtcattcacgtgtaagatttttattcgaagcgcaacagtatatgaaaaaagcagggcgcgtaaatattaagaaaatacgtgattctattacgcatattgtaataagagatactattggggctaaagttcctgataaaagagcttggtgggtaaaggcttttgataagttccctgtactacgcgatgaagttccaaaaacacataaggaacgacaaattgagttaattattgaagagaaaccaaccgaaaaacaaattgatgaacttttcgatttttatgaagaggattatgcctttggatcttcttggaataatattggtttcaaacaggatggtaaaaatgggcagactaagtggttagatgaatacgtaatgagagattacttaaataccacttatactgttgatgataacgcgcatatctcagctaaaaagttagctgaactaataaatgccaaacgaaacgaacttgtaagtggtctcgatggtgttcaagtggataaaatacaagtgatgtcttcagcaagtaatgatggagtcgctttaggaggatga

SEQ ID NO: 205290 - DNA, 2856 bp, Klebsiella oxytoca
atgccgataactgagtaccatgcaaaatattttgctcacgaactgagtaaacgaggttcacccacttctatagaaaaactggcgggaacgttgatggatgcaagggtcgatctcaaccctcatcaagtagaggcagcgctatttgcttttaaatcaccgttgtccaatggtgcgattttggctgatgaggtaggtctagggaagaccattgaggcaggtcttgttctgtcgcaaaagtgggcagaaggcaagaagcgcatgttaatagtcgtacccgctagcttgcgcaagcaatggagccaagaactggcagagaagttctttcttccatcacaaattttggaagcaaaatcattcaatgcagccatcaaagctggcaacttaaacccgttcgaagcaaacgaaattctaatttgttcttacccttttgcagccagacatgcagaaaagctcatgttggtgcgctgggacttggtagttctcgatgaagcccaccgcctgcgcaatgtctacaagacacagaataagactgcgggagccttgcgcacggcattgaccaatgtgcccaaagtattattgacagccaccccgttacaaaacagcctgatggagctttatggccttgttagcttcatcgatgaatatgcttttggtgatgaaaaatccttccgcagccaatattctcggatgacgtctccggaacaattcggtgagctgaaaggtcgattacagccattttgtcaccgcactttgcgtcgccaagtgttggaatacgtcaagtacacaaaccggcaacccatcacgcaagaattctggcccagtgacgacgagcaagccctgtatgatatggtctcagattatttacagcgtccttccctttttgcactgccaaacgctcagcgaaaactgatgacgctagtgcttcgcaagctgcttgcatcttcgacctttgcaattgcaggagcactggattcgttagcgaataagttacaacgccaattgaaagacaatgagcaattgatcaatcgactcgaagggctggaagcagattttgaaacgctagaagaatatgaagacgagctagagatagaagaggagcaacagcctctgtctgccgacgacattactgcgattgaagaagaaatcgcagatctggccgcatttcgtgagctagccgtttctatatccgagaacgcaaaaggaatggcattaattgacggcctaaaggccgggtttgataaagcaaccgacctcggtgccgagcaaaaagccattatttttacagagtctcgccgcacacaagattacttagttcgattgctcagcgaaaacggatacgccgataagctggtgttgtttaacggttctaataccgatgagcaatcaaaggcaatctataaggcgtggatagaacggaatcaaggttcagacaagataacaggttctcgaacagccgatatgagagccgcattggtcgagcactttcgcaataccgcgcaaatcatgattgccactgaagccgcagcagaaggtattaacttacagttctgctcattgctggtgaactacgatatgccgtggaatccacagcgaattgaacagcgaattggccgttgtcaccggtatggacaaaaacatgatgtggtggtgattaacttcctcaacaaagccaatgcagccgatcaacgtgtttacgaactactcgatgagaaatttaatttatttagcggtgtctttggcgctagcgacgatatattgggggccattgagtccgggatagatttcgaacagcgcattgttgaaatttatcaaacctgccgcgagccagagcagatcgccttccaattcgaagagttgcgcaaagaactggatgagcagatcaaccaagcgatggacgatacaagacaaaaactgctggaaaactttgatgctgaggtacatgacaagctcaaagttaaccttcaagagagtaaggcttatctcgataaatacagccaatggctatgggaaataactcgctttgtacttgccgaacatgcagatttcagtctggcagagcaaagtaaaaattatcgatttgaattaacccaacttccaaatggcgcgaatccagcgattccccttggaatttatgagattggcaaagatattgaagaggcccacgtctatcgattaggtcaccctcttgccaagcaggtagttcaacaactcactgaagtaaataccccagcggcgtctttgcaattcgacctaacaaatcatccacagcaagtaaacgccttacaagcaatggttggacagactggcatactgtctttacacaagctgactattactggcgcagataccgaagagcatttggtctttgtcggcgtcaccgatgaaggtgaaatgctgaatgcagataaaatgcgcaggttgtttagtctcaatgcaattaatttggggccagcagaaattgccgatacgtctgaacaatacgaagcgcaaaaacaacagattctaggggatgttgaagatcgttatgctgcttatttcgaacaagagatggaaaaactcgaccactgggctgacgataagcgcaagggtttgaaattcaacctaaaagacttggacacacagataaaagatttgaagcggcagatcaggggttcaaaaaattttccagaaaagctggcgtttcagcgcaaagcgcaaaagctggaaaaacagcgggacgaagcgtggcgagagtacgatgaacaagctcgtgaggttgaacagaaaaaagatagcctgctcgacattatcgagcagaagctgcaaatgaacacaactgaacaacatgtgttcagtataagatggagcttgatctaa

SEQ ID NO: 205291 - DNA, 2115 bp, Klebsiella oxytoca
atgaaagccaccgaagcgaaactattagaatttcttaaaaaatcgcctcaatttgttattccaatttatcagcgcacttactcttggaaagaaaaagagtgccaacaattgtgggatgacatcattcgcagcggcaaggatgatgatattaatgcccattttatgggatctgttgtctatgttgaaaaaggtctgtattccgtctcatcacaaacaccgcttttggtgattgacggtcagcaacgcttaacaacaataacccttttaattgctgcattaaccgaagtcattggtgatcaagaaccattggaagatttcagccaagcaaaattaaaaggctattacttaactaacccacttgaaagcggcgagaaattttacaagctggtattgtcacaaaccgacgatctgtcgttaaaagccatcatcaaagggctggagcagccgaacgagagatcaatacgagtagttgaaaattttgagttttttaaatcaaaactgcaaaagatgggcgatttaaaaccggtatgcagcggcttagctaaattgatggtggtcgatatttcattaaatcgcgaacaagataaccctcagctcatttttgagagcatgaactcaacgggcaaagaactgagccaagcagatctgatccgtaactacatactgatgggcctagagccagagcgtcagacacacctgtatgaacaatactggcggccaatggagttagcgtttggacaacaggcatatagtgactactttgacagctttatgcgtcacttccttaccgttaaaacacgtgagatccccaaaattggcgatgtgtatgacgtgtttaaggaatattcaagacgaccagtagttgcaagcaaaggtgtagatgaactagttaaagaaatcagaaactatgcggtgtatttctgcgctttcgccttaggcaaagagaaggacgaacagttaaagctggcatttaaagacttacgagaactgaaagttgatgtggcttatccacttttgcttgagttgtattcagactactcgtctgaactcttgagccgcagtgaatttttgtctgctgtgcgtataatcgaaagctatgttttcagacgcgccatttgcgagatcccaaccaactccatgaacaaaacctttgctcggatggggataggccttaaaaaggatcgctacctcgaaagcatacaagcttccttcctgttattaccatcctaccgccgttttccaaacgatgaggagttccataggaaaattcaaaccaaagatatctacaacttccgaaacaaaagctactggttacggcggatggaaaactatggccgtaaagaacgcgtgttggtcgatgattacaccattgagcacatcatgccgcaggcagacaataacccagaaaaattgccacaggtgtggcgagcagagctaggcgatgactggcaacgcatttgggagacttaccgtcataccctcggaaacttaaccttaacggggtacaattcggaatacagcaacagtgcgtttatcgccaagtgtgaacatgaatttggtttcaaattcagccctctcaagatgaacgaggggattgcggtcgagcctatatggaacgaagatgcaataacaaaacgcgctaacagactggccgacaaggcaactaaggtatgggtagatgtcgcattacccaatgatattatcgacgcctacagaccaacaaatgaccaaacaagtgaatacagtttggcagatcatccacatttgatgacggataaaatggctgaaatttatcaggttttccgtaaggcggtgctggatctggacccatgcgtaacagaagaagtgaaaaaactctatgtcgcctttaaagccgagaccaattttgtcgatgtggtgccacaggcgaaacgcctacgtttatcgttgaatatgccgtttgccgagatagatgacccccgtggtctctgtaaagatgttaccaatctagggcgttggggtaacggtgatgttgaggtaggcctcgataatctagacgatctatctcatgtcatggctttggttactcaagcattcgaacgccaaatgggatctgacgtgagcctaatagattaa

SEQ ID NO: 205292 - DNA, 2040 bp, Klebsiella oxytoca
atgacacataagcctgaagtgatgagtggagaaagtctagatattgccgctcagcgtcgtgatgaactaaaacaactcttccccggtgtgtttaccgaaacgagagacgctgacggcaatgtcgtgtcatccattgactttgaacgccttaaggccgaattagggaccttctctgatatctacgagggaagacgcgagcgttatggtatggaatggccgggaaagcgcgactgcatgaaagtgattcaggagccaagccgagcaaccttaaagccctgctcggacgagtctgtggattgggataccaccaagaacctgtttatcgaaggtgacaaccttgaagtactaaagctgttgcaaaagagctattacggcaaggtgaaaatgatctatatcgacccaccatacaataccgggaatgaatttatctaccctgataattatcaggaaaccttagatacctatttagcttatgctggcctgctagatgatgaagggaaaaagtttacaactaatactacttctgaagggcgcttccactcaaagtggatgaacatgatttacccgcgtttatttttagcaagaaacttactgcaagacgatggggtgatatgtatttctattaacgacagggaactatataaccttaagcaacttactgatcaaatatttggtgaagaaaactttatatccacattagtttgggaaaaaggcagaaaaaatgatgccaaaagagtttccgttgggcatgaatatatggttttgtatgctaaaaatttagcatttattgaagaaataactcaaccatggcgtgagcccaaagaaggtattcaagagataattaacgtatacaataaagcaaaaagcatttatttcgaacaatttgaaaaaataagtgaagagttgatctctttttataaatccttggatgcaaaccatccatcgaagaaatatgcacgaagcaggtttgtagatcagcgtggaatttggcgagataataatatttcttggccaggcggtggtggtccaaaatatgatttactccacccaatcacaggacagccgtgtaaagtacctgatgatggttggaggtttgtagaatcaaccatgaagcaaaaaattcatgaaggttatattcacttcagagatgaccattcacagcctccaatactaaagtcatatttatatatcgatcctgagtcagctacttcggatgaggatgctggtggtaaaaagcaagttatgggtagtgttttctaccgacattctcagccgtctaacgacgtaattaaggatctcttcggcgaaaaagtatttgaaaacccgaaagatcacgaaatactcgcaaggctttttgactactgtactagtaatgatgacattatattagatttctttgcaggttctggctcttctgctcatgctgtattcgaacttaactggaaaaatagatcaaatcgaaaatttattgctgttcaacttccagagccaacacctgatccttcgttagctcgtgcacaggggttatttacaatttctgatttatcaaaagctaggattcgcaaagcatctgagaaaataaaaaatgaaggtaatgaatcaaaaggaatcgacttaggtttcaaagtttttaaattggcaccatctacattcatgcaatggattccttgtaatgtttcaaatgagtctgaattgcaacaagctttagagctatatgttgataattccaaagatagtagtagtgaagatacgttatttgaattactgctgaaagctgggtttcaattagacacagtaattgaagtaataaacataagcggtaagacagtcttttcgattgcaaataatgcattgcttatttgtctggaagatcagcttacagatgaactaatcgaagaaataatagccctagaaccaatgcaatttatctgtttggataaaggtttccaaggcaatgaccagctaaaagccaatgctgctcaggcgtttaaagcccgctcgcaaaacagcgatgccgaaatggttttcaaagttgtttaa

SEQ ID NO: 205293 - DNA, 3018 bp, Klebsiella oxytoca
atgtcgaatatcaataaagggctaaaactaaaatttaattccaccctcgactatcagaaacatgctgttcaggcggtagtggatttatttgaagagcaacctttagcgcaggatgcctttactgtatcggtagggcaacaaactggaggcagtcagctttcattggacggtgacggatttagcggtatcgttgccgtttcaaaccaattattgctcactcaggaacatctgctcagaaacctgcgtaaagtacaggaaactaacaatgttgttctcgctgatgaactgctcagtacctcgtttgacttagagctggaagaggaaaaaggcacttataagcttaaaaagcaggtgccgcacttctctgttgagatggaaaccggcacgggtaaaacttacgtttacctgcgtaccttatttgaactcaataaaacctatgggtttaccaagttcatcatcgtagtgccgagtgtgccgattcgcgaaggggtgctgaaaagcattcatattatgcgagagcactttcgagagctttacgaccatgttccgttcgaccattttgtctatgacccttccaaactaggacaagtacgccagtttggttcgagcaacaaaatccagatcatggtgatcaatattcaggcttttgagaaagagcaaaatattatcaaccgtgagcaagacaagctgagtggcaacaaacccatcgactttattcgtgcagctaatccgatagtcataatcgacgaacctcagtcggttgaaggcgatactagaaaagaccaaaccaagcgttctgaagccctacacaacctgaatccgctttgtaccttgcgttattctgcaacgcacaagaacccttacaacttgctgtatagcttggggccgatagaagcctatgatcttaagttggtgaaacgcattgaagtcgccagcatggttgaagagcaaagtttcaacaatacattcgtcgctttgaaagaagtggataacaaaaacggcattaaggctaagctgcaaattaatgtgcaggataaaaccggaccaaagaaaaagctggttaccgttaagcaaggagccgatttatacacttcgtcgaaagaacgacaggaatatcaacatgggtggattgtcgccaacattagttgtgagccggggatcgaacatgttgagttcgcaaatggtcaagtattacgattaggtgagcaactcggtggcttagacggtgagctgatgcgagcgcagatttatgaaaccgtagagcagcacctaaagaaagaacttgcagttaaaggcaaaggcatcaaagtactttctctgttttttatcgataaagtatccaactaccgtgaatacaatgacgacggcaccaccagtttaggcaagttggggctttggtttgaagaagcatacaacgaactaacacagaaacccttgtatcgtggactgttaaattttcctgtagcagaggttcacaacggctatttttcgcaagacaaaaaaggcatagctaaggacaccacgggcaagactaaagacgatgaagacacctattcattgatcatgcgagataaggaacgcttgctatctcttgacgagcctctgcgttttatcttctcccacacagctttacgcgaaggttgggataaccccaatgtgttccaaatttgtacgttaaacgaaaccaaaagcactgatagaaaacgtcaggaaattggccgaggcttacgtttgcctgtaaaccaaaacggcgaacgtgttcatgatgcttcggtgaacagactaaccgtgatagctaacgaatcatacgatgatttcgctaagcaactgcagactgagtatgaggaagactacggcataggctttggtaaattgggtatcaatgcatttgctaagttggctaatcctgacgctagtcaatttgtgaatattggacaagaagcctcagaagcgatttttaactcgttacaaaaaaatggatatctggatgcagaaggtagggtgactgataaattcgatcctaagaatcctcacttcattctcgacctcccaccagaatgggcacacatgcgaccacaggtcacggatgaaataaataaatacgtgtttaagaatagaattgttaatgcgcgggacaaacgcacgctaacacttcgtaaaaacgttacgctagacccgacattcagagaactttgggagcgcataagccagcggactcgattccgcgtgacctttgataccgatgaactggttaaagcggcagctaaagccattgcggaaatgccgccaattcaccgctcacggataacaactgaagtctatcgattagataccaacaaggccgggatcgaaggggagcaaatttctggcggcgtgcgagaaataagccagtcaccggatttgcccgatctattggcttatctgcaaaacagtactgagctgactcgccacactttagtagagatactcaaaagcagtggcaggttaaaggactttcttgagaatccgcaagtgtttattaaccaagttacccagtgtattcaggatgttttgcatcacgtgacagtgcaaggtatcgagtatgaaaaggtcggtggtagtgtttatgaaatgcacaacatcgaacaagaggccgaacgcgggataacccgttacttgaataatctgtacgaagtgcaaaaccaagataagacactatttgatttcgttgagtacgattcagaagttgaacgtgagtttgctaaagcttgtgataatgacgagcggatcaagttttactgcaaactacccgccagctttaagatagatacccccgttggcccctataaccctgactgggcgttagtgacagagggtgaagaaaaactgtatctggtacgagaaaccaaaagtacacgtaaccgcaaagaactacgtgagtccgagcaagataaaattgcctgcggcgagaagcattttgctgcaatcggcgtgaattacgatgtggtcacgaatttagcagaagcattgcatggctaa

SEQ ID NO: 205294 - DNA, 234 bp, Klebsiella oxytoca
gtgctgctggatgttgaagacagcgggccgggaattgatgatgcgcagatccagcaggcgctcatgcctttccaccgtctggaaaacgttggtgataaccccggcgccgggctcggactggcgctggtcagcgatattgcacgcctgcatcgcagccatccgcagctgctgcgtagcgaaacgctgggcgggctgatggtcaggctgcgctttttgactgtgggttcagagtag

SEQ ID NO: 205295 - DNA, 1389 bp, Klebsiella oxytoca
atgaaaatatctctctacgtccttattcccttttttactttagtctctaccctggttcagggacactgtctgtccgcaagtgtgttgcaagataatatggatgttactttggcagcgcagatttcatatgtaaataaagaaccgtcaatctggaaaattgatggtcgcaatccgtacgtggccgacaatgtttataatgatattgcgttaggcataaaaggtcagtgcgatctagtggataataatctcaatatggatttttcattttattctttaggttattatccgattcgcagtcccggagtctttgaaaaagataaaaatcgtgcaaggataatgatagatcgactgcgttttacctatgctttatctgatacaacacgcctggaaggagggaagctgagaccttcaaaaggggcctttttcttaagatcccccgctacattgctgacaaattattattccggttttaaaacaaaccgaatatatgggccagcaatggaatcagcttatagcgaatcattttgggggggcacattatctaaagagtatcaggattataattttttacttacgctagctcccagattgagcagtatcgataagtactatgaatcatcaggcaactggtctgcagcacaacgctcaaatagcgaagagcgttacctattaacttataatgattaccgactagctagtcatcgcctgtccgctaatttactattaggcgataatccggcgttttcattatcagaactatataattatacatcacagtttttaattaatgctgagttttcctggcataaaggccagcagtggcgtcacttctcaaatgataaaaaagaggccgtactggctggcgcatttccatcctcactctattctgtggaggataaacaaggcgttgagtttgcgcttggcgggcagtatacaactgatagctttagcgtattcggcttagaatactattttcagagtgagggatattcgaaaaaggcctggcaggagcagattgatttcattcgcttgatgggatacaggactggctacgattttttagaccgagcgtttgatagctataagtatcttatggcctcagagattggtaacacttcaaataaaggcatgctgttatccaaacattactttaatacctattttagtctgcgtaatcatgaccagtccaccctgcaaccctatgcaatgataaatatagcggatggcagcgtattatttggggcccattttattaaacccttgcaaggtaagtgggcgccgtttgagttatatgccggcgcatacagctccctgggaggttctgaatcagagtttgcgctatttggtgaaacactaagcatttatgtcggttttaaatactatttataa

SEQ ID NO: 205296 - DNA, 162 bp, Klebsiella oxytoca
atggctttgtacgaagagaagtatcaactcaaaggaaatgagctaatgaatcggctgctggaacaggttgatgcatggaaatatgtcaataaatacaagtcaaaaaagcaacaaaaggcggcattttgccgccagagcttattgcttgaaaacgaacaatga

SEQ ID NO: 205297 - DNA, 330 bp, Klebsiella oxytoca
atgaagatcagtcagtccaagcttagcaatgccttgaacgagagccaggtatgcgccaagaccatcaacagtaatgacgcggtaaatatcaccagcttcattttgaatcgctgtcagcatcggcatgccaccaagttcagcatccttcgctttgcggactacttcggagattttctcatcaatggaggacttcacttttccttctacatatttatctttcatttttatcccttttttgctgtatacgttggcaatactaaccatctgctgcgtttgagggcaagaaagtttgccggacatggcgaaccagaaaaggcagatcatgtctga

SEQ ID NO: 205298 - DNA, 375 bp, Klebsiella oxytoca
atgtccgcaatccaattcatcaccgacagcaatggacacagagtgtccgctgtagtgccgattgaattgttcgagaagttaacccgtgacagtgacctggacgagttatacgaaccagttcaattcgacgacgacgcatcaccagataccagatacccgaatgaggttatcaacattttgtctgaaaagaattgcaccatgcaggccgcgtggcgcatctacagaggaatgacgcaaaaacaagttgctgatgcgctgggtataaaacaggctaccgtttctgagttcgaaaggtcagaaagaccacgcagagacaatatagaacgactggcaaaattatatagatgcgccccagaacaattgatacttgaataa

SEQ ID NO: 205299 - DNA, 267 bp, Klebsiella oxytoca
atgacgacagtgatcaaatggaagaccagagccgttaaagatctgcgcgccctgccttcacaagaccaaaaaccagtgcgcgaaaaagtaaacgcattacaggcttaccctgatattcaggggctggatatcaaaaaactcacggataaaaacggtcagtaccgactgagggtaaaaaactaccgcgtgttgtttgagatggagggcggagagatagtagtgatagatatccttcgcatcctgcggcgcacgtcgacaacgtactaa

SEQ ID NO: 205300 - DNA, 1728 bp, Klebsiella oxytoca
atgattcaggatgcgtttattcgactgcgggcaaaacagctctactggcagggatacccgcccgccgaaatttcacggctgatgggtatcagctctaatacggtgtattcgtggaagaagcgcgacgagtgggacgaaacgcccccgattcagcgcgtcacccagtctattgacgcccgcctttgccagctgaatgcaaaagacaacaagaccggcggcgacttcaaagagattgacctgcttacccggcagctgaaaaagctggataccgggcaaaatgcggcggctaccgggaacaagaaaaccagtcgccgcaagaagaaaaatcactttacggatgagcagatagaggcgctgcgctcaaaaatactcgactccctcgcatggcatcagcgcggctggtacgaacagcgcgatcaacgtaaccggatgatccttaagtcccgtcagattggggctacctggtactttgcccgcgaggcattgctgggcgcactgagaacggacgttaagcacgactaccagcgcaaccaaatctttctgtcagcgtcccgcaaacaggcgcttcagtttcgaaactttatccgtaaagcggctgaagaggtggacgtcgaacttaaaggcggcgagcaaatcacgctgtcaaacggcgcagagctgcattttctcgggacgtcggcggcgacggcgcagtcgtacaccgggcacctgcgatttgatgagtttttctggacaggtaactttatcaacctgcgcaaggtcgccggtgccatggcaacgctcaaagggctaacgcgcacgtatttctccacgccatcgagcgaaagccatgaagcctatcagttctggaccggggatcggtggaatgcgaaacggcctaaagcgcagcgcgttgattttgacgtgtcctggaagaaaacccatagcggcgtgctttacccggacaaaacgtggcggcagatcgtcactatccaggacgctatcaacaatggctgggactacaccgacattgatgaaatccgggacgaaaacagccctgatgaatttgaaaacctgtacatgtgcgagttcgtcaaagacggcgaaagcgcgttcaatcttagccagttactggggtgcggcgctgacgggtatgacgattggcccgactggaaaccgttcgccagtcgccctatggggcaacgtgaggtgtggctgggctacgacgccaacggcggcagcggcaatggtgatgccggtgctctatccgtgacggtccctccccttgtggccggcggccggtttcgcacggttgaattgaagcaactgcgagggcttgagtttgaacagcaggcggcggtcatcaaagaggctgccgagcgctacaacgtcactcacatcgccattgacgggcaaggcgtcggggaggcggtctggcagattgttaaaaactggttcccggcggctatttgctaccagatgagcctctcttccaagcgcgccctagtcctcaaaatgttgcaggttatacgcgccgggcgctgggaatatgaccgcagcgagcaggggctggtcagagcctttaacgccgttcgcaaagtcgttacaccaggcggtttcatcacttacgaaactgaccgatcgcgtggcgtgagtcatggggatatggcatgggcaaccatgctttcgattattaatgaaccgctgggccaggagagtggcggcggtggtttcgcaatgggatggtaa

SEQ ID NO: 205301 - DNA, 711 bp, Klebsiella oxytoca
ttggcggtcctgttccagggcactgaaccggtcaatctggtctgcctgagattgagcaacggcttcaacaacctgatgcaactgactgaaacgctgatcgtcggttttctggcctttgccaaggatgcccatcacgcggttgaaccagttgacgctctcctcgctgcgatgagctgccacttcgatcacttcagcttcaagcgcatcagagaacagcggcggatcgatctgctggttattgaaggccatcacctgcgcgcgctgctgcgcggcaaatttaaggcgctcagtccccagacttgccggagtgtcggtcatcgccaggccgaccacatacgccttgccgttaagggcaaactgcggatgcagctcaatactggaatagattttttttccttcatcggtgagctgtttcattcgtgccgacgcgtcgatctcggcataaagcgccgtgcgaccggccagcggtccctcggtgatatcctccgcgctcagcgcgacaacatcccccatggcgccaaaattgctgtcagggagcatagagagatagtgctccacgttgacgcgggcaccgtaaacgtccgggttgtagctcgccgccgcatcgcggaggtgctgcggctggatctcgcgcccgtcaacggtggcgccggaaaccgcaacgcgaaactttttgcgggcgggtttagtcgtgctggccatgttgtttaa

SEQ ID NO: 205302 - DNA, 153 bp, Klebsiella oxytoca
atgatttcttcccggctcgcgctgcgcttagccgggctacaggttaacagcagtctgcgggccggtaacccggacaaggcgcatcgcgccgcctgcggggaatgtgccgaggtgagggagcggcgtggcttcttcccggtagcgctgcgctga

SEQ ID NO: 205303 - DNA, 171 bp, Klebsiella oxytoca
atgacggtgaaagttgagtgggaaaccggtgtgggagggtctaaaggttttcctggatttgctaatacagataagtacttagaatgggaaaaaaaatcaaagctcaaaaccggaaacatagccagacagtatctgttcccgattataccgggcaaaaaacctgcggaataa

SEQ ID NO: 205304 - DNA, 1251 bp, Klebsiella oxytoca
atgagaatagaatatgtagataaaaataaaaaagataatgaggatgagttaggaaaccttcggtttttattgaagagttgggtgaatgctgaattcttagaagagttatattttaagaaagagctctatgacctcttgtttacgatcccaaatgattattcggtttttgatgcacaaaataagttgcgtgaaattcctgagggtgaagcaacttggcgttcaatttctagcgatacttataaaatgatagccttaatgctaacgcagagttctttcaataataataatctcaatgttgtttttattagggatgataatgatttctatgaggttacgaaattaagtacgcataaaattaaggacgtaattaattatttgaaaggagatggttttttaaatcttattaatgttgtttcggaaggtgaggatgtaataaataacagagctcaaatcatatcaaaattagaatcaatattgtcatcgatgaatgcatcaatattaaatgaagtgattgcttcagagttagcacccgagttggttggtaaatatattcaagaggttcgtctttcagttgaaaagttaattggacttgtcatccccttggataagcttgaaataactaaagaattgcttggggttgaagctaatttattggtttataagagagaagttatcccttctgtggataatagcgcctatatgatggactcacataatcatagtaattggttggcttattattgggtaagggaaaatattgatagcattcgtgacaatcctcatgacatagtgggaattgattctttacaagatttgaaaacagacaaattaataactatagaatataaggttgaaagtgggttgaatgtttataaatatactaagggattgaaagttaatgataaggaagggtatttgggtttaaatgggtcaggtatgtattatattgacttgttggataattttgagtttaaaagagaggccgatattttatcgattagtatcgggaaaatagatgaagacaacttaagaaaggcaaaagaactcttgggtgatggagatgaaaatcctttactatatgcaatgatgagcgtgctattcaaaatattggcaaaccctaagggaatatttaaattatattatctttctgaggataaatgcaggtttttaaatcaaaaagaagagagggaaatggagcagttattaaaggctagccgtgtagacagtatcgataacagcagcatgtcttaa

SEQ ID NO: 205305 - DNA, 519 bp, Klebsiella oxytoca
ttgctgaatggccgctttgtcctgctggcgttccagctccgaagcgctgaatcggtcaatctgatcggcctgagattgtgcaacggcttcaacaacctgatgcagctgggtgaagcgctgatcgtcagttttctggcctttaccaaggatgcccatcatgcggttgaaccagttgacgccctcctcgctgcgctgggccgccagttcgaccacttcagcttcaagcgcatcagagaacagcggcggctcagtctgctggttgttgaacgccatcacctgcgcgcgctgctgcgcggcaaacttcaggcgctcagtacccagacttgccggggtgtccgtcatcgccaggccgaccacatacgccttaccgttaagggcaaactgcggatgcagctcaatactggaatagatttttttcccctcatcggtgagctgcttcatacgggtagatgcgtcgatctcggcatagagcgccgtacgaccggccagcggcccttcggtgatatcctccgcgcttaa

SEQ ID NO: 205306 - DNA, 1164 bp, Klebsiella oxytoca
atgaaaaatgattcagttaatattagcactctcacacttgaagaattcctaaataataattgcttgacagtagagcagttcgaaaaagctgattttccatgggaggaattgcaagcaattggattagctcactatggtaatatacccgccctctctgaaaccgcagggcttatatcatcgattctacagcaaggagaaaatgtacattcagttcgatggagaatcaaagaccctgagcatctaatgagtaaaataataagaaaaagaaatgaggatgagatcaatgaaaaatatcgttccataacaaaatataactacacggatataataactgatttaattggcattagagtgctgcaccttttcaaagaagactgggaaacaatccataactatctttcttccaaatgggaatttcaagaagcgccaatagtttatattcgtgaaggtgatgcttctgacataaatatagaaggtagtattgagaaaacacatccggcggggtatagatcagttcattatattatttcaactcgattgcttaaaaatagcatttacacagaaattcaagttaggactatttttgaagaagcatggagtgaaatagatcatcatgtaaggtatccaaactttaaaaataacgcaatattaaactatttcttattaatattcaatcgatttgcaggtagcgctgatgaaatgggcacattcgttctttctttaaaaaatgaacttaaagaatctattgaacgcagtattaagatatccgaaattgaaaaagaaaaagaaacctatcttgcaaaaattgatgagttagttagtaatcttgaagctgaccaaaaaatcactttaaatacaaagaatgaattaaaacaagtgaaggcaaaacttgatgcctttcaaaagaaagaaaacgatctttatcgaaaaacattagttcaaagattaaaattggacagttctccaggtggcactcaggatttgtcatcccagactcaaaggataaacggaaatctagaaagtaaaacctctagaaggataacatcgagaggattaatagactctattgtaaataataaccaaacgctcaggggaacggctattactcttgatgatcttaatttagatgttaccgaaagccgaaaaaggccgccaaaaaaataa

SEQ ID NO: 205307 - DNA, 729 bp, Klebsiella oxytoca
atgattctcgaagatcagagcggtattggtatccgcgttggcttgcgggatatccgagtcgctatccgaatccgaatccgaatcgctgtcggagtcagaatcgctgtcggaatccgagtcgctgtcagaatccgaatcgctgtcggaatccgagtcgctgtcggagtccgaatcgctgtcggaatcggagtcgctgtccgaatcagaatcgctgtcagcatccgagtcgctgtcagagtcggaatcgctgtcggaatccgagtcgctgtcggagtcggagtcactgtcagagtccgagtcgctgtccgaatccgagtcactgtcggagtcggaatcgctgtcggagtcagagtcgctgtcggagtcagagtcactgtcagagtcagaatcgctgtcggagtccgaatcgctgtccgaatccgagtcgctgtcggagtcagagtcgctgtcggaatccgagtcgctgtcggagtccgagtcactgtcagagtcggaatcgctgtcggaatcggagtcgctgtccgaatccgagtcactgtcagaatcggcatcgctgtcagagtcagaatcactgtcagaatccgagtcgctgtcagagtccgaatcgctgtccgaatccgagtcactgtcggagtcagaatcgctgtcggaatcggagtcactgtcggaatcggagtcgctgtcgctgtcgctatccgaatcgctgtcagagtccgagtcgctgtctga

SEQ ID NO: 205308 - DNA, 1035 bp, Klebsiella oxytoca
atggaaaacctgacccgcgaactatttgataagtacattgtgcgccaggcacatctgaacggtgtctcaccctcagccgttgccaatcgtttcagcgtcgatccgactatccagcaaaaactggaacaggccgccatggagtcggatgacttcatgaagctggttaaccactttggggttaaagagcaggaagggcagaaagtaaaaatcggcagtaaagggccgatggcgagcaccaataacagctcggacggcaccaaccgccgtaaccctgcaccgaaccataacaaagagccgcagaactaccactgccgcaaaaccaactatgattatgcgctttcgtatgcggagctggatgcgtgggccggtcaccctgaatttcagtcattaatcagtaatgcgatggctcgtcagctggggttggatcgccagatgattggctttaatggcacgcattactctgaaaactcggaccgcacgacctatccgttattgcaggattgcggcgttggctggctgcaaaaaatccgcaatgaagcgccgcagcgcattatgccgggtatcacgctgacctcccgcgatgagaataacgcggtaattgcgtcaggcacctacggcaatattgacgccgccgtgctcgatgcgcgtcacagccttatggatccctggttccgccgcgctcccggtctggtcactgtgctctcgtccgatctgctgctgaaagtgaacctgccgaaagtgaacgcgctcagccagaccaatccgaataccgaactgctggccgcgcagctcattgtcagccaggaaaagatcggcggcctgccgacggtctttgtcccgggtattcctgaagacgtcgtgctcatcaccaacctgaaaaacctctctgtgtattaccagaaaggctccctgcgtcgctctatccgcgaagagccgcattacaaccgcgtggcgacttatcagtccagcaatgacgactatgtcattgaagagtacggcatgattgccatgatcgacggcgtgacattcgcctga

SEQ ID NO: 205309 - DNA, 237 bp, Klebsiella oxytoca
atgcgccgggactttggcagcgcgatccctgatttgctcgatgcgccgcagaacgccgtcacccgcatgcagctgatgggcgccgccgctatcgctctggcgcagtgggagccgcggatcagcctgaccaccatcaacgtggtgttttcagaaacaggcgcagtgaccgccgagctgagcgggaccatcacggaaaccatgacagaaaccagcaacaccatcaggttaaggagctag

SEQ ID NO: 205310 - DNA, 171 bp, Klebsiella oxytoca; identical to SEQ ID NO: 205303

SEQ ID NO: 205311 - DNA, 258 bp, Klebsiella oxytoca
atgccagaacagccgttaatcatcggcgttcgtcaccacagcccggcctgcgccaggctggtgaaagaacgaatagaacgcgtgtgtccgcgctacgttctgattgaaggtccggcggattttaaccatcgcctggacgagctttttttaccccaccaactgcccatcgccgtctacagctactgccagcagcagcatggcggcgcggcaggacgcagcgcctggacgccgttcgccgaattctcgccggagtggtag

SEQ ID NO: 205312 - DNA, 1089 bp, Klebsiella oxytoca
atgatacaacaggaaccacatcttcagcgcccccctgccgccatactttacgccgatgagctcgcccggctgcagcagaacgactgtttcccctgcccgcccggctggcagctaagcctgcctgcggcgcgcgcgtttatccttggcgatagcgctcgcgacatcagccgcaaggtggtcatgagtccggccgccgtcgagcggatgctggtcacgctggcgaccgggcgcggcctgatgctggtcggcgagccgggtacggctaaatcgctgctctcggagctgctggccaccgccatctgcggcgacgccgggctcaccattcagggcggcgcggcgattaccgaagatcaaatcaaatatgcctggaactatgcgctgctgataaaccagggtccgtcgacgcaggcgctggtgcccgccccgctgtatcagggcatgcgtgacggtaaaatcgtccgctttgaagagattacccgcacgccgctggaggttcaggactgcctgctggggatgctatccgaccgcgtcatggcgatcccggagctaaccggcgacgatagccagctctatgcccgcgccggatttaatattattgccaccgccaatacccgcgatcgcggggttaacgaaatgagcgcggcgctaaaacgccgcttcgacttcgaaaccgtctttccgattatggattttcagcaggagctggaactggtggctaacgcatcggcccgcctgctggagcatagcggcatcccgcataaagtccccgatgtcgtactggaactgctgatccagaccttccgcgatctgcgcgccgacgggggtaagaaaaccgcgatggataccctcagcgcggtgatgtccaccgccgaagcggtcaacgtcgcccacgccgtcggcgtgcgggcatggttcctcgccggtcgcgccggcgaacccgccgacctggtagactgcatcgccggtaccatcgtgaaagacaatgaagatgaccgcgcccgcctgcgccgctattttgaacaacgcgtcggcacgcataaagaagcccactggcaggcctattatcaggcccgccaccgcctgccgtga

SEQ ID NO: 205313 - DNA, 699 bp, Klebsiella oxytoca
ttgtcttactccattccggggatgaacaagtggcttcaccgcaacggtttctcctggaaacaaccgacaggcgtcccgcataagtttagcgaagaaaaacagcagcagttcatggctgaatatgaggctcagaagctcactgcgggtgataaagaacccatcctgtttatggatgcagtgtatcccactcagtcaacgaaactgagtggtggctggataagcaggggtgaacgcaaatcggttaaaaccaccggcagccgtacccggatgaatatcatcggggtgctctgtctgaacgatatcgcccggactgttacctgcgattacacgcaaattaatgccagaaccatttgtgagtttttcatcgccatccggcagacttacccggtcaggcagaaagtacaccttatactggatggtatgccgtatcaccgggcctcactggtgcaggactgggcggtggtgatgaatattgaactacactacctgcccccttacagtccgaatctgaacccgatagaacggttgttgaaggtcatgaatgaacatgcacagaacaaccggtatttcgccatagcgaaggcgttcaggcaggcgataaccggttttttcagcgataccctgccagaaatagtggggatactcgtctgtcgcattaacgataactttcagacactcaaaccagcatcttcgggttga

SEQ ID NO: 205314 - DNA, 981 bp, Klebsiella oxytoca
atggaagataaagattacactgaaattagagagttttggaaaaatgaaatcatagcatttcttgcgttgacctgcttaaaaggtgttggttattggactctccgtaaaatatacgaatccaaactagggtttaaaaatcttttaaaagctagttcagctgatgctttggctgggtatctaagggttgcgttacccaaagatatcgcgtgggcggaatttcaacaagagttgtgggcgaaaggattagaacgagcgagagaactaaataaaaaaggaattgttctaactttttttgatcaacctactttcccaactaatttaaagaatataagtgaccctcctttttggctttttgttcatgggaatcaagatattcttaataaaaaatcaattgcaatcgttggtacgcgaaagccaacagatgatggcatttttctggttaaactaattgtatctgggttgtatgaaaaagatatagttactgtaagtggtttagctactgggattgaccaatcatgccattatgaatctattcgttatgggatacctacaattgcagtgttaggtaacgggatttttgtagaatatcccaagggctctaaaaatatctacaatcaaatagttttaagcggaggcgcaattgtcactgaatatttgcctgaccaaatttatagcgcagaaaattttgtgagacgcaatagaattcaagctgcgctgtgcacatctcttattcctgtggagtggaagataaaaagcggtactgctcacacagttgaatatgcttataaatattcgaagaaaattgctaatccgtacttacctaatacatataatttaagaccggaattgagcttttcagaggaaaatcgaaaatctttatcctttctaatgccaactgaattgaaagaaatgatggattatatttttagtgaagatttaaatctgagagcagaaccaacacagcagagcttagatctctaa

SEQ ID NO: 205315 - DNA, 1230 bp, Klebsiella oxytoca
atgagcaagatcaaaggtgtgattctcagtgttgaagacactattttaccaaaaggtaaaattgatggtgatattttctctgaagttgataaattaattaaatattttaaaaataaaaacattgagtttgtcgtatttacaaatcgcgcttgggttgttggtgatgaccgtattcccttagaagatatcttacggaagcattggggagagtttacgtatttatgtcgagctaaggataagagtattcctggaaaacctacagctgatgcaactaagtatgtacttaatttgatgggatggcaaagcacagaaaccttatatatcggtgcatcactaaacgacatgcaaactgcagtaaatggggagttactttttttaagagcaacctggtgggccgataaaacagattacgggtttgaattttcatcgcctaaagatattgctagatttatagatacattttgtttgagagatcatctctggtgccatgaaattcatgatggtgattttaatttttatgcacttgcccctttcagtacaatgaaagaagaatatactttatattcggaggatgctcgtgcagcggcaaagcatggtttggggcatcctgaattctggacaggtgctttggtgtctagtttatattttagtggcatccacaaacatataaactatgttagtgtttatcctgggcataaagaagggcatggtaataacataatggatgaagctatttcattatttggtaaatgcttcagaaaaacatacatacctgatcttattttaagacacacaacatcaacaaaatcacaaaaggcaagaaatgaaggtattgcaattgatcattgcaaccaattaaatacaatttgtcttaatcctaaacctcatagaaacccaacgactatttataaaagaccacctttgggaattggaaaaacagttctccttatagacgatattacgactcgaggttacagttttgaatcagcccgagcctacattgagaaaactggagcgaaggttatacttgtatcttggcttaaaacaattaatactgatatttctactcttggtgagttgtctaactttgatccttacaaaccgaaccattttgaaaatgtacctttaggaaaatttcatagatacagggacaatatcgttgatctattagcaccggctgagttaactcggttgtttacagcttacaagcagtgggattggcctgtataa

SEQ ID NO: 205316 - DNA, 1080 bp, Klebsiella oxytoca
atgagcaagattggagatcatttttttgaatttccggcgtctcgtggaactcaggggagttcaattgtcctaatgctgacagtaccagcacggacactaacgcgagtcctcgccagcgataactacagggacacccttgatcgatctcaacgagaactgaaccccgccagggcgaaaaagttttatcagtatctcgttgaagcatacgagaacaaggaaccattcattattccgccgcttgtaggtaactgcgactcgtatgttgaattcgaagagttcggaaacactaatgtcggggtagcccgtttcccgatggatgctgagattaaattgtttgatggtcagcatcgagcagccggtattggggagtattgccgtaccattgatgagccgatccatgtcccgatgatgcttactctccagttgccactgaagacgcggcagcagtttttctctgacattaataacaatgtttcgaagccatctgcggctatcaacatggcctataacgggcgcgataagaacgcgcaggagatggtcagctttatcagttcacacgacgtcttttctgaagtcaccgattttgagcataacgtggttcccgcgaaaagtgataagtgggtgagcttcaaggcccttagtgatgccactgcaaaattttccgattcgtgttcccaagatgatcttgaggggttgtggaatgcctggctgatgctgactggtttagatgatattcgccgaggaacgaaccaagccgagtacaaacgcgagtacatccagttccatgctgtgatgatcatcgccttcggctacgcagtacaaaggttaagcgaaggtcggggagttcgcggggtcacgctgatgattgaggacctggtaatgaataccggcattgccgatcgtgaagattttttcctcatttcatcttgggatggtatttgcgccagctgcgagaaatccaggccaacggtaattgcgaatgtctcatctcagaaagctgcagcatcacgcctgatggatgccatcgttaataaaaacttgtctgtcagtatcagcaaggatccaaccaatgaccaataa

SEQ ID NO: 205317 - DNA, 1086 bp, Klebsiella oxytoca
atggctagtgttgatgcagattactgctactcgtttccggctatacgtggcattcaggctggtcgccctttctatatcgccacatgcccgatgcgtatcatcccgaaaatattcagttttgatgaaaatgatgtgccaccggaattacgcgcacagcgcacgctaaataaatcgcgcattcccgagatggtacgttatttgttggaaaaccctaaagattatgtgttttcagctctgacggcttccattgccgtagacgttcaatttgatgagtttccaggttctaacaacctggggacgttgtgcgtaccaatggatgcgcaaattctaatcaatgatggacaacatcgccgtaaagcgattgaagacgctttagacgctcgtccggagctgggccaggataatatcccggtgttgttctttgtcgatgaaggcttaaagcgtagccagcagatgttcgccgatctgaataaatacgctattcgccccagcccatcgctggcgtcgctatacgatcatcgcgatgcctgttcgaatctggcgcgttatctggcaatgtcagtagagccgtttgttgggatgacggaactggaaaaatctggcattagccagaggtcgaataagctatttacgttgagcagcatcaagcaggctacccgcgcattgttgggcaaagatcccaaagaggataactttgaggaatgcacccacattgctacccaatattggcaggctatttttagtgtaatgcctgattggcaattagcggctaaaaaggaagtttcaccggttcaattgcgacaagattatgttcacgctcatggcattggattgcaggcacttgggcaactgggatataccctgctgacggattatcctgaacaatggccggagaaaatcgctgcactcaaaacatttaactggcgtagaaacaatccggacctcatcaagcgagcgatgcagcatgggaagttgagtaaaaccagtaccgcgatccagttaacctgcaatgcgctaaaaaccgcactctcaattcctctcactcctgaagaacaggagcttgaagctcaaatggttgtctcatga

SEQ ID NO: 205318 - DNA, 663 bp, Klebsiella oxytoca
atgaaactgctgctggccctcatgctggtgctgatgctcatcgccgccaacggcatcgcctcggaatctgccccctccgtggtgcgctacgaccgctacctgctggtcaatactacgccggaacaggcgccgctggagcaactcattaccctggccgttccccccggatttcatccgactgttggcgaagcgctgcagtacctgctgcgcgacagcggctggtccttgtgtctcgccgatgcgcgccgggcgcagctttatggtctcccgttaccgctgagccagtaccgtaccggcccgctgcgcctgaaggccgccctgcaactgctggcgggcccggcgtggcggatgaccgcagacgaaaaccgccgcgaagtctgtttcgccagcgaccatccccttcccccgacggtggcttaccgccatccggtgtctctccgccctttggggccgttaacggccccgttttttctcgccgggaccatacagcatggcgatattcgcctggccgttatcgtgccgccgaaagccgtttacctccaccaggtggtatggctgcgcaggggggaacattggcaaggctggcggctggagcgatttgatgagcgccgggcggtattccgtcacggcaaacgccagctgacgctgaagatgccggagtaa

SEQ ID NO: 205319 - DNA, 633 bp, Klebsiella oxytoca
atgagtgaacagcgaccgcctccatcacgtccgccacaaggaccgattggctggctgctgtcgctggccggacggattatcgggctggttattggtgcgctggtattacgggtagtgctggaactggcgggactctgtttctggtggccgcaggaggggagcaggcatgtttttcaggtgatgaagcgggaacaggcggaactggttagcgcgttgcaaccacatccactcgggaatgacattgtaacgctgttggaaaaaggggcaactcatgtgtttatggccaacaggttcctgcagaaaccgttcaccgccctggcttatacgctagtgagttttatgcagcgcctgatatggcttgccactatgctccccctgctctgcctgtgtgcgataaccgggctgacggagggactggtgcagcgggatctgaggcggtttggctccgggcttgaatccatttttctccatcgccatatcatcaggtccggcagttcagtcgccaccacgctgtgggtgttttatctcgcacaaccgctgtttctgcctgcaatgctgattttgctgcctgcaactttattggctggggttactgtatggatggcggcaggtagctttaagcggtggatataa

SEQ ID NO: 205320 - DNA, 1050 bp, Klebsiella oxytoca
atgagtttcgaggatattgatttttctaacagggttattaagttaccttcaggattctctctaatctggccatttaggaacataccaaaatctaatgggccttatgaattatttatcgacaataatgctctagtaattcataaatggtttaaagaactggacaactcagtaaaggtaaaatctgttttatctccatttcatgctttaagtgaacaatggttgtcaaatccttctttcaggaatgatgcagtcgaaagaatacagaaatttctaacgccatttatagatgaaggtgttatatttgacaacaattacgcaatcaatgttgctaatatgttaaaattaaatgaaaaagaatctaaatcacattggatgataacatatctctatgttattttgctttatcggatagtttcatccaaaagtaatgacagtctccctcaacaactactatcgactttgaaggatattgatgttccaaggttcaatggatgtactatgttatgtacacttgctgcttatctaaaagagaacaaaggaataaaacttatcggggatagtaaaactgctttctcatatgttgctagcttcgttgatttacattcaagcaataaaaatgaaagcaaggtagatgaaaactacctacgcaatagagctggtgatttgtctatgtggttgcatattccaattcttatgcaacatagatatcacactgtaggtgatgcagtagtagttactcaggataatgttctgaagaactttatttttcgttgctttccagcagttttaattggaaatgggactatggcgtttagctttgatgaaaagagtttcgacccaattcattcaaatgatatagttaaaaaaatcttaaccaacattgaaattaaaaaaatataccaccccacagaacgaactgaacaatatgcaaaacttagacgattaaaatcacatgtaactgaaggcgccaacgaagatcttatcatcgaggtgaataaagtctgggacgaatggattacacccggtttttttgaaaatcactccatataa

SEQ ID NO: 205321 - DNA, 309 bp, Klebsiella oxytoca
atgcgcaggcgtttatcatttctgttattggctctgctcacaggatcacaggcctacgccaccccggaatccgcccagctcgccctcgcgctgaagcaactcgacggcgtgaaaacttcgctggagcgcgcccaaaccagcgccagtaccgatcagcagtcacgctacttcttcgactacttgcaggcgcagcaggatatcactgccgttgaacagggcatccgccgttaccttgtcccggcaagagcgcagccgcgtgccgtccagcccctgagcgccagctaccagcgggagaaccccgatgactga

SEQ ID NO: 205322 - DNA, 546 bp, Klebsiella oxytoca
atggcggcattctttagggaatacagagatacccttctcgccttcaccggaattattatcgcgctgctttccctgtggtttacctggtcgcaaagccaggagcaaataaagcataaccatatctctgttgagccgcggatgaacgcttatttttcaaatgacgggcgggccaacaaatcgggtatttacatcatcaataatggaatgggaacagcatttgtctctgctatatctgcaacggtcaatggcaaaaaagttgaacctgttgcagggaatatttttgtcggagcagtgcaggcgttaggcctggatatccggtgctttgttatggggggacccagaccaaatgattcatttaaagttggcgaggagattttcttaattgaagcaaggggaactgacgatcgctgctctgccgattcacttatccttcggtctgcggctttagaacctgcccgcctggattttgtcctggatattgaatcaatatacggggacagattccggtatgtttattctcagaataaacaaattaagcgtgattaa

SEQ ID NO: 205323 - DNA, 978 bp, Klebsiella oxytoca
atgacagatgtggttaaaggatttctccggctggccggttttattatggtttccatattctccgcacagggaatggcgacctgcacggcggtcaatggctggaataataaatttctgacgtttacttttcctgcgcagatccccgtacaggcagacgcgccagtgggcagcgtgttttatgaagcgcaaaccaccaacactgcggcaggtgagcaatacgccagctgtagcggctcatggaccaccggcacgaaataccgtaatggctggaaggcggacggcagcggtattgcagcaaccaacgtaccgggagttggtgtgcgtatttactggatggcaggaggaagaacgccttacgtggtgccgactgacccgatgagtagtatggagagcacggttgacgcttactggggtaatggtgagccctcctggaaaattcagttgataaaaacgggagatatcagcggtggaacgttgcagaccggggcatgggcggcgtttggcgcgggaaatacgctcatcaccacgctgaatatcggtggcggcggtgcaatcactccgactggctgcacagtgactaactctgatattcctgttcctcttggggaacacaagaagtctgggtttagtggagccggttcggctacggcatggcaggcgttcaacattagtctgaactgcaacaaaaatgcgcgtatcaacgtccgtatagatgcgacaaaagatccttcaaacgtcgccggcgtgatgaagctggacagcgcttccggagatatggcggccaccggggttggtgtccagctgtactttgtgccggataacagcgcagtacagttcgggcaaacgaaattctattacacctcgcccaatggtggttctgagacggtgcaactgaaggcgcgctattaccagacgacgtctgcgatcactgctggtgaggcgaacgccacggcaaccttcacgctgacataccagtaa

SEQ ID NO: 205324 - DNA, 528 bp, Klebsiella oxytoca
atggcggctcggggtccaaagaatcaagatattagcacaatggctaaaaagacagctcctttacttccagtgaattaccagctgcttgctgaacttggcgagcggcttaagctggcgcgactgcgacgtaagctaacagcaaagcaggttgcagagcgggctggtatgtcaccgaggaccctccgttctcttgagtcaggcgaggctggtgtaacaattggcgcctacttgtccgttatgcaaatattaggacttgaaagagatctgaataaaattgccgccgaggatgagttgggacggcatcttcaggattcccggttaataaataaatcgcatctttcccattcttctgtttcctttcgtgcaaaaatacatatcggaaacgagataaaacacgatgcattcggcaagcaattaacggcatcacaagacaaatcagtaaagactgaagtaaaagcacctgtcgtgacatcggcatctcttgctgcactgttaaaaccaatcaagaaacccactaagagtagctga

SEQ ID NO: 205325 - DNA, 1035 bp, Klebsiella oxytoca
atgattgagtacagacatggcgacattcttcatgccgatactgaagccatcatcaataccgttaactgtgttggtgtgatggggcgtggtatcgcgctgcaatttaagaacgcttaccctgataatttcaaagcctatgcgaaggcctgtaaagctgaacaggttaaacctgggaaaatgtttgtttttgaaactaaccaattaaccggcccgcgttacattgttaatttcccgacaaaacggcattggaaggggaagagtcggattgaggatattgtttcaggactagaagatcttgtgcgtgttgttgaaaactacaatatccgatccatagccatacccccactagggagtggattaggcgggctggaatggcaggatgttaagccgttaattgaatccgctgttaagccgcttaagcaggttcagattgctatctacgatcccaaaggcgctccttcttcagagcgtatggcgcataagacggaagtgccgaagatgacgactggacgtgctgcattgattgaacttatgcagcggtatcttaacggtctactcgatccgtttatctcgctacttgagcttcataagttgatgtatttcatgcaggaggccggagagccacttcgcctcaagtatcagaaagcgcattacggaccctacgctgagaatttgcgtcatgtgcttaatgctattgaagggcatatgatctccgggtattccgatggcggtgatttaccggagaagcagttaatactggtaccaggggctattgacgaggcccgacaatttctcgcccgacatgaagaaacccggcatcgtttccaacgggtttccgaactggtagagggctttgaatcttcttttggtctggaattgctggcaacggttcactggacaatgaaacatgagtcaataacgtcttccgaagaagtgatcaattacatctataactggaatgagcgtaagcagcagttctcaccccgccagatcacactggcaatggatatattgaaaaagaaacagtgggtgtag

SEQ ID NO: 205326 - DNA, 645 bp, Klebsiella oxytoca
atgcctgttccagaacgccctaaaatttatcatattttgcatattgatcggttgcgttctgtgattgcagacgggctactttgtgatgaacaaatttcgcagcgtaacaacgctggtactgtaattggtatgaatagcattaagcagcgacgtcttacggagttaacgcttgattgttatccggacttgtatattggacaatgcgtgccgttctacttctgtcctcgttcggttatgttgtacttgattcatcgcggcaatcatcctgatctcggttatcatggtgggcaggatcctgttctgcatttggaagctgatttgtttacggttatggattgggctgaacgaaatcagcagcgttgggcgtttacgttgtctaacgccggggcactttatgtcgagtcacgttgtcaaagagatcaactgagcgagttaaactggcaagcaatcaatgcatcgcagtggagtggcaacggtctgaaggagtcgaagcaggcggagtttctggttgaacagcatctcccatggcaactggttgaacgcattggcgtacattcacgatccattcaccaacaggtagctgatattcttcccgctgatgggcatcgcccgccaattgagatacaggaagcttggtattactga

SEQ ID NO: 205327 - DNA, 2046 bp, Klebsiella oxytoca
gtgattcggattcggacagcgattcagactctgacagcgactcggattccgacagcgattcggactctgacagcgactcggattcggacagtgactcggattcggacagtgactcggattcagacagcgattccgactctgacagcgattcagactccgacagtgactcggattctgacagcgactcggatagcgacagcgattccgattcggacagtgattctgactctgacagcgactccgattccgacagcgattctgactctgacagcgactcggattcggacagcgactcggattcggacagcgactcggattcggacagtgactcggattcggacagcgattcagactctgacagtgattcggattcggacagtgattcggatgctgacagcgactccgattccgatagtgactcggatagcgacagcgattcagactcggacagtgattcggattctgacagcgactcggattcggacagcgactcggattccgacagcgattcagactcggacagtgactcggattctgacagcgactcggattccgacagtgactcggattccgacagtgattcggattctgacagcgactccgactctgacagtgattcggattctgacagtgactcggattccgacagtgactccgattccgacagtgactcggattccgacagcgactcggactcggacagtgattcagattccgacagcgactccgacagtgattcggattccgacagcgactccgactctgacagtgattcggatgctgacagtgattcggattctgacagtgactcggattccgacagtgactccgattccgacagtgactcggattccgacagcgactcggactcggacagtgattcagattccgacagcgactccgacagtgattcggattccgacagcgactccgactctgacagtgattcggatgctgacagtgattcggattccgacagcgactccgattccgacagcgattcggactctgacagcgattctgactccgacagtgactcggactccgacagcgactcggattctgacagcgattccgattcggacagcgactctgacagcgactctgacagcgattctgatagcgacagcgactcagactctgacagcgactccgacagtgactccgattctgacagcgactctgacagcgattctgatagcgacagcgactcagactctgacagcgactccgacagtgactccgattctgacagcgactctgacagcgattctgatagcgacagcgactcagactctgacagcgactccgacagtgactccgattctgacagcgactctgacagcgattctgatagcgacagcgactcagactctgacagcgactccgactccgacagtgactccgattctgacagcgactctgactccgacagcgattccgattcggattcagacagcgactccgatgcagacagtgactccgattctgacagcgactcggactctgacagcgattccgattccgacagtgattcggattctgacagcgactccgactctgacagcgactcggattccgacagtgactcggattccgacagtgactccgattccgacagcgattctgactcggacagcgactcggattcggacagcgactcggattccgacagcgactcggattccgacagcgattcggattccgacagtgactcagactccgacagcgactcggattctgacagtgattccgactctgacagcgattcggattcggacagcgactcggatagcgacagcgattcggattccgacagcgattcggattctgacagcgattctgactctgacagcgactccgattccgatagtgactcggatagcgacagcgactcggattcagacagcgattcggattcagacagcgactccgattccgacagcgactcggactctgacagcgattctgactcggacagcgactcggactctgacagcgactcggatattccgcaggccaacgcggataccaatactgcgctga

SEQ ID NO: 205328 - DNA, 1236 bp, Klebsiella oxytoca
atgaaatacgattttgatgaagcagtggacagagcagggacagacagcttaaccgtcgacggctggcgtgaatatatgtttggtgcccatgaaggccccgcgccggaagtaccggccaatggttttataaacctctgggtagcagacatggctttttccacccccgagccggtgcttgaagccatacgttcccggttagataaaaaaattcttggctacacccgcgtttatgacagagattactatgatatttttggggcctggtgtgaaaggaattacggatatcggtttccggaagagagcattgttttctcccctggtattatccctgcgcttaaccgccttgttccgttactgacccatgaagaagacagcatcctcatcctgaccccttcttatgcaccgtttaaaaaagctggagagtatagcggtcgtcgtgtcgtcgattgcccgcttagcaacaacgaaggcgaatgggcggtagattttgaggcaatggaacaaactctgtgcgattaccagctgcgaattaaagtcttcttcctctgtaacccgcataatccgaccggacgtgtctggcgacgtgatgagttgcagaaaatgatagcgttatgcattaaacatgatgtgtgggttatttctgatgaaattcactgtgatttatcccgctcgggcgtcacgcacatccccgccgcgtcagtttttcctgaaaatcataaaattatcacctgcatgtcgaccagcaagacgttcaacctggcgggtaatctgctggcaaatatcatgatccctgatgcctcagtgagagcagaatggcttcgcctgcatgatgattttatctcaccgttgagtctggtggctaacaaggccgcctggtccgagtgcgatgagtggttgactcagctcaggctctacattgacgagaatttccgttttctacaggactatctgaggacatatcatccgctggcccgttttatcattccggaagggacctatctggcatggattgatatctctcctctgctggatgtcagtaatcaggaagaagtaaccctcttttttgccagacatgcgggtgtattgcttgaagggggacaaatgtttgtcagtaacggagacgggtacatacgtcttaatctggcttgtccacgcgccgtgcttgccgaagggcttagccgcataagcaacgcattgagtgccagttctaccggaaccataaccgcaacaatgtag

SEQ ID NO: 205329 - DNA, 702 bp, Klebsiella oxytoca
atgctgacagaatccagcctgtacaccgggaaaggcaagatgcacgaagggcccggcctttcatcaccggtatttattttttccggctgtttctgcgcggcgcaggggctcaggagcctgctgaccgcatccggacagagaatcattcacgtcagaaccgatggagggggcgcctttgagccgcgcggttttctgcagcacgtgacgccgggaagccgggtagtgatgtaccttccgggagagccgcagaatatgctcgccacgctgcaggctttcagtctgtttatcaggctgagccgccattccctgccgacgctcatcctgagcagttgccggcctgactggctgtatcgtacgctggggtaccagatgggcgacctgaaaacgatgtcagtcctgcgcgccctgccggtcagcacgtcgttaccggacctgtctctgctgttgcggacggaaggcactccattattgctggtcagacaggccagggagatggaaaggcgttcagtcagtcgggtgccgggcatgacgaaacgtgagctggaaacggtgctgtggctgttgcggggagaaagcattgccgaaatcagccgtcataccggcaccagtaccaaaacgctctactcacagcgacacagtggactgaaaaagctccaggtggcatgtcccgccctgaacattcgacaccgccatacctggtga

SEQ ID NO: 205330 - DNA, 579 bp, Klebsiella oxytoca
gtgacgggcaccggcagcatcagcccctggccggataccggcgcaccggcacattacactgacgtgctttccttctggcaggcacacccggcacactggtttgcaaaagacgccgcctttgaccggctcttccgggcgcgctttctctccctgcacatgagtattgtcttccggttacgggaagcgtggcgggagacaccggaggggtgtctggcgctcattatcatgaccgaccagttcccgcgaaatgcgttccggggaacggcacgaatgtatgccgcagacccgctggcccggtggtatgcccgtcatgccctgcgggccggctgtatgcaggcggttgcccctccgctgagggtctttttcaccctgccattcgcccattcggaagacccggatgaccaggccgaatcggtcaggctgaacgcgatgctgggagaagaatacagaaagcatgcggaaggacacaggaatatcatcacccgcttcgggcgctttcctcaccgtaacgccctgctgaagcgggaaacaacgccggaagagcgccgttttctggatgaaggagggttttccgggtaa

SEQ ID NO: 205331 - DNA, 1191 bp, Klebsiella oxytoca
gtgacggaaaataccaacctgatacatccgctgctgcgccagcgcgacggacatcatgcccgcgtgacctgggaggagctctttttcgacctggtgtacgtgtttgcagtcacgcagctcagccacattctgctgcatcacctcagcgcatccggggggctccatacgctcatcctctggtttgcggtctggctgggctggcagtacacctgctgggtgacaaactggttcagcccggaaacaccggccatccggggattactgtttgccgtgatggctgctgcactggtgatgtccgccgcgctgccggaagcgtttggtgagaaagcgtggattttcgccggcgcctatgtggtgatacaggccggccgcaccgcttttattgtgtgtgttctgggccggggacatgcgctgagtgccaactaccggcgcatgctggcgtggctgctggtttcagccctgctctggtgcgtgggggccgccgcggacagcgacctgcggatgattttctggggaggcgcggtgctgtgtgaatatctctcgcccatggccggttttgcttttcccggcctggggcgctcttccacgcgggactggacgattgaaggcggccacctggccgaacgctgccagcttttcgtcattgtcgcgctgggtgaaaccctgctggcgaccggcggcacgctttcctccaccggcgtctggacgctttctggcctgtcgtcgctggccgcgagctttctgtccgtactggccatctggtggctctactttgggacatcaggcaaagaggcgatgcaggccatcacgcgggccggagaccccgggaaaatgggcgcttattttcactacattcacgccatccttatcggcggcattatcgtgacggcggtggggaatgacctgacgatggcgcacccggaccagcccgtactggccgtacacagcctggtgctctgtgccgggccggtcatctttctgaccggaagtgcagtgtataaaagcgttgtttacgggaaggtgccggtatcgcatcttgcaggagccggtgctctcggcctgacgtcgctcgtgcttccgctgctcactcttgagctggccggctggctcacgacggtggttatgctgataaccgcgtttgccgaagggcaggcacactgccgtcgcaaagccgcaggaggtctgcagtga

SEQ ID NO: 205332 - DNA, 267 bp, Klebsiella oxytoca
atgcatgttgttctgatggttctggggggcttcctgcttcaggcgttttttctgctcaccggcatcctgtggggcagcttcccgcaggcggtgctgtccgcgtgcaggctgtttatccccgtatgggtggcggttgccctgattaacctttacgtcggagtgttccgggcagggtattccctgcgggaggagataccggtgctgttcattatcattgccattcccgcaggcgctgccgccctgctgctgtggcgaatgagccgctga

SEQ ID NO: 205333 - DNA, 774 bp, Klebsiella oxytoca
atgaccgaccatactctcaaaggtaaaactgtccttattgccggcggcgcgaaaaatctgggggggctgatagcccgtgatttcgcacagcatggcgcgcgcgccattgcggtccactacaacagcgatactacgcgtcaggacgctgaagcgaccgtcacggcagtgaaggcagcgggtgcggaagccgctgcgtttcaggctgacctgacgtccgcagccgccatggaaaaactgttttctgacgtggcggccacgctcggacagccggatatcgccattaataccgtcggtaaggtgctgaagaaaccgatggccgaggtttccgaagcggaatttgacgaaatgagcgcggtaaacgccaaatccgcgtttttcttcctgaaggaggccggaaaacacgtcagggataacggaaaaatctgcacgctggtgacgtctcttctgggtgcatacgcgcccttttacgctgcgtacgccggtatgaaagcaccggtggagcatttcacccgggcggcgtcaaaagagctgggagcccgcgggatttccgtaacggctgtcggccccggcccgatggacacgccgttcttttatccggcagaaggcgctgacgcggtggcctaccacaaaacggcagctgcactttctccgttcagtaaaaccggactgaccgatatccacgatattgtcccctggatccgctttctggtgagcgaggggtggtggatgaccggacagaccgtgctggttaacggcggttacaccaccaaatag

SEQ ID NO: 205334 - DNA, 924 bp, Klebsiella oxytoca
atggataccattgaccttttccgtatatttatcagggtggcggaaaatggcagctttatccgggcggcagaaactctgaaccgacccgcatcgaccgtctctgctgccatccgtgaactggaatgcaggctgggtacccgcctgcttcaccggaccacccgccgggtgtcgctgacctcggacggggaggcgttctatacgcgctgtcaggctgtggttcaggacgtggaagatacggaaaatttattcagacaaaccagtgaccaggtgacgggaaaggtgcgtgtggatgtaccgggtcgggtcgggaggcgcattattatcccggcgctgccggatttttttgcgcgtcacccggccattcaggtagagcttggcgtgacagaccgcagcgtcaatctcgccgaagagggcacggactgtgccgttcgtgtcggtatgctgaacgactcgggtatggtcgcgcgcagggctggctatctcaggctcatcaacgtggcatcaccggactatcttgcccgttacgggcacccgttactgccgcaggaactggccggtcacgttgctgtggggtatgcctctcccactaccggtcgccgtgaacgctgggagtgggagcagaagggtgagatattcagcactggggtaaatacctgtctgaccgttaataatgccgaagcctatattgcagcctgcgtggcgggcatgggtctgattcagatccccgagtatgacgtacatgagatgatcaccgagggtgctctgtgcgaagtgatgccggatttcctgccgcgcccgctgcctgtgaatattctgtattcagacaggaggcacctctcacgaccgttgcggttatttaccgagtggctgatgcctctgctgcaggaaaaaatgcagttaagggcgctcagtgatggacagtaa

SEQ ID NO: 205335 - DNA, 657 bp, Klebsiella oxytoca
atggcatggtggggaggacgtggagctgccccggtaatttcccatgaaaatgaggcaattcttctggagcgtgccacggggcctgcatctctgtccacgatgtccagcgaaggtcaggacacagaggcttgccgtattctgtgccttacagcaaaccagttgcacataggtcagaaacagccaataccacaacttacttctcttcatgactggttccacgcccttaaaccagccgcccggatgtatggggggattctgaagcagtgcgcagaaatatctgaagatctgctatcttcgccgcgtgatgtgaccacgctacatggcgatttgcatcacgctaatgtccttgattttgggtcatccggttggctggcaattgacccgaaaggcttaaaaggtgagcgagggttcgactatgccaatattttcacaaatccggaccttggtaatccaacttctggaatagccgttgtcccggaaatatttaaacaacgacttaatatagtgaccgaaactgccggtctggacagagagaggctgctgatgtggatctgcgcatggtgtggattatccgcgtcttggtctttggaaagtaacgacccggtcactgttactacgaaaatagcagagctggcactatctgaacttcactactga

SEQ ID NO: 205336 - DNA, 225 bp, Klebsiella oxytoca
atgagcgaaaagctgacgttaatttttgaagcttttaagatctaccgttgcggctcgaaactgcagttgcgaatttcacccaagcggttgaagaacacgacgcgggtcagcgcgttgcgcgcctcacaactgttcagcccgcatatacgcggcggcgcagctcgcgcagggcaaccgcaagccattctggcgcgggtggctaccgagcatgcgcaacatccatga

SEQ ID NO: 205337 - DNA, 1854 bp, Klebsiella oxytoca
atgccgcattatcgatcaagaacaagtacgcacggccgcaatatggctggggcacgtagcctctggcgggcgactggtatgaaagattccgatttcggcaagccgatcatcgccatcgccaacagcttcacgcagttcgtgccaggacatgtccatctgaaggatcttggtcagctcgtcgcccgcgaaattgaagccgctggcggcgtggccaaagaattcaacaccatcgcggtcgatgacggtatcgccatggggcacggcggcatgctctattcgctgccgtcgcgcgacctgatcgccgatagcgtcgaatacatggtcaacgcacactgcgccgacgctatggtctgcatctccaattgcgacaagatcaccccaggcatgctaatggcggcgatgcggctcaacattccaaccatctttgtctcgggcgggccaatggaggcgggtaaggctgtggtaaaggggcacaagcaggcactggaccttatcgacgcgatggtgatagccgccgatgaccgatacagcgatgaggaggtggccacggtcgagcgggcggcatgtccgacatgtggctcgtgttcgggcatgttcactgccaattcgatgaactgcctgactgaagcgctgggtttggccctgcccggtaatggcaccatcgtcgccacccatgtcgatcgtgaaaagcttttccgccgatccgggcgcctgattgtcgagctcgctcgtcgctactatgaacaagccgacccaagcgttttaccacgccacatcgcgacaagagcggctttcgaaaacgcaataagtctcgatattgccatgggcgggtcgaccaacacagtgctgcaccttctggcagcggcgcgggagggatatgtggatttcaccatggccgatattgatcgcctttcacgccgcgtccccgtgctatgcaaggttgccccggcggtcagcgatgttcatgttgaggacgtgcatcgtgccggcggcatcatggctatcatgagcgaactcgaccgggcaggcctgatcgacaccacggtgccaactgtccatgcgccgacgttcaaagaggcgctgttgtactgggatattacaagaacgcacgacgaggctgtctacatattctatcgcgccgcgccaggtaatgttccgtcgcagacagcgttcagccagtcagctcgctgggaacttctggacacagaccgcgagaagggcgtcatccgttcaatagaacatcccttcaacaaggacggtggattagccgtgttgtttggcgatctcgcgcccgagggctgcatagtgaagaccgccagcgtagatccgtcgatgctggtcttcgagggacgagccgtcgtctttgaaagtcaggaagaagcggtcagtggaattctcagcgatcaggtcgtagccggcgatatcgtggtcgtacgttatgaagggcctaaaggcggccccggtatgcaggaaatgctttatccgacgagctatctcaaatcaaagggtcttgccaagtcctgtgccttgctcaccgatggacgcttttccggcggcagttcagggctgtcgatcggccatgtttcgccagaagcggctgaggggggcttgatcgcccttgtcaaaaccggagacagaatcgtgatcaacattccaaaccgttccattcacctcgatgttcccgagcagacgctgaacacccgcagagaggtcatagtggcacgtggcccacatgcctggacgcctgccaatcgccaacgtgtcgtctctcctgcactgcaagcctacgctgctttgaccaccaatgcagcgcgcggtgcggtccgagatgtcactcaaattaagcggagttga

SEQ ID NO: 205338 - DNA, 936 bp, Klebsiella oxytoca
atgaatatgaatgttcttcaactccggcatttcatcgtcgtggcgcaaactctgcattttggcaaggcagccgaacagctaaacatgacgcagccaccactcagccagtccattcgtgcactggaaaagagtcttggcgcccccctcttcgtgcgcagcaaacgctcggtcgcattgacccccttcggtgcgcagtggttgccacatgtgcgcgaaacgctcgatggcgtcgatgcgctcgccaccattgcaaggcgaatccgaacaggcacatcagggcggctcgacttttcctttgtcagcaccgtcgactatggactgcttcctaagttggttcatcgcttccgcgaactctatcccgatgtcgaactcggcctgaccgaagccacgagtgacgtgcagatcaccgcgctgctcgagggcaagagccatgctggaatcattatcccgcaccgcgaagcgccgcttcccgctacgcttagctatcttcctctagccagtgagccgctgatcgctgtggtgccggaaggctggctcaaagatggtcgcctagcgtccattgatggatcgctttccgcaaatggcgtggtttcgtccccgttgatcgtctttccccgacgcgttgcgccatccttccacgatctggtcactgaatattatgcagcttgtggcggaagggttcgtattgcccagcacgcgatccagatgcagaccatcatcagccttgtatcggccggcatgggcatcgcccttgtcccagcgtcgctgcgcaacctggcacgcccgggcgtgcgttatcttgatttgaagaaagcccccccaaagctcgagacgtgggttgcctggcggcgtgatgacgagacgccgacgctcgtcaatttcctgcaggtggttactcagctgcgtactttcagcgaggacgtaaccgcaagttga

SEQ ID NO: 205339 - DNA, 348 bp, Klebsiella oxytoca
atgaacttacacctgaccgaattttcagcccatccgggaatgctggctacagcagaatcagagcacgaatactggctgagccggcagaaagcagcggttaaagccccctcagaaatcgacgttcacacgttccatgacgcgctgggcctgatgtatccgctcaactggtcaacaagtgagaacggcgagtgggaaacgttcatgctgcaggagatggtctgcggtgacgtgacagagatatatgcccgctacggagccagatatttccggctgcgggatgtgtgcaacctgagccatgcgcagatcacaacgcgcattaaggaggaatttaacctgttccggaaatga

SEQ ID NO: 205340 - DNA, 1167 bp, Klebsiella oxytoca
atgacaaggaagacgcctgcggtggcggggaaatctgccgccttaccggctggctatgccggcatccatggcggcatcgtggagctactggatgcggcgcgccaggcggcggcgcgcagtgtcaatgcgctgatgacagccagctattgggagattggccgccggatcgtcgaggcagagcagaaaggcaggcggcgggccggttacggcgagcagttgatggcgcggttgtccgcagacctgacagcgcgatttgggcgcgggttcagcccggataacctggagaacatgcggcgtttcttcgtcgcttacccctttgaggcaatttccgagacactgtctcggaaatctggagacggactacccatcgagaattccgagacggtgtctcggaaattcgacctctccgaactggcccaggccttcaccttgccgtggtcagcctatgtccggctgctgtcggtcaaggatgaccatgctcgccagttctacgaggtcgaagcactgcgcggcggctggagcgtgcgtcagctcgaccgacagattggaagccagttctatgaacgcacagccttgtccaaggacaaggcggcgatgctggtcaagggctcggtagccaagcccgaggatgccgtcacgcccaatgacgccatcaaagacccgtatgtgctggagttcctcgacctcaaggacgagtattcggaatctgacctggaggcggcattgatccagcgtctggaagatttcctgctggaactgggtgaaggcttcaccttcgtcgggcggcaacgccggttgcgcatcgaccagacttggtatcgggtggatctgctgttcttccatcgcaagctgcgctgcctggtcatcatcgacctgaagctgggcagcctgacccatgccgatgtagggcagatgcatatgtactgcaactatgccaaggagcattgggcctacccggacgagaatccgccggtgggtctgatcctgtgcgccgacaaaggccatgccctggcgcggtatgcgctggatggtctgccgaccaaggtgatggcggcgaactaccggacggtgctgccggatgctgaattactacaaaaagagctggagaacacgcggcgtctgctcgaatctcgcggaacgcggtctctcaaggacgacaagcagtag

SEQ ID NO: 205341 - DNA, 510 bp, Klebsiella oxytoca
atgtcgcaactgtccttttcctcgttcgatgatgctttgctggtgcgtgacgcccaagggcgctacatgccggcatcggtggatcaaattctcgaagcggcgcgccaggccattgagctgaagatgcaacgtggtgctgagttcacttccccggcgctggtcaaagagtacctgcgcaacaagctggcaggctttgagcatgaagtctttgcggtgctgtttctggatacgcgccaccggctgatcgagtaccgggagatgttccacggcaccatcgacagtgcatcggtgtatccgcgcgaagtggtcaaggaagcgctgcggatcaatgcggcggcggtgatcttctcgcacaatcatccgagcgggaatcctgagccaagcagtgccgacaaggtgctgacgcagcggctgaaagaggctctgacgctggtggaggttcgcacgctggatcatgtcattgtggcgggagccaatacagcgtcgtttgcagagagagggctgatctag

SEQ ID NO: 205342 - DNA, 828 bp, Klebsiella oxytoca
gtgttctccgagccgagcccgcaggccgacacggaagcatggagtatcttttcgcgacaatttgatcacccgtatgacagcatctattgggaggaggtccacaatctcgctggcgatcagaagcggcagttcctcttcaaggcactcaaaggggcgagcaccgagtatgtttcgtttgtcggcattctgattcgtcagctcgcagacttcggtgaccccgcagtttctgaggctattgagccatggcttaggttgccagccaaacggtcggtcatgccacaagatgcggtcgaggcatttttcgcagcgcacgaagcgatgggaattttgagccttccacttcctacagctccggcatcgcctgtcgatgtcgatgtcgatgaaactatgcgagcctgcggggaattagcttactgggcttgccggctgagcgattacgaactcgaatcctcgctgcagacgctcagtgcgagaaccacgttactggctcactccgcttcggcaagtgccggagcactgttgtcttctacatctcgaatgttgtcttcggatggagcaagaactcacgttgcaaagagctatccgaatacggctctggttgtctgtcgcgatgcactaagcaatcgcgagttgcagaagacgtacgaagaacatgggttcatggatagtctggcgcgcatcgcctccttttccattcaagtgattgggcagtttggagacgccgacgaccttcaaaatttgcgtggtctatgcgacgacgaaggactaggtcgtgaggcactcgacgcgataaagaagattgaagaccgtatccgttaccgacagtaa

SEQ ID NO: 205343 - DNA, 2949 bp, Klebsiella oxytoca
atgcgcaaacatgaacttttgaccgagcacgaacggcgacagctcctatctctccctgacaatcgcgatggtctggcccgcgtttatacttttgagccggctgaactcgacctgatccgggatcggcgcgaagatcacaacaagctcggtttcgctctgcagctttgtacccttcgtcatccgggtgtgcctttggctcgaatcctcagctcgatcccggcttcgatgatttccttcgtggcagagcagatcgacgttcgacctgatgatcttgccagctatgggcttagaagccagacgatgacggatcatgcgcgtgaaatagcccagatgatgggcatgcgggcggccgaacgtggcgatatccctatgatgatcgaagcgggagaggtcgccgcgacggcgacagacaaaggaatgccgatcgccatgcacatcatcacgacattgcggcaggccgggatcgtgcttcccacgctgtcaacaatcgagagggccggaattgccggaagggcgcgagcgcgcaaacatgcatgccaggctctcatcggttgtctgactactcgccagtttagcgttctcgattctctcgttcagattgacccaaaaatcggcctgtcgtctctggcgtggctgaaggccatgccagttgcagcgaaagccgacaacgttcgcgatattctggaacgtttgtcgtttgtcagggcagttggtattcccgctgccagcagtgtggccctgcatcccgaccggtatcgccagttcgtccgtgaagggcgtatgtcaccatcctatatgatcgaacgctacaccgcttcccgacggcgagcgacattggtcgcattcctgatcgacgccgaggaacgcctgacagatgccgcgatcgatatggcggacaagctgattggttcgatgttcactcgcgccaagaattccaaggcccggaaatatgaggcgaccgcgaaggatgtgtcgcggttgatgcgcctgtttcgaggcacaatcgatgcgttggcggacgccatcgagaccgacagcgatccgatcgacgccatcaatgcatcggtcggctgggcaaatctgctacgagcgcgtcacgaggtggcagaaattgcggacactgcggatcaggatcctctgattgttgccactgatcgctatgcgacactgcggaaatttgcgccggcgctgatcgaggcgcttgagttcaaggccagtagaggcagcgcgcggaccgtttcggctgtgagggtgctccgagaggctcatcgaactggaaaacgagatttgccgactgacgcgccaatgccgttcaaaaaggactggcagaaaattgtggtcggcccggacggcaagatcaatcgtaagctatacgaggtcgcgacactcgcgcatctacgcaataagctgcggtcgggcgacgtctgggtagagcgctcctcgtcatatcgccgcttcgacagctatctcctgcctccgcaaatggcggcgccggtcgtcaaagatttagggctgcccgcatctgctgacgattggctggagcagcggggccgggaattggactggcggctgaagcggttctcaaaacgtctccagaaaaatcaggttgaaggcgtcaacttcaatggaagccgcctgagcatcacacccttgaaatccgtggtttccgccgacgcggaaaccctcgtcaaccggatcgagggtatgatgccgcgcatacggatcaccgagttgctgcacgaggtcgccgaccagaccggcttccttggagcgttcacgaacctgaggacgggtcagacatgcccgaacgacagtgcaattctcgccgatgccaccaatctcggcctctcccgcatggcccgcgccagcgaaggcatcacccgagatcagttgatatggaccaaggacgcctacattcgggacgatacttataccaccgccttatcaacgatcatcgatgcgcatcaccagttgccgatcgcgtcggtctggggcgatggcacgacgtcaagctcagacggtcaattcttccggggcggaaagcgggcaaaaaccggcggtgatgtgaatgcccgttacggcgtcgatccggggttcggattttatacccacgtatccgaccagcatggcccttatcatgtgaaggtcatctcggccgccacccatgaagcgccctatgtcctcgatggtttgctgcatcatggcacgggtctcaatatctccgagcattacaccgatactggtggcgcaaccgatcacgtcttcgcgctctgcgccgctcttggattccggttttgcccgcggttacgcgacttcccggatcggcgtctgattccgatcgagccgaccggaagctatccggatctggcgcctcttctcggaaagagggtccgcgcggacatcatccgtgagcattgggacgatgtgctgcggctcgtcgcctccctgaagtccggccacgtcgcgccttcaaccatgctgcgaaagctcgctgcttacgagcgtcagaaccagctggatgtcgcccttcaggaaatcggcaaggttgagcgaaccctgttcatgctggattggctggagaatccggcactgcgccagcgttgccaagccggcctgaataagagtgaacagcgtcatgcccttacgcaggcaatctgcacgttcaggcagggccgtatcatcgatcgcagccatgaggcccagcaataccgcgcgtccggcctcaacctcgtcatcgccgcgatcgtgtactggaattcgacttatatggccgacgtgcttgcatatctacgttcgaccggtaaggtcgtggatgacgcgatgatggcgcatacctcaccggtcggatgggagcatatcgcattctccggcgatttcctctgggagcaggcggctagacgtaggtcgcggaaaacacttgtcatctctgacggagcgcgggcagcctga

SEQ ID NO: 205344 - DNA, 477 bp, Klebsiella oxytoca
gtgttcaccgatgtgaagtccggcaagagcatggatcggcccggtctggcggatcttattgcctatgctcgcgctggcgacacgctagcgatcgttcggctggatcgcctcggccggtctttggccgaactgcttgagaccgtgaagatgctgcgcgagcgtcagatcgacctgctgagccttgaagagaagatcgatacgtcgtcggccgccggcgagctgatctttcacgtgttcggcgccattgcccatttcgagcgacggttgatttcggaacggaccaaggatggcatcgtagcggcgagagccaaaggcaagcgccccggccgccagcccctcgacatgaaaaagatagacgcggcgatcaaactcatcgaagctaaaacatccccgaccgaagctgcaaagcagctcggccttggccgctcaactgtctatcgggaattgagacgtctcggtattcagcgaactgcctga

SEQ ID NO: 205345 - DNA, 1407 bp, Klebsiella oxytoca
atgggcggtgtgaacggcagttggacccaggtcggatcgtacggtagtcgaaagctacgcaacggatacactcaagcccttgacgccaaaaacgtcttgcgagatgcagtggcagggctattcggcactatttctggttatcccaacgccttgctagccattgcgccatcaattccttccggatcctcattgccaccaagtgatttcaaggtgtccattggtgggcaggatgtgatcgaggcggtgctcagcgcaacgtctggagctctgctgagtgaaaagcaatgcgaagccttagcagctcattttggccttgagcgtgtatcaggacgagatgcggcaattcatgaggcagtactcacatcagaacgaactctgttgagctatgagtcttccttcttggagtttcacgggccaactggtaagcgacttgaaaacgatcaatacaaccttgacgacagactgatttcggcatctgaggttctggaaaaagcgctgttgtcacgatccgcgctcctgatccgggggccgtcaggctgtgggaagtctttgctgggtgcacgcatcgccacggaatgtctacatgccggagtgctaccgatccacattcaaggcaaagactttgagggcaagctacagaagatcattgacgctgaacttggactactcggcacttccgcacgcgatctcctaagtgcgggccgacaccttggaaggcagctcgttctgtttcttgatggctacaatgagtgtccggaacctttgcgcactgttttgacacgagccctacaagcattctccttgcgctatggagcgggtattgttctaacctcacaaggtgccctggatagacaagatcttctatcaattgaggagattctcgtcagtccgccacaatccgcgctgaagtcacggctcgcaaaacttagcccggaagatgaaaactttacgaactgccaagccctccttgaaatagcgcgctcaggtctcgaagcagaacttattggacaggccgccgcatctctgcccgccggggcaagtaagttccttatattcgatacggtcgcccgaaggcgcctcggaaattccgcaacggcgggaactcgcgctctgtgcgggtttgctgaagaactaacctcacaaactgcattcagtttttcggtacgagaattcgacaggttttgcgatgcaacgggagtgacagacacaacgcggcgcgtgatcctcgagtcgcatctcgtgtctcagcgtggcgagagaataagcttctcccacgagatgtttttctccgccttcattgcggaatttttggttcgcgccgcgcgcaaagattcggagcgtgtgcaagctgtgctgcaatccccaagggttccatggctccaaggttctcatcattggggcgattga

SEQ ID NO: 205346 - DNA, 237 bp, Klebsiella oxytoca
atggcgctcacgcaccgccgttcgggcatattcagccgatctgatatcgctggcctgacccttgcctatgcgcgagaatgcctggccgtggcccgggctgaaggcgccgaactcggcgacgaagtgccgcaggagattctcgaaaaattccaggccgcaccggcggacatgagcacctccatcctcacggatcgggaagcaggacggccactcgaatgggatatccgcacggcatga

SEQ ID NO: 205347 - DNA, 999 bp, Klebsiella oxytoca
atgcgggcctgcgtgcgcgcgacgagctgcttcggcttctgccagccatcgaccattgagacgggcatcgcgatgactgcattgcgccgcgcgcttgccgcgcttctcatctttctcggatcgtactgcgtccaggcccagaccgtggcgctgacattcgacgacgggctcgatcccctgaaggagcccgcggccccgtcgtggaaccgacagatcctggagacgctccgcgatgcaggcgtgacgtccatggtgtttcccacacttgtgcgcaccggccgggcgcagggactggacctcatccgggactgggcgcgcgcgggccacgcggtcggcaaccatacgtcccggcaccgcagcctgggatcgccccaagtgccgcttgcggacttcatcggcgatgtcaaggaggccgacgccgtgctgagccagatcccgggctggacgaagatgctgcgctttccgtatttgaaggagggcaacacgctggccaagcgggatggcatgcgcctgtggatgcaggccgcgggctaccgggccgcgccggtttcgatcgacgcgagcgattggtactacaaccaggtctatgcggcctggctggacgaaggaaatgccgacaaggccgatcgcgtgaaggccgcgtacatcgcgcatctgctggaccgcgcggcctactacgacggcttggcccggcaggtcctcggccgcagcccggcccatgtgatgctgctgcacaccagcaggatcaacgccgccgctctccaggaattgatcgcggcattccgggcgcgaggatggtctttcaccgccgccaggaccgctttcgatgacccgatctacagcgcgcagatcgacaccctgccggcgggcgagagcatcgtctgggccagcgccaaggctgcgcagattccagggctgcgctatcccgccgaggactcgatctatgaggagcccaagctgcgcgcgctggaactggtaccggcgcgcatgctgccgtag

SEQ ID NO: 205348 - DNA, 807 bp, Klebsiella oxytoca
atgtgcaatcgcatcctccaggtcgctgcggtatcagtggtcttccttttttcagcgcctttcgcgaccgcgcatgagctgtgcacgctgatcgccgatgccgattccggcagggtgcttctgcagcgcggctccgcctgctccgggcgcgtgacgcctgcctcgactttcaagctggccatcagcctcatgggctacgacgcaggcgtgctgaaggatgctgcacagcctgccttgtcgtatcaagcgggatatccggattggggtggtgatgcttggcggcgcgacatcacgccaaccacatggatcaggaactccgtcttctggtactcacagcaggtcgtgaaacgcgtggggcaggagcgcttcgcgcagtatgtgaaggcctttcaatacggcaatgccgatgtctctgccgtgccggtcgatgatcctggacagagcggcgcctgggtgatgagttcactgcgcatctcccctaaggaacagcttgcgttcatgcgcaagatcgtgcgccgccagttgccggtgagtgcgcatgccttcgacatgaccgccctcatcgcgaactacggtgcaccggtcgacggctggaccgtgcatggcaagacggggaccggctcgccgggccgcaacaatcgctatgacgcaagccgcgcttatggctggtacgtaggctgggcgaccaagggcgcgcgaaggctggcatttgcgcgcctgatccaggacgagcaggctatcaagcccaatgcgggcctgcgtgcgcgcgacgagctgcttcggcttctgccagccatcgaccattga

SEQ ID NO: 205349 - DNA, 384 bp, Klebsiella oxytoca
atgaacaacaggcttgagaacatcggcatgcagatagatgccggaaaggacgtgaaggatcgactgcgcgccgatctgcgggttgccatgaagggcaggcgcgccttcgaggcaaaggtcatccgggtgctcgtcgcggcaatcgacaatgccgaggcgccgcccgtccaggccgggcagactgcgttaatccagcatcgtttccataccggatcggcagaagtggagcgacttctactgagcgagtctgatgtgcgtcaagtgctgttgatagagattgatgagcgcgagcgcgcggcgatggaactggagcatctaaacatgacggagcgcgccaaagccctgcgcgcagaggtgctattcgccaggcgctatctggagtga

SEQ ID NO: 205350 - DNA, 426 bp, Klebsiella oxytoca
atgaatgccagccttgtcaccgtcgagcaagcggccgagcacctgaatctgcaccccaagaccgtgctgcgctacatccgcgacagacggctcccggcgacgcgcgttggaaagtcctaccgcatcgttcgctccgagctgaatgcctttgccggcgtcccgagcgtcgagtccgaagctgcgacggcaatcgtgcggactacctgcatcgttgacatcccccatatcccggggaatgaggccgagcgactggcaaccttcctccagtccgctgccttgtcccgtcctgccggcgcagcgccactgcatctccaaacggcgttcgacccgctcgccaagagcatgaaggtcgtagtgatcggtgatccatccagcgcagccaagctcttagagatgttgcagtttcatatgagtaacagcttatga

SEQ ID NO: 205351 - DNA, 879 bp, Klebsiella oxytoca
atgaatgacgtggtttatcgaagcgccgaggcggctgcggctgttgagggccaatacagacgagtcctggagcgatggccggttccgaagaccgaactgcacatatccactcgtcagggttcgacgttcgtcgtgatctgcgggccggaaagtgcgcctcccgtcgtactgctccacggctcaatggccaactcggctgcatggctacccgatgtggcattgtggtcaacgaagttcagactgttcgcgatcgacgtgatcggcgaggctggcctcagtgcaagagttcggcccgaccttgccagcgacgcccatgcgttgtggctcgacgaggttctcgaacggctgggtttggtatcggggcaaacgcgcgttgccatcgtcggcacgtcactcggcggatggctggctcttgactatgccagcagaaggccggcaaacgttggcgcgttggcgctgatgtgtccgtccggaatcggccgacagaagaatctcctgctgaagatactgccgctcctcctgctcggttcctggggcaagcggcgaatatggaaactggtgttcggtccagctcccaaggtcttgccccaggaaatgcaaccgctcgcagaacttatgaaaagcgtaggactggccgccaagccgcgagtgatccgcattccacaactaacagatgcccaactccgtgaactcggcatgccgatcctgacgatcataggtgagcgggacgtcctactggactcgcgagacacaagggacaggttgcagcggaccgttcctcacgcggaaatccggttcatcgaagcgggctatcactttctcccggaccaggcgccgcacgtcatggattttctggaacgaagcacgctgaagtcatga

SEQ ID NO: 205352 - DNA, 945 bp, Klebsiella oxytoca
atggaattgcgacatctaagatgcttcatagcagtggccgaggaacttcacttcgcacgcgccgccgagaaactgcatatcgagcaatcaccgctgtcgcgcaccatcaaggaattggaggaagagctgggcgagcagttgttcatccgcaccagccgcagcacgcggctgacgcggtcgggcaagctgttccttgagcatgtgccgcgcgtgtttactgctttacaacaagcacgcgacagcgtgaaggcggcgagtaatggcttccacggccagttgcgcatcgcgctatccgacggcatcacgccgtcgcgcctgccggctttgctggccatgtgtcggcaggaagaacccgagactgatatccgtttgttcgaggtgccgctgtcgcagcagatcaaggggctgcacgacgacctgtacgacgtgggtttcgcccagtccgatgaggtaggcgaaggcatcgcggccgaagcggcatggagcgatccattgatggttgccgtgccagcgcgccatcccttgctcaagcacaagcgcattcccctggaagaaatgatgcggtacccgctggtgctgtgcgacccactggcgtgcgaagggcacgcgcgccaggtcgagcgggtgctgcgccggtcggacgtggagccgctgattgccgagcgcgtggcctcctgcgatctgatgatggcgctggtttcggcaggctttgcgctggggctgaccggcgcaccccacatcgcggccagccgtgcgccggacgtggtcgtgcgtcctttggcgggccgctcccccgtactgacgacctatgtattgcgtcgggagggcgagtcttcggaagtgctgtcccgattcatcgagcgagtgcatgccatcgacttgcccaaaggcgcacggcccgcgccgccacttgaacctgatctccaggaggacatcgagccatga

SEQ ID NO: 205353 - DNA, 798 bp, Klebsiella oxytoca
atggccatcggccgcctggaccagcacgaacgatatcgcatccacagcctgcgcgaggccggcaacagcctgcgcgagattgcccagacgcttgcgcgtgcgcccagcaccatcagccgcgagctcaggcgcaatgcccgtggcgggcactacgagccgcagcgtgcgcagcggttgagccagcgccggcgcacgcacgcaagccgccggccacggatcatgccgcaggccatcgcgttgatcgagcaatgcctgcgccaggactggagccccgagcagatcgccggaagcaccggccttgccagccacgaatggatctacggccacatctacgccgatcagcgccgtggcggcacgctgtaccaaggcctgcgccgacctcgacggcgacgtcgcaaacgccggctgcgtgacggtcgcggccagctgacgggccggcgcagctggcgcgagcgccccgacgttgtcgagagccgtgcccgtaccggcgactgggagatcgataccatgcacgccgccagcggcaccgcggtggtgatgacgatgaccgagcgcggctccggcctgcagttgctggcgtgctcgccggactgcacggctggcaacgtgatgcgctccatcgtccagcgcctgggccgcttccgccacatggtgtacacgctgacggccgacaacggcaaggagttcgccgagcaccggttgctggcagcggccctgcaggccgaggtctactttgccgatccatactcgccatggcagtgtggcagcaacgagaacgccaacggcctggtccgctag

SEQ ID NO: 205354 - DNA, 1275 bp, Klebsiella oxytoca
atgagccaggacgacacccccgacctcgccacgccacaggcgggcaaggtcgcgcccgaggctgtggcgctgcgcgcccagccgcgcccggtcacgcgcctgaaccggcgcacgctggccatcctcgtgggcggcctatcggtcgccgtgctcggggccacgatctggtcgctgcaaccgcagcggcgcagcgccgatgagcagaccgagctttacaacgtcgatcgcgtgtcgaagtcggaagggctggacgggttgccggcggactactccaagctgccgccggccttgccgcctgccgtgccggagctggggccgccactgccgggcgatcttggcccggccatcgtgaagtcgcagcaaccggtgacggccgcctacgcggcccccggccatgaccccaacgacgcgctgcgcaaggaggcggacgccgcagcaggttcctctgtgttcttccgctccggttcgcagaagacggccaccgcgtctgcgcaggctgcgcctgccggcctggccgccaacgcggctttcgacccgtctgcggcaggcccagcctcgacagcggcccagcctgccgacccgaccgccgtgcagaaccggcaagaccagaaggaggcgttccagaaaaccggaaccacggaaacccgtaattccggcaacctgaccctgccggcttcgccgtatcaggtcatggccggcacggtggtcgtcgctgcgctggtgacgggcatcaagtcggacttgccgggcgacgtgatcgccacggtcacggagccggtctatgacacggccaccgggcgtttcctgctgatcccgcagggttcgcgcattctggggcgctacaacagttcggtcagctacgggcagagccgcgtgcaggtggtctggaaccggatcatcctgcccgacacgtcatcgctcacgctcgacaacctcgtcggcaccgatccggccgggtatgccgggctggaagacgacgtggactggcattgggatcgcatctttgccggtgcggcactgaccacgctgctgggcatcggcgccgagctggccgcgccggagaaccgccaagacggcgatctcgtcatcatcgccgggcgcgacagcttgcaggacacggtgaatcaggtcggccaggaagtgacccggcgcaacctcaacatccagcccaccttgaccgaacggccgggcctgccggtacggatcatcgtcaaccgcgatttggtactgcgtccgtaccagccgctctttttcaacaaggggacttcgcgatga

SEQ ID NO: 205355 - DNA, 252 bp, Klebsiella oxytoca
atgagtacgaccaagaaattgcggcttggccctctgcctcgccaagaagtcacgaagctgaccttcgcttgcccggcaagcctgaaagccgacctcgaccgctacgccgcgctgcacgcgcaggcgtatggcgagactgtcgatgccgtgacgctgatcccgcacatgcttgaagccttcatgacgggggatcgaggattcaggagggaaggcgcgggcaaggccgcgccgccgaagccgaagccgagctga

SEQ ID NO: 205356 - DNA, 213 bp, Klebsiella oxytoca
atgagtacacgaaatgtcaacctcaaaaccgccgctcaggaatcttccaggaagatgggggaaaaaattgcacgaattatcgatcgtggacacgaaaacgcggccatgtcgcaggaagctcatgcgcattacggggataaattcacccgtactgatgcatacgtgtatttcatccgtggcgtactaactgaaatttttcagaaatctgagtga

SEQ ID NO: 205357 - DNA, 408 bp, Klebsiella oxytoca
atggtcactactgaacatctcgatgcgtatctcaaagccatgggcagccgtcatgttgaaggaacccgagtccacatcgcggataacgttacactccgcagcccaatcgttcctgttccctttgaagggaaagagcaggttgtcagagtccttacccagctccttgacaccgtggacgcctttgagccagaacttcttttgcgcgacggatcagactttgtcgccgttttcactatcaggttcggtgaccacactattgatgggatggatcacatacatctaaacgatgccggacttatcgacagcatgactgtggtttggcggccactggcgtcagtggtcgcagtgcagcaaaaacttgctccgaaactgggaggcaaaccgatgaagctggttaccctggaataa

SEQ ID NO: 205358 - DNA, 711 bp, Klebsiella oxytoca
atgtttctcgaaaggtgcagccgcattctgggggaacttcaggcggcagaagatgaactcagcagcctgactcaacaccctcgcggacgattaagggtgggtctggcactttcggcagggctgccgctgcccgtcctgtcggcgttcatggcacaccaccccgggatcgaactcgacctggattttaccgatcggcttgtcgatgtgattgatgaaggatttgatgtggttatacgggggaactcgcttcgggattcgcgtctggtatcccgcccgctgggcccctatcgcgctatcctggtcgctgcaccggcctatctgaaagaaaaaggtgtgcccgtgaaaccgatcgatcttttgaatcatgaatgcctgcactatcgctcaacgcctaccggaaaggtgtacccgtggccgctggaacactcagatttcgcagccgaagggttttcacttcccctgacgatggtatgtaatagcctggacgcgctgctgtatatggccattgcggggcgcggtatagcctgcataaccgacttctctgccaggaacgcggttgctgatgggcgtctgaaaacaatactggatacctgcgtaaccggctccgatactatccatataatgtggcccagcaaccgaaaaatgacgccgaaagtgcgcgtcttcgttgactttatgctcgcccatttcggcgattatcttgtcacttaa

SEQ ID NO: 205359 - DNA, 1389 bp, Klebsiella oxytoca
atggccattaattcatcaaccatagcatcgagttcaccgtcacgtattcacccggctggcctgctttcaatcgggctgggcagcatcctgagctcactggacttatttgtcgtcaatcttgccttcccgtcgatcagccgaagttttcccgaacaccccgaggccacactgtcactgattctgacgatcttctcagtctgttttgcctccactctggtgctgagcggccgttttgctgaccggtacggccgacggactattttctcggtaggtctggccctgtttggtctgtcgagcctgctctgcgggctggcgcccacgctctggatactcatcgccgcgcgggcaatacagggggttgctgcggccatgctcatcccgacaagccttgggctactactgggtgcatatcctcaggagaagcataagcagatgatcgggttctgggcagccaccggctcggttgcggccgcggcgggccctgtcctgggtggctttctggttcaggcggactggcatctgattttcttcatcaacgtgcccatcgtgattggggctctcatctgtacccgatacctgaaagaaagtgcaccgcataccgggcctgcccccgatattgctggaagcgtactcctgacgtcaggaatagctctcctcaccgccaccatagctcatacttcggaatgggccacccacaaagccgctattttcgcgggaagtatgggagccatcgtcgttctgacggtatttgtgtaccactgcctgaaatcctcccgtcctcttctcgacctgagtctgttccattcccgggctttcacaacggcaacaataggcatgggatgtttttatatgagttttgccgttatgttacttggcggcacgatgtttctgacccaggcatggcacctgaccgccgcacaggcaggtcttgcttttgctgcgggacccggcaccgccgttgtcgcctcgctgcttatcgggagggtaaaggccactccacagaaccttgctgtcgcaggttccgtactgtacttcctgagtggactctggtggtttttaacgctcagcgaccataccgataatgcctggttactgaactatttgcccggactgattatgaccggactcggtgcgggtatcgcgcagacgggctttatggcaggtgcggtttccgggcttccggcccatatgtattcgacaggaacagggctgatcaacacctcacgccagattggcgcggcgatcggcgttgcgctttttgttgctctaagcggtaaagctgctgcacccgaatccttccatgcagcctggctgctgatgagcctgtgtggccttattgcggcgctgtcggcgaattacctgcgccgcaaaatttccccgaaaaagtaa

SEQ ID NO: 205360 - DNA, 402 bp, Klebsiella oxytoca
atgagttctccctgctactgtaaaaatctgcgtgatttcacacgtaagatgaccgcgatttacgatgccgagctggatgcctatggcatcaatattgctcagtattcgttgatgaggctggtgataaacaataatcccgtaagccttacccggctcggtgatatcgccgggctggatcgttctacggtaggacgaaacgtcaccgttctggcgcgtcaggggtggttgcaggttgaccgtgatggtatggacaaaaggcagcagcaggtctctatcacccctgaaggtgaagcgcttatcagagacgcgtttccgtcctggcagcgctgccagcacatcattgaagaacgtcttggcgcggacaacgtcatggcgctgcagaacatttttcaccaaatctga

SEQ ID NO: 205361 - DNA, 1011 bp, Klebsiella oxytoca
gtgaaatatcagatccttggcaatacaggcgttcgagtatcttcagtagccctgggaacggcaaattttggcatgcggtggggatacggcgcatcgttagacgaaagtcgggcgattttagatgcttttgcagaggatggcggtaactttatagatacggctgatgtgtatcagttcggtgaatcagaagagtttctgggggccctccttcagggacgcagagagaatttctttcttgcgacaaaatattcgagcggcgcatctaaagcagctggcgggctggttacaggcaacagtcgccgggcgatggtgtcttcggtggagtcgagtctgaagcggcttaaaaccgatcgtatcgatttatactgggttcatcatcctgacgatattacgccgtcagaagaactggtacgggggcttgaagatctgtccagagccggaaaaattctttacgccggtttgtccaatttttcggcctggcggctggcacgcgcagcaacgcttgccgagctgtctcgcgcggtgccgattgtcgcctctcagttccagtacagtctggtttcacgtcagcccgaacgtgacatgctgaaagcctgtcaggcgctgcagataacacccataacctggtccccgctgggcggtggaatgctcacaggcaaataccgcgccggtgaaaaaggcagggcagaagggatgggcggaaaggtattccaggcggaaaacaacgaacagcggagcgccattcttgacgaggttctggctatagccactgaaaacggggcaagcccggaccaggtagctattgcctgggttgctgcacaggaatgtatccctattattggcccccggacccaggcgcagtacgtcagtaatgtggggttttcaggggcgaatctcacagaggcacaaatcgacaggctgaacagcgtcagccagtttgacaatgacattaaaactgcccccgtgcaggcattactggggcatgttataccgggtaaacccgtggcataa

SEQ ID NO: 205362 - DNA, 588 bp, Klebsiella oxytoca
atgtcactttcaattgctggcgcttttctggcttatactttcatcactgcacttaccccaggtcctaataacattctggctctgagctgcgtgcatactcacgggtttcataaaagcctacgtccactggctggcatgggggctggatttctcattattatgctcctgtgcgccttatttaccgtggcgataacccggacactgccttccgtaacccactggctgacctggttaggcgtgatttatattctctggctggcactgaaaatagcccgaagccagcctgcaaataacacccgttctgacgtcccactgagcttcagaaccagttttttactgcagtttgcgaatgtaaaaatcatcctttatggagtaacggcgctctctactttcgtcattccctataccagcagtcaggtctggattattctgatcagcgttctgctggctttgatcggtgtttttggcaacctctgctgggcggcagcaggacacctttttcaggcgcttcttcgccagcacggtcgcctggtcaataggatccttgcaggggcactggtactggtcgcagtggatatgttgttgtga

SEQ ID NO: 205363 - DNA, 879 bp, Klebsiella oxytoca
ttggacttacgtcgtttgttaaccctcaggaccattctggaagaaggatcgtttgccaaagcagccagtaaactttgctgtacgcagtcaacggttacatttcagatcagacaacttgaggccgaatacggcgttcagctgtttgaaaaaattggtcgccgcatggtgccaacggatgccgccaggaatatgatgccccatattcatgaaatgatggtcgttataaatagcattaagcaggctgtccagcgaaacgatgaaccggaaggtgaattgcgccttgccgtgggcgagacgctgctctcctacaagatcccgcaggtgctgaagagttttaagaaaagagcgccgaatgtgttgctgtctctgcaatcccagaactgttatacaatccgtgacagcttgctggccaatgaaattgatttggggattttctatcgtgtgggcaatgatgcttctctcattatggaaaactatggcgaacatcctctcgtgctcgttgcctctcccgaattagcactggttgatttcactcggggaaatcagcatatccccgttagtttcattattaatgaaaaacaatgtgtattccgtctgatgtttgaatctgtcctcagacaaagaaaaataacgattgactccaccattgaactcatcagcattgaaagcattaagcagtgcgtgatggctaatacaggcgtgacgtacttaccgcgattcacggtggagaaagagctgcgtgccggactgttgcaagaacttcctctgtcaccacgccctgaaaccctttctgcagtgtgtgctcatcactcaggtaaggtcattacgccagcaatggagctgtttattcagtccttacgggagagtctggatgcctga

SEQ ID NO: 205364 - DNA, 1017 bp, Klebsiella oxytoca
atgatccttgccatgacgattgctcaggttattggcgtgatcccgtttacacgcctgggcaaccgctttaactcggtcacttacttccagcttctgacgctgactcgttctatggctttactctgcatagtactggcatcatggtataaattgccttttacggtattagtcatacttgccagtctggccggactggtaaatggtgcagctcaggggtatttaagggtgatattaaaccacgtggttaacgcaaaccgtttaccacgtgggctgggtatggccgcgactctgaatgagatggtttttgttctggctcccgtggccgcatcaggactgggaagcatctccccggtgttttctctgctcgtcattaccgctctgggtatacttcccgttgttctcattccccggcttaatatccggagctcccctgccgtggttaaaaccaggcaaagagcactgacaagaccggttgctttggtgcttatatgctctactgcagctgaagcaaccgtcgcagccgttgagataggtgctgtggcgttagccctgaactttcggtatgagccattttatgccatttttttcaccgttcccctgtgccttgcctctgtcatgggaggagtctgggtcagtatccgcaaccggatgtctgcacccggcacagtacttttacatctgtgtctgatgatgctaggggctttgatggttactgttaatttctccgtcattacaaccattgtgggtgtgatgtgtattggctctgtcattgccccacttggaacacatttttcgcttgtacttgatgaaatgtctcctccgcatctgaaagccgaagtcttcgccttactgcgaacctccaatgccatgggtgtgatatttgcgagtgcccttctgactgtgacatcgctgtcattatcactgttaataattacgatttttattgggatagtcgcttcaggaatggctgttgcagtgctgggtaagaaaagcgtgattgagactgattgtgaataa

SEQ ID NO: 205365 - DNA, 969 bp, Klebsiella oxytoca
atgcctaaacgtataaaaaacagccgctggtcaggttatgacccccgctacatctattctctggtcgttcgccgttattttgttgagatgaagaccaaaacagaaattgccgaagaactcgagatctcacgattcaaggccgcgcgcctgatcgatgaggcgatcgagcaggaatacgttaagtttctttttcccaaacagcagatgcttgatgaagaagtggctcataatatctgcgagaaatacggcctgcaaaaagccgtcgtgctttctgtatcagaatcctggaacagccaggaagaactaaatgagaagctgggtggtatcacagccagctacctgggcaattacctgacagggggtatgaaggtgggtattgcctgggggcgcgttctgtccagtaccgtgagtcagctgaccagcctccctgctttagatattgtgcagctttcaggcgtacatccgggtattgaattcagtcagggtccgatagacctgatacaccggctggcagctatctctcagggaaaggcacatcccatgtatgtccccatgtgggtggatgatgaaaatctggcagaaaaactggccagcgatcctgcagtggttgacacccaacagtattattcgtgcctggacgttgttattactggtattggcgcctggaaaaccggctcgtcaagcctgtgtgacatttttcccgaagaatggcagacaccacttttccgtgatgacatcgcggctgatgtttgcatcacgctcgtcaacagcaaaggagagatccttgacagcccgataagccggctgggattcggtatttccactgagcaactgcgaagtgcgaaaacagtgattggcgtggcgggaggagagcagaagtatgaaggtatcgtagcctctcttaagtcaggccttcttgatgtgctgatcaccgactttgatacagctgtaaagctggtcaactcctga

SEQ ID NO: 205366 - DNA, 450 bp, Klebsiella oxytoca
atggatacagtacttatcagcgtcaccgatggcggcgacttcaaaagttatgacgaggtgctgcagcatattcatgaacggcagaatgctgcggggacagtgaaggatacctatctggaggcactacgcgagcgtgaagccatgtacccgacgggtattttgcttgatggctattctgtggcgatcccgcactgtgacagtacgcatgccaacacaccttctgtttacattattcgtctgcctgagcccgttgaagtcggtcaggctgatggcgatgataaattaccggtacgacttgtcatcaatttagtggttaccaacccgtctaatcagttgcagctgttgaaatccctgttcagcaagctgcaggacaaaggtttctatcaaaacctcctggaactgccgtctgaaaaagctgaagcattatttatttcagaaatcatgcaataa

SEQ ID NO: 205367 - DNA, 645 bp, Klebsiella oxytoca
atggcacagattttaccgtcaattttcggagcaaatatcctgcgactgcaggatgagattcggtttctggaaaatgagaataccgacatactgcacgttgatttaatggacggttcttatgtcagtaatatcgcatttggtccgaaccagatatctgcaatgaaaaaagtcagcaaaatgaaatttgatgtacatatgatgctggcagatccgcaaagacatattgatgatgttatcagtaccggtgcagaaatgatttccgtacattatgaatcaactccgcacgtgcattttattttacagaagatccgccaggccggacgtaaagccggggtagtaattaatccgggtacgcctgaaaacgtactgacctatctgctggacgatatcgattacattctcatcatgaccattaatccgggacagccaggccaggtctttattgaaaaaagcctggagaaaatcaggaatacacgggaaatgatcggcgaccggaatatcctgattgaggtcgatggcggcattaaccttgcaatagcaaaaaaagtccgggaagccggtgcggatttaattgtcgtcggcggcgcactgtttaatgagaacccggaatcgagctaccgggaattaaaagctgctatgaactga

SEQ ID NO: 205368 - DNA, 561 bp, Klebsiella oxytoca
atgagcgtacaggaatacacacgaagcatcctcagtgaattagagcaaaatgcgcagaaaattgatgaggatcaggcgatgcagctgattgcccggatccgcagtgcgggacacatttttctgcagggagccggacgcagcggagttgcaatcagggggtttgctaaccggttaatgcatctgggattctcggtgagtgtggtgggagacatttcgtctccacgtgcccgtccgggtgacctgctgattattggttccggcagtggcgaaaccggtagccttaaaagtctcgcgcagaaagctgcagaaagtgatatcggcgtggcgctggtgaccatgaagaaagactcgtcaattgccagactggccggcagcatactggttttacctggtgcagtgacaaaggaaaacgatcacaatccggtaccgttttcccagccgatgggctctgcatttgagcagctctgtttcattacttacgatgccattgtgcttgagctgatggctcagctgggagaaaccagcaaaaccatggctgcacggcacgctgaccttgaatga

SEQ ID NO: 205369 - DNA, 285 bp, Klebsiella oxytoca
atggcagacttttatatctcgggtatacgcagggacagtacagggcagcacattcagtacgttaaaatcatcaaagctggcaagagaaataaagacgcctccatcaactcgcgacagtttgttgccgagctgataaaggccggtaaggcgacgtttaagacgatcacgcttgttaaagggcagtcggtttatggcgcgaatgttcacgtcatagacgatatttaccttacgactgatcctaatagtacgacacgcgataatctcggcaacctgccggtcttttaa

SEQ ID NO: 205370 - DNA, 459 bp, Klebsiella oxytoca
atgtcgagctatgcgaacgcaacgctgccggttctgaaaaaattccgctccggtggttttgtgggtcacggcgcggcgcggcaggctgccgcagagctgctgggcaaaatgaatacgcggggatcgctggatggaccgattaaggccctctctggcgggaatcagcaaaaggtactgctggcccgggttattgcgcaaaacgcggacctggtgttgctggatgaaccaactaaaggtgtcgatattggtgcgaaagcggacatctaccgcatcatccatcaactggcggataaaggctgctgcgttatcgtggtatcgagcgaggaagaggaactgctggacgtcgcggacaacatcacggtattccgccacggtaaatgtgatggcgtgattgtcccggcaaaagagcttaaacctgcggacctgcgcaaagctgcatgggaacacgctgaaccttaa

SEQ ID NO: 205371 - DNA, 3087 bp, Klebsiella oxytoca
atgaagcagggctttaatctttcggcctgggcgctgaaacaacagcagcttatggcctttctcatgctgttgattatggccgccggcatcatcagctacgaacagctttcccgcaacgaagatccggcgtttaccatcaaaacggcggttgtttctgcgcagtggccgggcgccaacctcagcgatacggtaaacctggtcactgatacgctggagaaaaagctgcaggaaatcccctggcttgactatgtccagagtgagacgcatgccggacgctgcgttattttcattaatcttcgcgacaacactcctccggatgaggttgccgacatctggtatcaggtgcgaaagaaaatgcaggacgtagcgccttcattaccccagggcgtgcaggggccggcggtcaacgatgagtttgaagacacctttggcacgatttatggatttaccgccgacggctttaccatgcgggagctgcgggatcgggtggacagcatccgccgggatctgatgagcctgccggacgtgggcaaaatccagctgctgggcgagcaggaagagcagctggtggctgccttctctccacgccggctgtccgccatggggctggatttacagcaggtcgccgatgcgctgcgcgcgcagaacgtggttgagcctgcgggtaccgcccgcacggccggtgacaatattgccctgcgcgtcagtggcgcgttcagcagcgaagagagcctgcgagcggtgacgcttcgggtcaacaatcgctatatcccgcttacggacattgccagcattgtacgcaggccggcagagccgccggctccgctttttcgcgtcaacggccagcctgccgttggccttgccgtctcgatggcgccaaccggaaacatgcttgatttcgggcaggcgctgcggtcgcgcatgaacagcgaagccgcacagctgccgcacggtattgaaatgacccgaattgccgatcagtctgccgtagtgaaggaggccgtcagcgggtttgtgcacgtgctgggggaggcagtcattatcgtgctggccgtctctttcgtttcgctggggctgcgtgccgggctggtggtggcggcagcgatcccgctggtgcttgccatgacgtttgtctgtatgcatcttgctggcattggcctgcagcgcatctcccttggcgcgctgattatcgcgctgggcctgctggttgacgacgcgatgatcacggtggaaaccatggtggcacgtctggaagccggcgaatcccgtgccagtgcggcgacctatgctttcacttcaacggcattcccgatgctgaccggcacgctggtgatgattgccggctttattccggttggcttttccgcctcaagcgccggggaatactgctacaccctgtttgcggtggtacttatcgcgctgatcagctcatgggtggtggccgtactgttttctccgctgaccggcagctggctgttgcctgacgcgctgcagaaacacactgccggtccggggctgcctggcaggctttaccagcgcctgcttgcctgggttctgcggcatcggttactgacaactggactggcactggtggccctggtgctggcaggggtgggaacgacgtatatgcagggcgagttctttccggcctccgatcgtcctgagcttctggtcagtttgtctctgccagcgaatgcctctcaggaagcaactcttcgtcagacagagcgtctggagcgtctggtatcagcaagccgtgacgtcgaccactactcctcctacgtcggaaccggggcgatacgcttttatctgccaatggacgtgctgcttgatgatgaaaataccgcccagctggtggtggtggccagaagcctggcggcgcgggaaaggcttcagcattacctcgacaaggtgctcgcccgggatttcagcgacatcacgacccgggtttctcctcttgagctgggtccgcccgtcggctggcccgtccgctatcgcgtcagcgggcctgattacaggcgcgtccaggcgctggctgaacagctttcggcagcgctgggcgcgtcctctctgacgcgggaggtgaaccagaccgcaggcgagcccgaacgggtcattacgttaaacgtaaaccagacggcggcccgggcggcggggctctcttctgaccagattgcccgttatctgaacacggtctggtcaggcacgcttgttaccaccgttcgcgacagaaaccggctgattgacgtcgtgctgcaaggcaacgcggatgaaaggcgcaatcttgacagcctctcggggctgcttttgacctcgtcgtcgggagcaaaaatcccgctggcacaggtggccacgccagaatgggggctggaggatccggttatctggcggcgccagcgtctgccctttatcaccgtgcagacagacctggcacccggtctgcgcgccgaaacggtatctgctggcctgaagccgcttattaaccgctttcggccagggttaccggccggttacagcatcagcgaggacggggccgtcgccgagtctgacaagggtaacagctcggtcattgccattttacccgtcacgctgctctgcatgctggtgctgctgatgatccagctgaagcgggtttcccgcatgctcctggccctgctgatggccccctttggtttgcccgggatagttcttgccatgctgccgaccggcacgcccatgggctttgtggctttactggggattattgcgcttgccggcatgatcatacgcaacgcggtcattctcatcaccgaggcagacaataaccgggaggcgggaatgccctgtaacgcggcgatagaggctgctgccttgcaccgcgctcgtcctgttctcctgacggcaagcgcagccattctgggcatgatccctatttcacgtcaggttttctgggggccgatggcgctggccatcatcggcggactgcttgtggccacgctggtgacgctcacggttttaccggcagccatgagtatggttatgcagatggaagcgcgctcagttgcgggaagggcagccagaattaaacaagaaactgacggctcatag

SEQ ID NO: 205372 - DNA, 1170 bp, Klebsiella oxytoca
atgtctgatgaaatccccggcctgcttaagcagggcgtcaggcacctgctggatacgcggcatcttgtctcactgatgcccctgctgccctgttttgttctgatggcaatcctgctgaccggctgcgacggtaaaaaacagcaaaagccttcacccccgcgtccggtcagatttgtgacggtcggcccgcatgaggcccccgaactacagacgctgaccggcgaaatccgcgcacatgatgaaacgtccctgagtttcaggctggacggtcgcatagtcacgcgcagtgctgacgtgggcagccggtttcggcagggcgacgtacttgctgttctcgactctcctgcagcgcaaaatcagttaaccagcgctcaggcagacgtcagcagcagtcgggccgcggagaaagtggcggcgcttaatctgcatcgtatgcgtcttctgatgccgtccggggccattgcgcgggcgcagctggacaccgccgccgccgactggcaggccgcagtttcgcgccttcagagcagtgaggcggcgctgaaaaaggcgcaggaaaacctgcgctggacgacccttactgcgccggtaaatggcgtggtcacgggcgtcagtgcgtcagcggggcaggtggtcagcgccggtcaaacggtgtttaccgtggcgtccggtgacgaaagggacgtcgtatttgacgtagccagtcccggcatcatatcgcgtcagcccggcgccattttccacgtggcactggtgcagaacccctctgtgattgcccaggcgcatctgcgcgatatcagcccccaggccgatccgcagacgcggagctggcgggtacgcatcacgcttgataatccgccgagtgacatggtaatgggagccagcgtcgccatcacgcttccgtccatagcgacagaggctgaaccggtaatatcgcttccggcgaccgccctgacgcgcctgtcggatgagccagccgtattcgttctggatccggctaataatctggttcgccggcgggccgtgcacattgcagggtattctgcggacgcggtgtttataagggcgggcatatcgcccggagatcgtgtagtaacggccggcgtcagaagcctgcgtgacggcgagcgcgtggccggcataaaggaggcgcaggatgaagcagggctttaa

SEQ ID NO: 205373 - DNA, 1173 bp, Klebsiella oxytoca
atgaaagacaaacgcccccagacgctctggcgctggctttgcctgcgcattctcacgctcgctataggcaccgtcgtgcttatcgctctctgtatgtggctgcgctttaccgtgcagtatctctggatcacgcaccgtatgccggcagcggtgctgagtgagtttctggcactcagggagcatccggaacttaacccggcgaggtaccacgagattgtcgatgcctggtggggcattcgctataccgacccttctatcgcatcgtcggactggatcaccgtaggtattctcgtgctggtcaccatcccctttattgcctactttgggctgcgtcatgcccggcctctctctacccagttcagccagctcagaagcgcagcagagcaggtggcgggggggcattttggcgcccaggccgggttaacgccggcggcgccagccgaactcgcccagttcgcactgaactttaacgcaatgacgcgccagctggcgcgctatgaaaaagagcttcgcgcctcacacgttgccatggcgcatgagttacgctctccgctgaccgctgccatggtgcggctgcaggcgcttctcgatggggtattcagcccggaacaacggcattttgccctcatcatgggccagctgagctgcctgcgccggcttattgatgaacttcacctgctttccctggcggacgccggtcagctcagcctggaaaaggtgcaatgctgcccgtcagatatattgcgtgagcgcctgctgtggataaagccccagctggatgaagcgggtattcgcgcggtctcagacatggctgaaagcaagacattatgcgccgatccgtttcgtctgggccaggtgttcaccatcctgctggaaaatgcgctgcgctatgccgggagcagtactactctttcgttgagcacccgtagcacggccggacactatgaaataaccgttcaggacagtggccctggcgtgccgcaggcatttcttgaggtgatgtttgaacgttttgctcgtggagacgcctcccgcgcgcgccactccggcggcagcgggctgggcctctctatcgcgcaggcaatatgccacgcacatgatggaaccatcgaggccactcttcctgccgagggcggtttgcggatgcgcatcgtgctgccggatactgcgtaa

SEQ ID NO: 205374 - DNA, 696 bp, Klebsiella oxytoca
atgcagagcaaaaatattctgattgttgaggatgacgccgacgcggcggaggtgctggaggcctatctgcgccgggaaaattacaccgtccgcgtcgcggctgacggcctctcagggctggagcaggctgaacgctggcagccagacctgatactgctggacgtcatgttgcccggcctgaacggcaccgaggtgctggcgaagatcaggcgcagcagtgacgttccggtcattatgttgacggccatgggtgacacacccgatcgcattggtgccctgcgctatggcgcagatgactacgtggtgaagccttatcaccccggtgaggtcgtcgcgcgcgtgcaggccgtactgcgtcgcagcacgggcaggatcccgcaggaagaggtgttgcgctggcaggggctggaggtcaatacgggcgccatgacagtcaccgtgactgacagtaaaggcttaataatcggcgttgacgtcacgcccaccgaattcgccctgctggtcacgatgatgagagccccatcccgggcgctgagccggcagtttctgttggagcagtgtctgcctgatagcgacgcgctggagcgcgtggtggacacgcatatttataatctgcgtaaaaagctcgagtcggcaggtcagtcggacgtgctgctgaacgtgcgcggcgttggctacaggtttcgtcagccatga

SEQ ID NO: 205375 - DNA, 783 bp, Klebsiella oxytoca
atgataaccagaaaaatgctgatgtacatagccggtctggccctgacgacctcagcggctgcccgggctgacagcagtgctgcgcaggatggcgtaaccctcggcgccggcgcgcagtatgccccccgctacagtggctcagacaagacccgcgttcaggcagttccgatctttcaggccagagaaggcgctttcttcgcggacgcccagaaaggtattggctatgacctgcagagcgacaacggactgtacctggagcactcgctgggctacaacctcgggcgggatgacaaggattcagactggcgcgacggcgccagccgattaaaaggcatggggaaaatcagggccaccgttaacacggcgctggccgtcggctggcaggtgacgccctggttcagcgctgagggaaaggcaaccctgccgttcagcgatgaccagggggttaattatcaggcctccgtcacgctggtcccgctacagggtgaaagcgacaccgtcgcgctccagaccgccgccctgtttggcgacgcacgctacatgaacacctggtatggcgtcagcgatgtgcagagcagacgcagccgctttacgcgttacaacgcctccggcggtttttatggcgttgacacctcggtaacgtggagccatcagtttgatccgcactggggcaccctcgtcagcgcaggctacacgtggcttggcgatcatgcggcagacagcccgatagtttcgcggcggaatgaggccacgggtacggtcggctttacctacacgttttga

SEQ ID NO: 205376 - DNA, 360 bp, Klebsiella oxytoca
atgtcgcctgataacgtgttttttaaagggcttgagctctgggttagagagaatgttacccgaaaaataacccttcaggaggtggcttcccggtacggttattcaaaatggtatctgaaccgcagttatatgctctattcagggatcagcctgggcgccttcattcgcctggaaagaatgaaggccgctgcagacgatcttatcaacagcggcaaccggattatggatattgccctacgctatgagtttgagtcccagcagacttttacgcgggcattcagtcgtcactatggcatgccgccagccacgttcaggaaagtcatgcgtaacagacaaagcccggatcgtaaacattcatga

SEQ ID NO: 205377 - DNA, 828 bp, Klebsiella oxytoca
atgagaacatcaaatataatatatacgttccttggtttttttctggttattgtttttttattttttattttcaaaatttctatacattaccctaattcgatgaaagatgtgaagataactgactggctgtcagttgcttttaactttattatggcatcactagccatttggggggtcttttacgccagaaactggagagaatctttgactgaaagcaaagcactggaggaagcgacaagtttaaagtataaagtacttatgaatgccaatcgagccttttttaccctcactccctcaggtatacaacattacttccccgatcatgaaaatagccctgtatttgatgattataatactgaaggattattcaattcattccatgatatgtgcaacaaactggattgcgttagggatgcgatttatgagttgaacgtgtcgcgtgaaaagttggttttctttggctgggacttctgtactgataaaaagaatgaatttataaaagtagtcacctctgtcgatgatctttatatatcacgtttcaagcttgaatatattattaatacagttttgtctgatcatggaatggtttataatgttagcttcagttttccagtttataaacataatcgagaaaaagccgatttagatgatttaataaaaattttaaatgttaactttgtcactttggaaaacttagataaatttgcgcacatcctaaaagaaattatggatattaggaattcatctctaaacgctataaaagttcttagaaattgtaatgatacaattcatgatttaattgagccaataaatatattcagaaaatga

SEQ ID NO: 205378 - DNA, 150 bp, Klebsiella oxytoca
atgaacggtcgggcgatttgttttactgacggctggttcgagtgggtgaaggaaggcgaaaggaagcaaccctatttcatacaccgtaaagatagccagccaatatttatggccgcgatcggcagcacaccctttgagcgcggtgactag

SEQ ID NO: 205379 - DNA, 759 bp, Klebsiella oxytoca
ttgattgttacgtcggcggccgataaaggtctggtcgacatccacgaccggcgtccgttggttctggtaccagaagccgcccgggaatggatgcgtcaggacgttagtggaaaagaggctgaagagattactgccgagggagcggtatcccggcctcagaacaacaatttccatgacgaaatggtggagcagtacgggcgggtaaagcgttttcttccggcggtattgcgcgacctgcatttccaggctgcgccagccggagagcatttgctgactgcgattcattatctgaccgaactgaacggctcgaaaaagcgtatcctcgatgatgcgcctgaacatattattaccggcccctggaaacgcctggtttacgatgcagaggggcggatacaacgtgccggttactcgctttgtctgctggagcgccttcaggatgcactacgtcgacgggacatctggctcgaaaacagcgatcgctggggaaatccccgcgagaagctgttgcagggggaagaatggcaagctcagcgggtccctgtctgccgggcgctgggacatcccaccgatggacataaaggcgtgcaacagctggcggtccagttggatgaaacctggaaagcagttgcatcccgctttgaaggaaatgcggaggttcatatctgcaatgacggtaaatatccttctctgaccatcagtagtctggagaaactggaggagccaccatcgttgtatcgtctcaacagtcgggtaaggtag

SEQ ID NO: 205380 - DNA, 495 bp, Klebsiella oxytoca
atgaaagtcactgaaacccgactggacactctgatcgataatctgaacaccctgatttgtggtgatgatctgctcacccgacaggagcgtgaaaccctggtgcgggccgtggcggccatcggcgccatgaaagcacgcgtcagcatgaaaaaaggcgaagcgtcggatgttgccagacgggaaaaaagggagaaaaaagaccgccagcctgatccgcgttttccgcgagccggtcatccctggcaggaagacgaaaaaaccttactgagtgatgcgctcgattcggtcccggacgaagagattggcaatcatcttttctggctttccgagaaactgggcagaacgcctttcagtgttgctatccagatagcagccatcagggagctgcaggccgggtgggaggagcagttcagggaaatttctgataaaattcgtttgtccagcctcagtatcagtgactatctgaaagagaacgcctcaggcttgaacacctga

SEQ ID NO: 205381 - DNA, 312 bp, Klebsiella oxytoca
atgagtcaggaagaatttgaccggcgcgagctgaacagtctgctggacgacctggaacaactgcagctgtactgcaggcgtgatcaactggtggacatcgtgttttcgccggtgcgcaaacccggcgagagctggactgagcgtctgcagtggctgctgatgacggacggattcgggttccgcagtccgctgtcccgtgaagcggcctcccgggcgctggctatcctggccggttacacgggacgggaggtggcggagcatctggccacggtgatggtgtggaacgacgccgaagcaggagagaggtcttga

SEQ ID NO: 205382 - DNA, 270 bp, Klebsiella oxytoca
atggataacgaagtgacgttttcactcagctatgagcaactaaccaccatcactgaacagtacatcaaaacatgtattcagaatgcgaccgggacctccggccgcgaggcagaaattgaaatggactgggcacgcgccaccctggattactggtatctgcttactcaggccggaaaagcaccggatactgtggtggaagccgatcgtctgcgaatgacggaaatgatctggcgcacagcttctgaggaggaacatgcatgccggcagtaa

SEQ ID NO: 205383 - DNA, 390 bp, Klebsiella oxytoca
gtgtccaatgtaaagattagatcaaagttaacaagcgaaaatgaaaacaaacaaacggtcccggtcaaaatcttcaaaataactgacatcccagatgtgatggaggaaaaagattggacggtgtcagcatgtttcatgcgaaaatggttcaatgacccattttacgaaatgacatccaaagagaagctaaataaagttgatatgaatactgtggacaaacgccatgtcattgaagatttggattttgattggttgttaacttcttcgttacgaattaaaccgatttacgataatttcgtgaggcaagtttcgaatgttattgagtataatgactacttggggagaaaaaacaaatatcacagcagttgtctaatggcctttgttacataa

SEQ ID NO: 205384 - DNA, 258 bp, Klebsiella oxytoca
atgacttgtgcttgctatgtctgcgcccttcccttgaaagctccccccctcacccgtgtcaatttcaatcagaaccttaactcgccgcaaggcagctctcctgaaaaccagggttccagaaacaacaaaagcctgcaagcaggctctgttttaccttccggcgcttatctccagcgtctacatcacagtgacggtagctcttcacaaggtgaattaaacatatccgacctcgatggttgggacaagatgatcgattga

SEQ ID NO: 205385 - DNA, 2823 bp, Klebsiella oxytoca
gtgaatttagcagaacttcaagtgaggctacaacagcattattctcggttaagtgatctgcgggctaccgaaaattatcccgtttacgcgatcgagcatggcctgagcgccacagagatttctacagctcaatcgcttctgaatgccaacttgagttcaacaaaacgtgcaactagtactttttggctggtctggatcgctgcagctgctgagataggttacacatacgacggaaccgaatattgggactcctttgcaatagcattcccttcctggcctaaatttggtgaccgcgatcaaatccgcatatggtatagacgatttgctaatgatttcagaggtctttccccctctgggtcatgggcgcagcagttcccaattatttcttggccaatcacgcaagccatcttgccaagatatttacaacgtttttttgccgatcatctatacgaccttcgtcatttgttgacaagaagcggtgagcttacattagaggaaattggtgaactactaagtgttaaatattgtggtggttcatctcgattcgagggtttcttacaacaaaaaactctaatagcacgaattgtgatggcgatgcgtcttgaggatgtcgttgatgttatttctccgattgagaaaatcacattgcgtcgcatcatagacgatttcgacaagcttggttcgtttggcactcgcctgagggaagtaagacgagtactccgtgaggctcgtttcgtcaattcgtacagcaaagactttgtatcttctacaaaaaacatccacgataatgcaactccctttgcaacctatatagtaaggcctcggatacttgcacgccaaataggtataaccgagtggagcttcagcctcgtaattcccgacattgctacatctcttcgtcaggccggactctccccgctcgatttggaacactctcatatgcgctttcgtgctaatggtgaaggtaatgcatggatgccgggtagagcattgttttcctatactgggagtacagaagaaccactcttgatatatccaactgctaatcgcttagtcttcgactttgatcgccctctagaaaaagttacagcctctttacaggaaaggctctttttcccagcagccactttacgactactaaagttacgtgcagatggcacggcgattgaagtcgcgggacgccacgtcaaagctaaccaatcttatttacttgtcttttcggaggaggtgtcgactgaagttatcgatagacttgcgctttctcctgttcatacgaagacaattggagccgacgtttggcaattttcagttgctgcgaaactagatgctggaaagatagcagcattatcatcgattggacttggatataagctaggcatacgtgctgaattaataggtttgactgcccgatggaacgatgtagatgacacattggagtttcttgacactgaagttgtcatgttttacttagtttcggatgttgaagctgacgaatttcagatcaccatcaataaatgttcccctacacgtctgcgtacggaaccaaacggaaaaacgtttgtttcgctgggtaagctttctgtaggtctgcactatatttcgttatctgcactcggcgtagctactggcggcaacgttatgagcgaagaaataatcatcagggtgcgtttagcaacaccctggcaaaagacagtatccggaaaagcaggggtgaccctcaagcttgaaccgcggggtgccactttagagcaatttcttgaccgcacagccatccttcggtgtatagctcctgcaggacgtattgttaaactggaaagttgtttctacaacgccgacggaacgctttttcacagagagccgattggcagttataacgcccctgttaacgatgagaaaatctccgagattatcgtacaaaaactgacttcagagaaccatcttgaacatgttgatcgttccgcgcgtatagaagtgctcatatcgttggacgagtatggccaagagaacgtacgattcgacaagaaagcagagcctttacggtggttatggttggacgaacgaactatccggctcgccgatgatacagaggaaaaaataccgccttctgtaaagcgatatgatttagatgccatcgaaattggtcatgaggtggactacgacgaagctttaaccggactagagcttcgtggtaagggcggcttgtttatcgcaagcatcaatggtcaaacttacgaagtaattgctatggctccacagcgccaaatttcggattttaaagatctggatattcctacccacgtatccgcaagagaaacgcagcctgtcactataatcagcgctctggaatattggcgaggagcccggaggctgatagggccaatggctttcttggctcggcgcaacgccattcgcacacttgaaaacgatcttgaacgatatctgtgcggcaatgactgggtcgaagatataaaaaaagtacaaactggtacaagggatatcggatatctttataggcgagtttattattcgcaaggattcgcttcaggcttgagagcgtacgattggcaatatgatgatgatgcagaagctgctgaactcgaattctttcgcttgggccatgtctataaaatttcggaaacagacatcctctatcgtcttgcgctgaaattggcatttcaaccacatgctgtgaaaccttcggacctctcatcaccaaatgctttcaacatgttacggaaaaactctgtactaatccgaggagcgtattttgcgcgtctaatagctcactgccaagaaacgagcgctaagtcggaggtcgtatga

SEQ ID NO: 205386 - DNA, 1065 bp, Klebsiella oxytoca
atgaacgacattaaaatacttaaccgtgttgattgcctaaagtattcatctcgctcactaggactccctgacttgacaaggcttgataatgcgctaatcgctcaagcgttgcgaagaagcgttttcattgcggccccttgttcaatgcgaacagtatgttcactcgtaatgaattccctcggtccgctctctgacgagcctgaaaagttaaagatactcatcgacgatgttattgacgatcttgtcaacatgggtgatgttcttgaaatgcggtacgaaatcgccggagaaccgaacttcattttgcggcctgcaccaccagcatttgtgcttcggcgcgatggcacgtttattatagtgggagttgctggtgatgagatcactccaccacaggcaaatgattacaatctcgtttatcgcttaagtggtttgagaacactcacaccaagcaatgttcagtcctgtcggcaaacacttatcgatctcgggctcattgagttacccatgaatgtatggctacatgcaccagtttcgatcacagccgacaaattcgtcagatcgtgggtcagcagactgccaaacgatataaatccggaaaaaatcgagaatcttgagatgatcgatattagcaaagcaacttcatactataaaggcagatggcagtcacttaacgaacaacatgctggaatttatattgcccgacgctcacaacgctatggcgccaaactgtggtgctttgccgaaattcgggacggattagttcaacgctttgttgatattcattcaagagatgctcgcgttcgagattgtgatgaagcctggcggctactggctgctttagatgcactgtctggctctccacaacaggtcagggttgtttatgaaaaggagatggctgtgctgtcctttacatctcctcttccttcttgggcggttaggcgtcttagtctggtaggtgaacgtttaaagccacatcgcgccttgctagaattttcactgcctttacagaatagtgaagaagaacttcattggctggaggaaaccctctggctcactcggaattag

SEQ ID NO: 205387 - DNA, 1200 bp, Klebsiella oxytoca
atgtctttaaaagaacttgtttcggaagttatttcaattatggaaacgggcagtccagaagaggctgcatctgctcctcgcggctggttcaacaaagataaggggttttatgttaaagatttagcaaaatacaaccaattacttgaaaccatatattgctcagataaaatattgaccgcaagattcagcagaaaaacagtctttgaattcttagacaagcaattcccaatgataaaattatcagaaaaaccattcgacttggattcaaagtctttcttcaaagagttctatagcgttgagccaaaaaatctagtggtaactgccccgatctcaggagtcaggttagatcaaggtgtcagatccttcaatttatccatctataaatttggttatttagaggatttacaattccctatagccaatgaaaagggtatgtatgtaagcgcattcgtaaaaggcgtttatgacaaaaacagcgctattcaaaaagcaaatgatgcctttcttaatttagcaaaattaattgtcttcatgtctggaaaacttgataaaagtatattcatccaaaccggattgcctcttaaacctagtatgtcacatgaacaaatgtatgtgagcacaagttctcatcaagtgtctgatgaaaacggcccgatagattgggcgaacattaaaaatcagcttagagagaaaatccctgttaacaatgattttttttgtaaaaattcagatttttcaaacctatgggatttatacgaaaaaaaacataacggcgataaacttaatgatcttgaatcaaggatacttaattccgcacttgcgctgggtgagtctgcgataactgaggacacaagaaactccattatatatacttgtatttctttagagatattattttctctagatgaaggggggctttttcaaaagagtattggagaaaagttatcggatgtattttcatttattgttgcaaaagacgtagacgctcggttggaagttggtaaattggtcaaaaaagtctatagtttacgctccgcaatcgttcatggcggtgataaagaactttcaaatgaaaatctggcagttaattttttcatgcgtcttgctataagcgaactgctaaacggtgaaagattcgctaaaatgactaaattacaagatatttatgaacaactaaaaagagcacaaaattcatattaa

SEQ ID NO: 205388 - DNA, 240 bp, Klebsiella oxytoca
ttgtccagacttaatgccgatacgctgagaggctcccgctacagcaacatgaaagagttgcgtattcagagccggggcgagccgatacgggcatttttcgcttttggcccggcccgtaccggcattgtgctttgtgccggtaataaggttggcaatgaaaaacgtttttacgatgagatgctccctgttgctgagcgggaattcacgaactggctgaagacattcaaagagaaggagtaa

SEQ ID NO: 205389 - DNA, 639 bp, Klebsiella oxytoca
atgttatctcctgatgatttagatataaatgagtatccggattatttatggaccatgattccttttaaggattttataggtcctgagagatatttgcaggacgctattgatgatttgaaatctggtgatgaaagaagacactataataatgcattaagaaatgcaaaatccgcattacatatgagagttgatatcctttgctacagttttggtggggaatccttttttaagaaaatgaaatctttcccacgtaaattagattttctagaaagcatcggtatcgtcaggccaagaataattgataagattaataaagtcaggaatgagtttgaacatgagtataaaaacataacaaaagaggaggctgaagattttgtagatatagttatgctttttatagaggcaacaaaatatcttaattttaggtttccttcggagattgtctttataggccttaataaggaaggtaacaaagaagttatagaaaggatatattgcaatttctctaatggggaaattatcctttgttttagggattgtggtgcaaaagagaaaggtatatttataaagcactctatcttcgtagaggataatctatatagggagtggttaaaatatatcatcataaacaatgaatag

SEQ ID NO: 205390 - DNA, 843 bp, Klebsiella oxytoca
gtggctgaggaagttaccggtggaggtcttttccccgacatcgcatcagaagcggttctggctgaggcaaggcgcaaattccatgcgttagttgataatggattaacagaaactgtccttattgcagaggttaacccaaagcaaatttttgacgactatttttcgggtgcagcgccattccaccgggaagcaaaaaagtctgagttcccggacgcattttcactggccgctgttgatacagtagcaaaatcccgtcatcacagcgtttatatcgttagtaatgacgatgatatgtctgctgtagcagctgctaatgagagtttcatttatcttaaaagcattgatgtcctgctggacctagttaacagaaatgataaagaactgtctgaattatctgattttgcagacagcatactggatcagcttagggatcagattatcaatctggctagagagatagtgagcaatggggaatttattctttcatcctacgacgatgccgatcccgaaatttgtgatgtagcgattttatcagtcaatattcatgaagtgcagttgatagatgtggcaaccgaatatgcaatgtatgatgtgacttttaacgtggagttaactgtatcatacaattttgaggattattcaagagcgacctgggataaagaagagcatgtttattatggagttgagtacagtcgtggatcttttcgccatcaggaacagtatgcggcgaccctagagatagaatctatggacaggctcagggcaaatgcggaggttcattcactaagttttgatgacagccttttcggccttgatctggatacagcagtacccactgagtga

SEQ ID NO: 205391 - DNA, 234 bp, Klebsiella oxytoca
atgtgccgttacagcttcctctgcatattttttaagatgcttttctatttcagaacgaaccacgtctgtgataagcaggtgaattttttacgcttcaacaagctcctgcagtctaagcagagcgaagtgaccaaactgaagtttttttacttcgtatgcggaagtatcaataaatatgagtcgcgtctgcagatccatgcggttctccagccattaagtttacagagaatatag

SEQ ID NO: 205392 - DNA, 924 bp, Klebsiella oxytoca
atgattattgacagcaggcaggacagtgaagccgatgatggtacggtttcgtataccatcagaaatattccgatctaccttgacaacataattaccggccaggcggccagcggcggtaagcccaaagcaacctggctgcgggagctcctggtggacaccttccgcgatgacatttctaacttcatccgtaaaagtggtctggtggcttctctggatgcagagcttttggagtatctgcgagccagtgcagaccctaacgggtattcaggactgctgcctggcatcaacgagggttacatcagttttctgaacctgaagtgcgatgacgatctcaagcacatcctttttaataatgcgccttacctgcgggatatggcaagagtgggtatgcccgggatcagctactttaggcgagggctgtcgcttgagctggccctgtttgcagagctggctgctcaggatgaggcggttatcaggatggcctgggaaaaggctttttactcacctcagcctgatgctgaaaatcagttctataaacacatcgactccgtcagattgctcaagaaactgtcccccctcgtacccggttttgtgactgaaggttcgttcgtgactttatacagttaccgtccggtgagttacggcgaatcagcatggcgggtgcaggtcatcctgaaagacggccataacgggaaagagcccgttccggttcccaggtttcccggatgggtcatcgttgctgatccggggtacaccacgtcgctcagttcgccagacggcactggcccggcctatttcttccgcaataaccggtgtgaatttcatgtctatgcctggcagaccgaaaagtttgtcacggatgaagatatcgagatcgggctgacgcagcagctgctgaccttcattgagagccagatggtatga

SEQ ID NO: 205393 - DNA, 345 bp, Klebsiella oxytoca
atgaaaaatacgtccgacatcgtgggaacatccgtattcccgttccagactgaaatcgcttttattatcgcgattttcaccactactcaacgcctggtcgtcagtgccagggaccacatctgccagaagcaatactggagcgcctgtctctgcgtcctgcttcttgtggcttacgtggggcttacggccggagtggtgtgggctgtaatgccctggcttaagactttttttctggtgaaacttgccatttcaccattctgggtcatgccgctaaggggtttgctactctggggtatcggtaagatggttggggccatctgccgaaagtttactctaagcaagtaa

SEQ ID NO: 205394 - DNA, 1002 bp, Klebsiella oxytoca
atggccgagccaataaatctgcagacagacgtggtcaggcagcatacggttcctcgttttttactgaagcacttcagtacgccgggaaagggtaagcgcctacgtttatacgcctttgataaggccgccgggcgcgcttatgccaccacgccggatgacgccaccgtccggaatacgttctacaatctcgatgatcaccctcagcggctcagtcttgagccgctgctgggaatttacgagcatgaagcagcgccggtcattgccgaccttctgaggcataaggacattcgccagctgactgcagacgatcgctacaagctagccgtgtttgttgccgtgcagcgtgcacgaaccttcggtgagctggagcgtatttcaggcatgatttcagtgctctttagtaagatggcggcaatgggcgcgactgaggagcaggcaggagaaaccctggggttatcgcccgggggagataacagagatgtttttcttcggcagcttgtccagcagatatcacatattgatcacctgctgaataaggactggtacctgctggaaacaaagccagaacatcccttctacgtgtcagacaatccggtggtactggagaaccgcaacgacttcggtccgtacggcaatattggtctggccgtgctcggaatacaaatctaccttcccctgtcatcgacgctgatgctggccatgtattgcccttccatccgtgaacagaagattcgtgataagcaggatcttcatcatctccttgccagagcgccacacctgatcccgcgtcacatgcgcccgtttgaaatgctcagacatctcagcaggtttacggactatcatctcatgccgcttactgcggatcatgtgacgcattacaacgcactgcaggtggagtatgcggaacagtatgtgttctgtggtgaaaacgatttttctctggttgagagaatgctggcagatgatgaccgttaccggacaggcccgaggtttacgttttag

SEQ ID NO: 205395 - DNA, 741 bp, Klebsiella oxytoca
gtggggtttgtcgttgacgctgaaaatcgattagttacggtcgatcattcgcataatcgcttttgtatcactacaccagaaggcaaccccgcagagataatgctgggaacgctaaaagtaacatccattttttcccgaacgaagggaaagcgcgacaggaacgatcctggtgacaacagtccgatgctttacgtgataaaggggttgcatgatctgagaacaaaacctcgtgacattgcgatgttgtgcgccagctttcggaaaattctccctgcctacttagagagcggcttccggtgggactggatcgttcccctgccgtcgagtagttctgtctgctgtcggttcgctgagaaggttttaaaaagctcacagcaaggtgcttgtcatcctgatgcgcttgttaagatcactgccgggcaggtgctggaaaacgtaagttgtctccggatcgcatcaaaggacaaaagccgtcttcgaacagaagttaaacgcttcatcagcgcacacggagaagacgcatcttttcaaattaaatcggtaaatgttgggctccggcatcatatcaacccaatgatgtgggggtatgtaccgccgggaactaacccaccgagagctatcctgttggttgatgatatggtcacttcagggacttctttagtgaatgcggaggcaatactaaaacaccgttacccgcatgccaaaatcgaggcgttgacgctgtttggctcatccaggtga

SEQ ID NO: 205396 - DNA, 1341 bp, Klebsiella oxytoca
atggttgactccacaacagttaacggaaatcctgattcacaaccacctcagtggagctggaatgccctgtttcgtggtgatcatgcgcggtggagctacaatgcctgcgtgggtaacaacggttcaccagacctgtattactatgctgacggcttcgctgacagcgtaaacctgcttattgaagccctgacggcaggacaccgtgcacaactggatacacttatttatcctatttgcttcagcctgcgacactccgtggaactgactataaagggtcagataaaggatctcagccagattgcgaaacaacgaaaccaaccgcttgcacccgatacagacatagaaaaagagctgaatcagcacgatattatgaacctgtggaaatttttttcaggccatgcagtcgcattcgatcggcgttataaggagaaggtgtcagcgctggaacctctcattcgctgtattggggaaactgatcctaccggtcagacatttcgctacagttacagtacggaagccaagaaacacttaacggacgtcagtgttatcaatgtactggtccttcgtgaacagttctgcgttattcgcgagcaactggaagaactcacagggttaacccactggctttggaaggaatattccaccgggattttcaccaaaaccctcagtcgtaaagatcttcaggctattgctgttcaattaccgccgcggcagtcatggagtgatccgtctgctggacttgatggtatccgatcttccatcaaatctgaatacaacataggcagcaaagaactgactgaggcattcagcaagattcaaagcagtagggatttggctcgaattatcggtctgactgtatctattccgggtttggttatgtgtgatttgttaactctcaatgatttctggaagatggcatgggatcgggatgctctggagaatgaattacgtaacgacatatccggagttacagattcaccggttgtacctgtgaatctgctcgaggagaccaagcatgaaattaaaatgatgagagacaccaaatcctcacttgccagttttatactgtgggcaactgcagagagagtcgccggactacaggcattaatggatatccgggattttcgtttcagcgaagaacatgaccgccgctacgaatattataaagaagatctgaccgccgcattttcaggcacagcacaagctcgtgacgatgagttatcagagatctggtctcgaatcattggacggcgtaattatccttcgcgtgtgatagacagcctcaaatttgccgggtttacgcacgaaagcacaggccttgaggaaaacctcttctcctga

SEQ ID NO: 205397 - DNA, 189 bp, Klebsiella oxytoca
atgaagagaacacgtcaggaagtcgaggcccgctggctgagcagccgggcaccggagcaacgcactggtgaagaagcgctgaaattctcggatgaatgctggacagagggactgcagcttgaagccagccagtcaagtcactatctgcatattatggatgtggttctctggtcactgactgacaggtaa

SEQ ID NO: 205398 - DNA, 771 bp, Klebsiella oxytoca
gtggcaagacctaagctcaaagccgaagaacgttttgaacagctgattagcgtgatcaatagtggcgagcctctggatctctggacatatcgagaggttgtggctgagtatggcgataagcgtactctaggcgcagccacgcttgtagccttggccagtatagccaaaggggatgttagtgaaggcgttaccatgcttgaggatatccttcctcatgcggatgtccattttgcactgatttttttcaagatccttgaacggtttgctttgctcgaaaaaaccgatcactacatctatgctttagctgataagtaccccactaagtggctcacttacaaagctggtggtgtggcttatttggtaggaagattgtcgaaatgtgcagaatactttgaccgtcataacaaaatgttgtctcaggaagaaggccgaggtgatgccgaaatcttcaggcaggaggcgattgacgatatggacagtgcttacaagtcatcagggtgttcctctgagcagtacatgcagattgctttagcggtccatcgcattatggctcggtacccaagagctgaatatcgcgcaaatattagcggggcttcagggggtagctatgtggtggaagttatgaatgcccctcccgggcaagttgctgagatgaatatgcaccttgcggatgagatttgctccgtcgatttactagacgactgcaacttaattgctcggttttctgtggaacggaaaaacgcaaaaggtagtagctatgcctatatctag

SEQ ID NO: 205399 - DNA, 2241 bp, Klebsiella oxytoca
atgaccagatataatacgggttatcctgtcccatctccagctatgccggatgtgtgggataataatgaaacgatagatagttttgtaaattcacctgagaacagcgtcaccaccagaactggaatagttcgtgacacaatgttcggaatgcaaaaaaaagcagacgaacaacgaatcgccgcttcggtagcattggccgaacaaatggattcgcaggagtcagcatttaatgcggctcaaactgacaaagaggatcgtttccagggatttcttaacagttctggttatgtctttcttggtaactatgaaaacggtccgttccagttcagcgcacgcaatcagtacatccgttataacaaccagtattaccgcctgaatgctgctactgatgtcgggtttatcactaccggaacgacagctgccagcttcgcaaacgacgtgactcacttcgttctgatggatggcgacactcttcgccaaaacctgggttcagacgaagatggtatgggtgatgccctgacggctgttaagcagccatttttgggagccacaagtcaaactcagcacgataaaaatgcccgttatcctgatgtatttgactggtatatgggggagagtgaccatactttaatgtttcaacgagcggcaaattcaggcgttgcgtcaatctttgttccagatggtgaatacatagttggcgacattaatcttactgctccagttaaattctacggaaaaggttctatcagcatcgatgcccttggggccagaataataaaaccatcaggcgcaaatcatatctttcagtttcttggtgatcctgaagaaggaatccgcccgcatggtggcggacttcttaatctgagtcttagcggccagaaaggttctgatacaggaatgcttgtcagagctcagacatggagttatctgttttttgaacaaatttcttttcagaatctttcaggctggggattgtcgcttcaggacattgctgagggagggcttcacaactatctctgcagacgactgggcagtgaagataccggatgtattcgatttgaagattatatagacatccccaataacaacgtgaataacttcagcctctggcgcggtattttcgggttcaactcaggtacatggatttatggcaccgacaggtcaaaccttgatgtggtttctatcgccgggcatcacaagtttgaatatgacgataaacccgtatccggtaacgtcactcagaagtctgttatataccttggacaggccaacagggtagatataaaagataacttctttacgaacttcaaattaactaatgaaaatctttatacaaattgtattcgaataggtgtcaactctcgtgtaaaacctaatattagcggaaatcagttttcggggtgtgacaatgtcctgatgaatatccagggcggaacagttgcgggaagtaaaaatatttctaaccggggagatgcaacggctgacggtacttttgtttgcacttcgaacctgccgcaggatatcgagccgattatctatcacactaacaatggagcaaaaaacaaacgctcgtactatgaagcaccgggctttatatcggcccataaaatgaccgggctggtaaacaacccctttgtacctgatgcaaactctatgactcattacggaacggtaatgtcggtcgctgcattaactgaaatccgtcgcggaaccatttcacacgcactgatttctgaccgtgaatttgtgcatattacagcgagaatgaagaatgtttctggcaccgcttcatccatcattctcaaccttgacggcgttgatttcggtagcgtcagcgttactgccgacagtcagtggcataactacacatggcaaatcaggccggacaaaatcagtaacggctcattcattcttacaaatggcgcttcaccaatactgtttgacggcatatttattgagagaaaaaactacctgaactggtcatttgcatgggttccgggaacgatagcttcaggacaggcgtccacatctccggttcaaagcgtggccgacactacgggttttatagctaccggtgttgaggctactgccaatggaagccttaacggggcaacattacagccaagtatggacgctgacggtaatgtcataatttattgtaaaaacaacactgcttcatcaatcacaccatctttctcacgcatacgcctgagatatgagtcagcaggtcgaactagctaa

SEQ ID NO: 205400 - DNA, 213 bp, Klebsiella oxytoca
atgtttaaggggatacccgtcaacggagcgggcatttccgtaggggtgataaatatctctgaggataaaactgtgatgtcgtttatcgtcaattacactgcgccgggaagtgatattgtatttgaccaggaaacgttcagctgcgattacgatttagatggtcctaaccccgaagaacaggcctacaaccacattaaacaaataagaagttaa

SEQ ID NO: 205401 - DNA, 912 bp, Klebsiella oxytoca
atgcaggtcaataatctcgaagtggaggctccgacgctcggcgggacctcggcgataggcaccgtcagcgtcgggagcgaaggtaaggaaagaaccatcaccaatgtggctgctggtcgtgtgggcattggcagtaccgacgccatcaacggctcccagctttatgcggtaatcgattcgccgataatttttgctggcaacgatggctctgtgccaaaaagactgggcgaggacaaggcgctgagtattgtcggtgagaagggggtggaaggcgaatactcaggacgtaacctgacgaccaaggtgactgagaacgctgaaaactctagcattgagattcagattgccgagaatcccgagttcgagtcggtgaccactggcaatacgatgatgaacaccgacgggttgactatcactgacgggccgagcgtcaccaccagcgggatcaacgccgggaacaaggttatccgcgaggtggccgacggggtggatgccaaggatgcggtgaacgtcagccagctggagacgctggcgaacaaggagctgaccttccagggtaataacggcagcgtggccaaaaagctgggcgacacggtggatattgtgggggctggaagcaccggcggggcgtacagcggagcgaacctgaagacggaggtggtggacggtagactgcagctgctgatggcggatatcgcgtacaacgccagcgatgtggcgctgggggcgaactcggtaacggacgcgacagtgggtacggcgggtgtcagcattaacggcaccgactacgccttcgccggggcgaacccgaccagcaccgtgagcgtgggggatgtgggcagtgaacgcaccatcaccaacgtggcggcgggtcgtctgtctgagaccagcaccgacgcggtaagcgggtga

SEQ ID NO: 205402 - DNA, 576 bp, Klebsiella oxytoca
gtgaacggttcgcagctgtttgcgaccaaccagaacgtggcgacgaacaccactaatatcgcgcagaacacgcagaacatcagcaacctgggcgatacggtggagaacatctacaccaccggcacgaagtacttccacgcgaactcgacgggggcagactcgcaggcgctggggctggattcggtggcgattgggatgggtgcggtggcgaacaatgccggtgatatcgcgctcggggcaggcgagctgagtgataagagcaccgatgcggtgaacggttcgcagctgtttgcgaccaaccagaacgtggagacgaacaccaccaatatcgcgcagaacacgcagaacatcagcaacctgggcgattcggtggagaacatctacaccaccggcacgaagtacttccacgcgaactcgacgggggcagactcgcaggcgctggggctggattcggtggcgatcgggatgggcgcggtggcgaacaatgccggtgatatcgcgctcggggtacggcgggggtcagcatcaacggcaccgactacgcgtttgccggggcggcgccgaccagcacgctga

SEQ ID NO: 205403 - DNA, 669 bp, Klebsiella oxytoca
atggctgactggtttattgcgactgaaggcgtgaaggtggtgaaggacagcgccagcctgtggccgcagatcatcacggcggtttcatccaccggcgctgccctgggcggtgtgtatctggcccactactttacccaccaacgtgaagaaagagcggcggcggcgaagcaggtcagtgagcgactttttattgctacggagctggtttttttgctggagcagtttgcagaagattgtgcactggttgtcacagacaagggtgaacccaatcagcaaggtgagtattcccctgcggtaaagccgcctgagcttactgccctggatgtttcgggagactggcggacgcttccctcgttgatcatgtaccgggtccgcgaattgcccgtactgcagagcgaagcccggagggatattgctgcagcttcagagcatagctgggctccctatcacaaagaagtttttcaggagcgtcagtaccagtatgcccgtctcgggctgaagtcactgatcctctcacggcgcctccgcaaactagtccacctgcctggcacgcgccttgatgcgacggaatggtctgcccagcccatcctctggcaggtctggcgacaggaacggcaccgtcgtgcgagggaatacattctgcgccagcgcgaacttgcggcgttttaa

SEQ ID NO: 205404 - DNA, 303 bp, Klebsiella oxytoca
atgacctttgaacatgtggtcaaaaagttaagaccgtttcatcaggcgctctggttttgttgtagttcttctccagtagaattgtttcatgctgattgctggaaaggagggatgattacaacaaccggagggaaatttctagcgtttcaggttgggcaccctgatgagtgggaattgactatattggctcatcagcctgacaccggccttgttatcgatgaaccagatgctgagtcggagataactaaagagttcttagtagaagttagattctacatggaactgtatgttctggctcattga

SEQ ID NO: 205405 - DNA, 768 bp, Klebsiella oxytoca
ttgcaggaactgaccaatactctacgtttgtatgcctttagttggtgcgcacaactggcgctcaatctggacaattggcaagacggcgagccgaagagtaaatcattgttctttatcctcgatactgaaaaagctagctccgaacgagataaaataaagctcttcggctataagtggtttgcccgccaaagtgaaaaattgttccccgtactctctgcattagaggtattacaagtaaaaggtgaggaaaaacgccctctttggcaggtatatcaagattgtttaggttattcagacacatcgaatcgattactgaatgaactcaatgattatatacagaagtttattagtaaggaggagcgagatcttcctgaacgcgatcgtgctacaaacctggaagatgcctttaaacagctgttatctgttgccgttgaacagtttcagggtaaaaaaaccgagcgagcagcggtaaatcgcaaatacatcaacgagctggaaagccagatttgcactgacttcattcaggttcgtggccgagcggggaaagtgctggtactgaaccaggatagactactgctactaactaaccttaccgtgggtaaaaacaaaaaactccggctgcatgagctgctacgtggttttgagcaacgcggattttatctggataaccagtctacacaaatgctggttgcgttttatgaacgcatggggaatgtggagagaatgagtgacagtggagacgccgtatatgtccgtaaaacagtatga

SEQ ID NO: 205406 - DNA, 5058 bp, Klebsiella oxytoca
atgtccgtaaaacagtatgaaacctatctggcagaaaccttcattgaatgggttagcagcatcatccagcctggtgagcgctaccagtttaaatctcccgatccggataacgccttaaagctctggaaggctttcgactctttagcgaatggaaataaactagaaattgcaccggggcaatatcttacctacgtccaatgtaataatatccagcttattccggtactgcacggcaccactacccctgcattcacagaaaactatatttctcatttacgcgatcaggtttctggccgcaatggcatttttgcccagacagcgttgttgattatccacaacagcatgctggataccttactcaatagtaccaaagatgtcgctgcaccggatgctatctggcatccagaaaccttccgtcaccagctcgaaaagttaatcacaacggacagcgcccgttctcaagtatcccgctgtttgctaggcgatcagttgacaacaatattggatgaaggcgcaacggtttttggattttcatcgttataccgtctgctggacgacggcaatctggatttctcagagctaaagttattcaacgataataacctgctgaattttagtgataagcagttgcgcgcccggctcaacgaaaaccaaaagttatatcgccagatagaggacagtgttgaacgctacagcgggcaactggagaatgtactaactgaatttagtgcaaaattcattcaggagcatttcgttgacaatgacgattggcgtgaacttgatttctccgtctacctgaatgaaaaagcacaaaacagtgaacagaaactggtgttggaaaacattactgctgaaaacggtgaggtctggcaaagagccaaaagtaccagtaaagcaggtaaacgagatatcagtgtcctggttcaggttctaccggggcaatcacacgttgagctggagtttatcttccagggtaacgaccttcaggacaatcaggtaaaaattgctcatcatcgtccgttacagaaagaacgattctggcgtactagccggctcggggggagaaactcaaagattctggcatcagtgccttttgatggtcggccctgcttctttagcctcgaaatcattaaccgcaataactcagcagaagagtacaagtttcgcctgctgttagttgaacaagggcaattctggcttaatgaaatccagcattgttatcgtattgagcctggtaaaggtcaattaactctgcaactggaagataatgagttacgtattgcagagctcggcgacaagacctgtttacttgatgaagaaagtgatgatgttgattgccgccattatgcactcgttaattttgaaacgctggcgaatcaaagtgagctgatcaaatttaccttgatttcaggtgactcccgtttactgtttaacatcgaaggtccaggagcagaggaaggattaacactgcctctgctttttgatcagggtcgtttcaataaactctttaaagaagaagggaatgcaacctggaacaagttgaaaggtcgcgtcatcctggacaatatcgaacataatgtggttggtgttcgccagcagttgcttatgcaagagtacgccctgatcgagcgtaatctgctcagcactggcagtaatggtagtgagtttgcactggatgagcttctggcgagctatcccgacctccataatgcgtaccaccaattgttcgtttactatcaatgtcgaaataccctgccgagtctggtgtcatggtcagcggaatatcgtgtattagtcagtcacatgatcgctacttttgaacaggcattacagcaaatcagtctaagcagagcattaaccatccaggaaaaacgtctgttacatctggggatttgccgcggcgacgattatgaacgtctctcgcctctgcacccattggtaatggcttatcatttacagctagctgaaactattatcgccgagcccggataccccacatcagcttccttcgcttcattaccagagattactctagatcgtctggtcgtctctggcctaatgccatttgtgtatcatagcgaacatgaatacgcacagttacaaccgatggtagaaaaccgcttctggatagatattgttccccagcgccagatgagccacgaatatgttaagcgtctggtgaaagacaagctaaacgaatttacagatgcctattctcggctgttccagagtgcaggaaataatgccctggttattaatgctattaatatgggagaagccagagagctattcctgggactggtagattattttaagcaggaaaaagataacgcaatttcgatacacgtaaactgctatgacgaacgtctgctacccaatgcctttgaccgctttgccgaaagcggcagctatgaacaacttaaaaatgatcttggtctgaacagcggtgcgtggcgttctgaagccgatatgttgatcgatctgcttcgcagtcgcttaacattcagcaaatttatcctgccaccggaaagcgatcaactggcttacgcccatctcgcatttttcaccaacaccgcaccggttgattgccgccaaattcgcattgaggatgctgccagcggggttttatgtcatggcttgattgcaggcgaaggggctgaaacacaaggcgatgcttactttaccgcgtttggtctgcgtaatgtcgatactgaatcgtcttgcgccctgcgtctcgcccgcttgttaggctgtctgtggcaaccggcacggcagagcaacagccagtatcacggtcagggaattagtctggctgtcagcggtaactttaagcaactgctgaatcgctcttatgatagctctctctggaccacaattatcgaccctaaggtcacactcgatttctttaccagtcaaaaagatgtcgtactaattcattactctgaccagtacactagttgtgctggttatgacgccgtaaccgtcacaaaacaggttgagttgttcctgcgtctccttcaaacaggacaatccaccgttgatagccagcaactacttgctgaatttaatgcctttaacggtgagtggctgttgaaaatgttgcgttcaaatgaaaaggagcgcaaagaaaaacacggcattatcggtgcatacaaattcgtacagtctatgctgctccagtcagatatttgctggattccactgtcagtagctgagatgatccgcgtgtccggcaacgtcgggctgagaatgaaagaaagcgatttatcgcgccatttacagggttatcagaaaggagcgatctctgacgatgtgctctttgtcggcttcaaagataacaacctgtatctgttatcacttgaagtaaaaacaggagctaggcccgattacaaccatgcggggcagcaggcccgcgagctaaaacgctatttacagcaagatattcttgggccacaaactctagcatcacaactataccgggcactttttatccgccaggtattaatgcaggtagagaagttgcgtctgtatggtgtactggataacgacaagctatcccctctgctggaacgacgtgaatggtggctcactggcgactatcagttaggtgagcttgctgattatgcagaaggctttgtggtagctcatgtagacagcggaacctgttttgatctctcttataaagaaacggcagagaatattctacagatcgaaatcccctattcattgcttccatcgttaattgcagcacaaggtgatcaacctccactagctgaacgctatcgggtgccggaaaaatatctgctcaaaccagagtgtgatgtcaattcttcacacccagtacaggtagcaacaacaactgagccgccgcccatttctgcgctggagcttacacaacctgaagcatcggcactaacccccagtaatgtcagcaatacaccattacagatcttgtttggtcatgatgctgtgcgtcagaatccattgtactgggaaccaaccaacaccgctaagttcatgaatactaataccggcattattggaacaatgggcaccgggaaaacccagtttactaaatcgctggttacgcaactgatgcgcaatcagtcctgcaacgttgatggtaaaccgattggcttgttgatcttcgactataaatccgactatgtggatgatgcgtttctggaagctacgggagctaagaggtatcagctatcgttgttaccttacaatccgttatcgttatttggtgatatgcccatgttaccgaggcatacggccatggcattcgctgaaacgatgggcaaagcgtataaccttggcgtaaaacaacgcatgaagctggttacgctaataatggagtgctatgacttagcaggaatagtgcctcatgatcgatcaacatggaatcgtgtagcaccgactattgaagatgtgtggcagcagtacctggcacaagagaaggtcgacgaagattcattatatgctgcactttataatctggctggtttccagatttttgaaacggatccagagaagatgaccagtttgtacgatctggttgatggagtcacagttatcgaactcgctggttatccatcagagattcaaaatctggtagttgcactgacactggatctcttttacgcacagatgcaaaaacgtggaaaaccgatggtgcgaggagattatcgacagctaaccaaaatgattctggttgatgaagctgataattttatgcgccaggattttgccagtttgcgtaaaattcttaaggaaggtcgtgaatatggtgttggtgctatactatcgacacaagaaatcactcacttcaaaacaggtgaaaataattacgcttcctatattctaacttggattattcaccgcgtctcggaaattaaaaatgcagacgttaaggcagtatttaacattgatgagaaaggggaacaggagtctttaatggggcagattagacagcttgataagcattttagtctgtatgttgatggggataaaaaggttaataagatgcgagataaagcgttttgggaactttga

SEQ ID NO: 205407 - DNA, 264 bp, Klebsiella oxytoca
ttgatcgccctttctcgcctcgacggccacaattctctgatgactgacctgagccatattgactggcgtcggctggcaagcgaggtgctagaggaactgagcccgctggcgaagcaaaaaaaggtggcgctggcgcttgaatacagcacgccgcctgcggtgattcaaggcaatccactgccgttaaaaatgctgctcagtaatctggtgaataacgcctggcgccagcgagaacggcagctggctggggttgcccaccgttaa

SEQ ID NO: 205408 - DNA, 564 bp, Klebsiella oxytoca
atgcgcagcgaactcagggatcgcatccggacgatgcgggccaggctggatggccgaacacctgttacagaaatccgggcaagctctcagctgtttgtctcgcccgatccggtctgccgtcgcctagttagtctggcggaggtggtggattctgatcatattctcgagccggaagcgggaaccggcgccattctgcaggcggtcagggaagccgcgccacgggcacagtgtgacgccgtggagctgaacgcggatttagtccgccatcttcgggaaaatttcccgggcgtcagcgtctggcagggtgattttctggagtaccggccggaaaaccactacagcaaaattatcatgaatccgccttttcatcatgcgcaggatatcaggcatatacagcgagcagtgacgcttctggcgcccggcggcgttgtggccgcagtctgtctgaacgggccgcggcaacaatccatactgaagccgctttctgatgcctgggagccattgccgagagggacattcgcgtataccgacgtttctactgttctgctcaggatcgcagtctga

SEQ ID NO: 205409 - DNA, 1383 bp, Klebsiella oxytoca
atgactcaggctttagcacaggcacttagtgccgaaaacatcccgcagaccgatgctgaagaaggtatcggccaggtgtaccggggaacctattccccggatgataacaagctgcggctttatgccttgcagcgcctcgatgaggaaacgtataagaaggtgcatgatgcggggttccggtgggcgccgaaacaggggctgtttgtggcgccagcctggacgccgggccgggaggatgtattagtgtccctcgccggcgatatcggggacgaagacagcacgctttttgaccgtcaggagcaacgcgcggaacgctttaacgactacagcgataaacgcgccggtgaatctgagcgggagcttgcgcatgtcgatgcactggcatcgtcgatccccttcggtcagccgatccttgttggccatcacagcgaacgccgcgcgcgccgtgatgcacagaaaattgaaaacggcatgaaacgcgcggtgatgctgttcgagcgcgcggaatactgggaagaacgcgcgcaggcctcactaagtcacgcgaaatacaaggagcgtccggatgtacgttaccggcgtatcaaaaagctcgaggcggaattacgcaaggcagaaaagaacatcgccggggcgcagaaatttatgacgatgtggcgtggcgaaaagctcgatctgaacatggcgcggcttatcagtaactatgaccatatttcggcctgtttctcgctcgataaataccctcgcccggcagagagaagccagtatgaaggccggatgtccctgcattccgcgctggcagaggaaatcattacctttgaacaggcccgcgaaattgcggttcgttgtcacgaacgcgcgatccgccatcaacaacgctgggttaatcattatcgcaaccgtctgagctatgagcgcgccatgctggatgaaagcggcggcgttgtgacccgcacgcatgagtttgagccaggcggtcaggtgaaaagccggggcgagtggctaaccatcatccgcatcaacaaaagcaatggtcaggtcagctcagtggaaacgccgggttatcgctttctcgggtatgggggaaccatgaaactgaccccggatcgcatcaccgactataaagccccgtcagccgaagaggtcagcaccgcgaaacaggctgcaaaacgtccaccgatcgtcaactatccgggggagggattccgggagatgacaaaagccgaatgggccaaaatgccgggggattataaggctgtccggagcgtggccgaaaatgagacgcacggcgcgtaccgcttccgccgctgcatgactcacggttgtacgctggtgaatgtctatatcaccgacatgaaaacggtacaaattccgcaaaaataa

SEQ ID NO: 205410 - DNA, 231 bp, Klebsiella oxytoca
atgaacatgaccattctttcaccttccgcagaggctgtaaagccccgtcgccatccgcgcatttcccgtgccgagatccccgcgccggagattgaccccgcgttaaaagcttttggccgccatatcgccagaagtcaccgcaaggggcgcggcgttcatatccccgcgatgaaaaacgccgctttcgggcacgtgctccgcacgcttgaactgaaacgcgcatttaactga

SEQ ID NO: 205411 - DNA, 138 bp, Klebsiella oxytoca
atgagtctccactcggacggatactccaccgttggatttactcttcatgttaaaggtgagattgcccagttctggatgctggcgaatagcttctcgtgtaccgcgaataacattagcgtcagcaaaaggtttttttaa

SEQ ID NO: 205412 - DNA, 1578 bp, Klebsiella oxytoca
  misc_feature (189)..(198): n is a, c, g, or t
atgagcgcgatcacattacgtaaagcgttaggtgtacttgcgaagtcatcttcgttttctgtaaccacagaaactcatcggcaaaaggatgtattcgacgagctaaaagaaaaactctttgttaaacaagaaattgaagaagagttacagcgttatctggataccgctgatacaggtgagatcattttnnnnnnnnnnttccatctggatgcgacacacagctttgcgcctcaacaatcagccattgatgcattgaatgatttatttgaaaatcatcattcgcaatcatacccgctactcatcggtatcaacaccgggatgctcgccaactttgccagagaaggctctgagtcccataaggctatccgcgctgctattgactcattcttgtcagcgcaacaggaaggtcaccgtccttaccgcaacgaaaattgtatattttttgatttcgaatattatccaaagttcgagtttgacgaaaaacaggaatactccccttttatcaaaaaattaatgaataacttaacggggaatggtgacaagaacctattttacacaatttatcaacgtgatgaatcaataggacatgatttaaaaaccgttgctaactttaaactactgtgcatgcccggtgttcagaatgttttaataacacagctatttaaagcccgattaataaaagatcaatttgttaccacaagaactttattggattttttacatcacctgctgacagggcctgggtacctgtttgataatctgtttaatggtgcagaaaatgatctaattaaaaaggtttctgattttgatcctgccagattgcatacatacgagattgatcaatttattttacgctatgagcttggattggttgatcccgaactggatgatttcctgagtacacttgcgaaattacatcttacgtttgatcgtcaatgtgttaagcctggtgacgcagcttccttaattagacttttctggctactacaacatgaatctttagggaataactatcacaaaagattctctgtattctttaaagaagctctctttgagcgttattcagagatttggcatctgcataaaaactataccgcagatccggaacaaaaaagagcactgaaccgcttttactctttcgagcttatcgctggtattcagcgttatgcaaaccgtaaagcacctgaactgagtacccaaaaagaagagttctttttaggcgaatttggtgggattaaaatcacagcacctgttgcgctgaaaccggactgggattccatcctcaagaaaaatacagcccatacaacttgtttcgatatctatttaaaagtaggacaagatccgctggatccgattcggatcggtcttaatttatttgagctattgagtaaactgaataatggctatcgccctaataaatatgacaaaagtgcgattgtcttactggatgagatcgttgagctaatcgcggaaaaggcaaaatccagcagcgaaatcaagttttatgacggtgcaaagcgagtttatagtgcaagagcggacgacgacatgattactatcagcggcatggagggataa

SEQ ID NO: 205413 - DNA, 276 bp, Klebsiella oxytoca
atgggcatcttcggtatcgccaaagagcatggtgtcaaagttatactggagcccttctgccttcccggccgtgcccacctgattcatcatcagttccgccccatgttccccgccaaacttcttgtaaagggcttggcggaacggcacggcaggccggtcgccggaaatacggaaactgtggtggcggaccacgacctgttccttgtgttcaaaggcggcaaggccctgttcgaaacgctttttggcaatccaacaccaggggcagaccagatctga

SEQ ID NO: 205414 - DNA, 231 bp, Klebsiella oxytoca
atgcgcacagtttcgatatttaaaaacggcaataaccgtgccatacgtctgccccgggacctggattttgagggggtcagcgagctggagatcgttcgcgaaggggacagcatcatcctgcgtcccgtccggccgacctggggctcgttcgccagcctcgaaaaagctgacccggactttatggcggagcgcgaggacgttgtcagcgacgaaggacgggttaacctgtga

SEQ ID NO: 205415 - DNA, 174 bp, Klebsiella oxytoca
atggacgtcgataagcgctatccggtgattaccctggtggataaattcggcggcatttgcgaagtggatctggatctgacagaggcgaaaggcgccgtatgggtcggtgagatcccttgtgagatccaacaacaaacggcatcagtgactggagatgttaagaatgtctattaa

SEQ ID NO: 205416 - DNA, 1350 bp, Klebsiella oxytoca
atggaaccaacattgtcattaaccgtgatgttctgtgctgcagtgggtgcttcagtatcagaatcgctgtcagagtccgaatcgctgtccgagtccgagtccgagtccgagtcgctgtcggaatccgaatcgctgtcagagtccgaatcactgtccgaatccgagtcgctgtctgaatccgagtcgctgtctgaatcggagtcgctgtcagagtcggaatcactgtcggaatccgaatcactgtccgaatccgagtcgctgtcggagtcggaatcgctgtcggaatccgaatcgctgtcggagtccgagtcgctgtcggagtccgaatcactgtccgaatccgagtcgctgtcggagtctgaatcactgtccgaatccgagtcgctgtcgctatccgaatcgctgtcggaatccgagtcactgtcagagtcggaatcgctgtcggaatcggagtcgctgtcggagtccgagtccgagtccgaatccgagtcactgtcggagtcggagtcggagtcggagtcactgtcagagtccgaatcgctgtctgaatcggcatcgctgtcagagtcagaatcactgtccgaatctgagtcactgtccgaatccgagtcactgtcagagtccgaatcgctgtcggagtcggaatcactgtccgaatccgaatcgctgtcggagtcagagtcgctgtcggaatccgaatcactgtccgaatccgagtcgctgtccgaatccgagtcgctgtccgaatccgagtcgctgtcagagtccgagtcactgtcagagtcggaatcggagtcgctgtcagaatcggaatcgctgtcggaatccgaatcgctgtcagagtccgaatcgctgtcggaatccgagtcgctatcagagtcagagtcgctgtccgaatcggaatcgctgtccgaatccgagtcgctgtcagaatccgagtcgctgtcagaatccgagtcgctgtcagaatccgagtcgctgtccgaatccgaatcgctgtcggagtccgaatcactatccgaatccgagtcgctgtcagaatccgagtcgctgtccgaatccgagtcactgtcggagtcggagtcggagtcactgtcagagtccgagtcgctgtcagaatccgaatcgctgtcggagtcggaatcactgtcagagtccgaatcgctgtcagagtcagaatcactgtcagaatccgagtcgctgtcagagtccgagtcactgtcggaatcagaatcgctgtcgctatccgagtcgctgtcagcgtcagaatcgccgtcagcatccgagtcactatcggagtccgaatcactgtccgcatctgagtcagtttctgaaatcgaagagtggtga

SEQ ID NO: 205417 - DNA, 648 bp, Klebsiella oxytoca
atgaaaagcttatgcccgtcatacttcgagccgcagccgcgttggctacgtttgttcgcccgaatcacttactggagtaagctcatcgggactcactcacttgccgccttgccgcaactcgaattatttagggcatacaattgtcatacttcgagccgcagccgcgttggctacgggctactcggcccatccatgggcctcgccctggcgggccgtcgcaagcgacgttcaaatctgctcccggcagatttgtcgttcgcccgaatcacttactggagtaagctcatcgggactcactcacttgccgccttgccgcaactcgaattatttagggcatacaattgtcatacttcgagccgcagttgcgttggctacgggctactcggcccatccatgggcctcgccctggcgggccgtcgcaagcgacgttcaaatctgctcccggcagatttgtcgttcgcccgaatcactgattggagtaagctcatcgggattcactcaccgccttgccgcgaagttgcgtcgaagcaaaggttatttctgctccggcgttttcttcttctttttgaaccgggtccagatgcgggtttcctgacgccgccacagacgctgaatgttgtcgtgatggcgcagcagaatcaggcatga

SEQ ID NO: 205418 - DNA, 699 bp, Klebsiella oxytoca
gtgccggaattcatttcactcgcaataagctcgttttggccgatgctctacgccgggctggtttttactatccctataaccttaatttcattttctctcggtctactgctggggtttatcgtcgcgttaatacgtttatacgggcctgcaccgctaaaaagtctggtacgattctatgtgtggattattcgcggcacgccactgctggtgcagttgtttctgatattttacgcactgccgagcgtggggattacgctggatgcgttcccggcagcggttattggctttacgctgaacgttggggcatttacgtctgaagtcatgcgtgcaactttgctttccgttgccaaagggcagtgggaagccgcccactctatcggtatgaactgggcgcagtcgctgcgctatatcatcctgccacaggccgtcagggtagctgtgccgccgttgtcgaataccttcatctcccttgtgaaagatacctcgctggcttccgtgattaccgtaccggagcttttcctggccgcccagcgtattgctgcggtgacttaccagccgttaattttatataccgaagcggccattctctatttattaatcagttccgttttatcttatctgcaatcccgactggaaataaggttagagagaaatacagtagtaaaggatgagtatcatgataacgttgtccgcacttga

SEQ ID NO: 205419 - DNA, 768 bp, Klebsiella oxytoca
atgataacgttgtccgcacttgagaaaagtttcgctaaccagaaagtattgcacgatatttcgttgacgatccctgagggcagcgtcacggcgctaattggtccatcgggaagtggcaaaagtacattattacgctgcattaacttactggaaattccgcaggctgggaaattaactattgatagcgaggaaatatccttttcatctgactcagtacccaaaagaaaagacattcgccgtatttgccagcaaaccgggatggtttttcaaaactttcagttatttccgcatttatcggtgctggaaaatattatgcagggggtgattgtggtgcagaaatggcctgttgagcgcgcgcaggcgcgggctgaagcgcttcttgccaaagtgggtttgctgcataagcgcgacgcctggcctgcgatgctttccggcggacagcagcagcgggtggctatcgccagggcaatggcgccttcgccgaaggtgctgctgtgcgacgaacccacctcggcgctggatcctgagcttgcgctggaggtcgtcgccgtcttgcggcaattagcgcaggagggaaccaccatgttaatggccacgcacgatcttcgcctggcagcgaatatcgccagccaggtggtcttccttgaggccgggcgtatcgtcgagagcggaggcgcaaaagagatttttacccgggcgaagaagacgcgcacgcagctatttatttccacgctgacagagacattcccggattcctgggaaatttaa

SEQ ID NO: 205420 - DNA, 774 bp, Klebsiella oxytoca
atgaaagtactaatgaccgcactgctggctactgccattcaactaagcgccgcagacgcggcctgggcgcaggacgacctggcgaagataaaatcggcgggcgtttttaaagttggcaccgaaggaactttccctccttttacttaccataatgcctccggaaagctggtgggatttgacgtcgacatcgcccgtgaaatcgcgcagcggatcggggtgaaggccgagtttgtggaaggtaaatgggatggcctggtggctggcctggatgccaaccgctatgacgcggtgatcaatcaggtgtcgattactcccgagcgtcaggcgaagtatgacttttccgttccctatatcacgccgaaagcggtgctgatcgtcaatgaaaagaatgaagacattcacaccttcgccgatctgaaaggcaaaaaatcggcccatacgctgaccagtaactatgcgcaaatcgcgcgtgagaacggcgctgaggtggtgggaacggatggttttgaccagtcgattgcgctggtttcgcagggccgggcggatgcgaccatcaacagcaacctgtcattcctcgatttcaaaaaacataagcccgacgcgccggtaaaaatcgtcgccgaaagagccgacgccgagcaggaagcggtactgatccgcaaagggaatccgcaattacgtgaggcgatcaacgccgccattgcggagattaaaaccgatggcacctaccagcgcatttctaatgaatattttgccgcggacgtgtcgaaatag

SEQ ID NO: 205421 - DNA, 159 bp, Klebsiella oxytoca
atgattactctctccagcttttacgccatggcgtatcccacctttatcatttcgcaatgcttcaaggcgaaagtgatgaaggtacgcttagagaactacgtaaaattatatttcatgttgcaggaggagatctccctaaaccatatgatttgtctctaa

SEQ ID NO: 205422 - DNA, 336 bp, Klebsiella oxytoca
atgggtgcgcaaatcccaaatatattaatatgcgacaataatcacagtatttctgaactcaatgttgagtccgaagaaaaaactgtgttttcagtctcacctgtaaatggcggctggtatattgtgataagaaacccggccgatatcgtctttactgacaacacagtttactcctctgctaaaagtgccagctcgtacataagcaatcttgctaatgacatttatgagcttgcagatattatcgatagtagtggcttgcatcttcatccattacagcattcagctcgttatcgtgactgcttcgaaatcatcgatgatcatcccagtagacaataa

SEQ ID NO: 205423 - DNA, 267 bp, Klebsiella oxytoca
atgaaagccttcaaatctcaggatttttacgtacatcgtgtacaagatgcagcagaacaaatgttgttagcactaaaccattacacttatggagaagctgaaagcgtaattgaatggttgttagtgcgattgaaagaggaaagtgtgctgaagatgacaactagatacaaaattcagcatgatcactccttcccactgcgagttccgccaaagagacgtctgatttattcgatgccaggagttaataacagaaagcttccaaagtaa

SEQ ID NO: 205424 - DNA, 1713 bp, Klebsiella oxytoca
atgagcgaatttactaactcgcaaataataatggaaaaaattattaaggaagaagcagcagagcaaggcgaaagtttttcagactattttgaactatatacagcatcacagatacttaaagattatgatgtaacatattctgatatcgaatatagcatagttggagatggcggtgatggtggcgtagactcattctatacattcctcaatggagaattaattaaagaagatactgattactcaaaaactggaaaacacaataaaatagaagtggttataatacaatcaaaaacatcaaaaagttttggcgaagatgcaattataaaatttaacgaagtgactagagatttatttaacatatcaacaaatataggcagtgatagcttaaaaagacgttataatgatgatctcagaggaagggtttcaatttttagagatgtctatagtaatttaatgaaaagcttccctgatttaactttctcatactattactcaactcttggagaggaaattcatccaaatgttgtcgacaaaggaaatattttaaaagaaacaatccttaagatgtttacaggatctaaattctcattagaatttgtcggcgcaagcaatttagtcgagttaaacaggaaggtaaaaagcacttcaagaatgatggagttagctgagtcacctattgcaacagttagtggtagttatttatgccttgttaacttgaaaaaatattacgattttatctcagacaatgattctctttcaagaagcatctttgagtcaaatgtgagggatcataatggagatgttgttgtaaatttatctattcaagaaacgcttacctctggcaaagaagatttttggttcttgaacaatggcgtgacagtaatcacatcaaaagcggttcttgcaggaaagacgttaactatagaaaacccgcaagtggttaatgggctacaaacatcacacgagatttataactatttttctaatttagacgataccgctcaggaagtaagaaacttattggttcgtgtcatttgtgagggcaatgccgaatccagagataaaataataagagcaaccaatagccaaactagtatccccccggcttccttaagaagtgcagatgtgatacatcgtgatatcgaagacttcttcaaagccaatggttacttctacgacagaagaaaaaacttttataaaaacgaaggaaaaccagcctctcgcatcgtctccataccgtatttatcgcaatgcgttataactacggttctccttcaaccaaataatgcaagagcaagaccttcaactctcataaacgacaatactcgatacgaacagatttttaataaaaaatatccactatctctttatctaaattcttatttaattttaaagagatgtactgagttattgaaggcgtattcatttgacagtaagagagattttaacaatgttatttatcatacggccatggccgtcgttttaaaattagctatagctgatgaaaaacaaaacaatatacctagatttgttagtggctttgatagcgttagaatcactgatgaatattttagagatgtattctcattagtcttaaacgaatatcaaaaattaggggctgatgacaccgccgcgaaaggaacagattttgtgaccaatattattaagtctctcgggaagccagtggatgcagagcattccccccaggcttaa

SEQ ID NO: 205425 - DNA, 1071 bp, Klebsiella oxytoca
atgcctctggttactcgcaatgcgttcattgatactgaattttttgtaaaagcaaacttggattttaactcaagaaccataaagtcctttgaagaactatgtgagaaagatgagtttaggcatattaccagtacaattgtagtgaaagaagtggaacggaaaatcattgagcaaatcaaagatgcattaaagggtattcacaattttagacgaaaggctatagttcttagagaatacgatgatgataatattaaaagcttttttaatgaaatcaatgagggtgatatacaaaaaaaagctctaagcgcttataatggttttattgagaactctaaaacaactgttgtagatatgtcatcagtagacctaaatgaagtcgttgatatgtatttcgacaaaataagtccttttagcgccaagaagcctaacgaattccgagacgcattcactcttttagcaatacgatcggccttaaggaaacacgaaaagatttatgtggtttccgatgatcccgaccttaaagggttttgtgagataaatgaaaattttgtaattgtagaaacgctaagtgaattattggatatttataataaacataacgataaaagagctggcttcattgagaaattcttagagattaaagctgatgagatagtccagagattaaaagaagaattagaaggagctagtgcttataactcatctatatgggaagattccgagattgaaagttttgaggttgttcatatatatgattttgaacccaaaataattcatttagacgatgagagttgtcagatttcttttgatgttactgtgaatttcaatgttaaagctagaggtcctaatacatcagagggctattatgacaaagaggatggagttctttatacttttaactccacctcaaaccaagaggaagaagaaaaagagttttcagtggagttagatttgtcatttgaaatcgatgaggatgaattcattaatgatgaattttatttacatgttacagggttaagtgcgggtattgagttttgtgtcgaagaaaactcatgggaagattatatgtag

SEQ ID NO: 205426 - DNA, 999 bp, Klebsiella oxytoca
atgaatcagaaggcatggtctttaaaaacagtcgggcaagatgatctccgatactttgggaataatggttatcaagatgactccactagtttttatagatatgacaattttgtcccaaatcataagcaagttaaaaaaggggatattgtcatagttacggatagaaaatatgttcttggcatatcaattatagacaatttgtcatctgccccgtacatgaaagtgcgaaaccgatgcccatataaaaattgcacaccagcaaaattaactcaccggaaatcaaaaaaaccagagtggcgctgtagtaatggacatgaatttgattttccaaacgcagaaaatattccggcaattgaatttaaagtagagtataaaaaaaactataaacccattaattctatctctataacagacttaatatcacacacaccacgatataatgttcagagttcaattcaagaaattgactttgaatgggcaagtaaacttttaggtgacatcattcagttgggtcctagcgaagcagactgtgaagttattcctctagatgtagaagatcaaagaaaggcagttttacggcaaattaagcaaagacgtgggcaaaaagcatttcgcgacagtttgctagctcaaacggctaaatgcgcagtaagtagttgtgaaatagttgatattctcgaagctgcacatatcactgcctacaagaatgatacgcacaaccatgtaagtaacggattattactacgttgtgacattcatactctgtacgatctagacctatttgcaatagatccggactcattaaatatttactttgctccgcagatcaacgatgaagagtacacaagatttcatggaaaaaagttgcttgttacgtataaagttaatcgcggagctcttctcgagaggtggatgagattcactgataagtatggattgattgtaggcatgccgcaggaagtgacaaatcctatcttaacaaagaaagattcattctag

SEQ ID NO: 205427 - DNA, 240 bp, Klebsiella oxytoca
atgcgactaataaaccgaagcaagcaatctcctctcggacgccaggcatgcgaaacggcactggcgaagcacgttgagctgtacggcgattatggacgtcagaagacaaagcggacctacaccattgaggttaatggctcaaagattacggttgaggtagtaaacagaaaatgcagttatgtggccacagcaatgaactgcgcacgcaggctgcagcatctgccaggacaatctaattaa

SEQ ID NO: 205428 - DNA, 1512 bp, Klebsiella oxytoca
atgagtggggggaaattgccggaggggtggggtaaaacagaaataggtgatattgccgacgttatctcaggtggtacgccaaaatcagggattgcagaaaatttcgcctcctctggtgaaggtattgcctggctaacaccagcagacctgagcggatataaaatgaagttcatttctcatggagccagagatttatctacagagggatattcatcctgttcagcaaaattgatgccagcaggcgctatattgtttagcagtagggcccccattggctacgtcgcggttgcatccaataagattgctactaatcagggatttaaaagcttcgtttttacaaatgatatttaccctgattatgcttattactatctccgtaatatcaggcatctcgcggaagaaatgggtacaggtacgacatttaaagaaatttcgggtagcgcagctaaaacacttcccttcgttatggctccactcgccgaacaaaaaatcatcgccgaaaaactcgatacgcttctggcgcaggtagacagcaccaaagcacgtcttgagcaaatcccacaaatcctgaaacgttttcgtcaggcggtgctagctgctgctgccagaggagaactgacgaaggactggtatacagacccaaatttagttagtgcaaaatctattctaaatgagatcgaaactgagcgtaatcaagctaaaaataacaagcttattaaacagggtttcggaaaatataaagatatatcaccgttattccacgtaccatcaaactcatgggaatgggtttgcctggaacaaatttgtgcaaccaacaacaatgctcttaaagcaggtccgtttggttccgctttgaaaaaggttgattgcgtagaggttggttataaagtttatggacaagaacaagttatctcaggtaacgaatctcttgaaacataccgtataaatgatgataagtacgaacagcttaaatcatgcactacaggtcctggagacatattaataagtctggtagggactataggaaaagtgctagttttatcttcccaggcagaaattgggattataaatcctcgactggttaagattactttacataacactatcagtcctcaatatattaaaacttacctcgacagtcctgtttcccatagttttttcaaaggcttcagccatggtggaacaatggagattctcaacttaagtatactcaaagagttacctatagcacttcccccactagaagaacaacacgaaatcgtccgccgcgtcgagcaactcttcgcctacgcgaacaccattgaaaaacaggttaacaacgctctgacccgcgtcaacaacctcacccagtcgatcctggcgaaggccttccgcggcgagcttaccgcccagtggcgtgctgaaaaccctgatctaattagcggtgaaaacagcgccgccgctctgctggaaaagatcaaagctgaacgcgctgccagcagcggtaaaaaagccgcgcgtaaaaaagcgtaa

SEQ ID NO: 205429 - DNA, 234 bp, Klebsiella oxytoca
atgagcactattaaaagttacgccgccaaagaagcgggcgccgatctgtcgctgtgggagtacgatgccggcgaccttaagccggaagatgtcgaagtgcaggtggagtactgcgggatctgccactccgacctgtcgatgatcgacaacgaatggggcatgtcgagctatccgctggtggccggtcacgaggtgattggccgggtggcggcgcggcgcaggataaggggctga

SEQ ID NO: 205430 - DNA, 1056 bp, Klebsiella oxytoca
gtgataaaaagcccgctagatttaaaaaatctgaacataaccgatctgatcattcatagagtctacttgcccggacaacaggctcattttgacgtagaacattcaaacaacattatccccctgtcagggaaagcaaagcagacgctcgaacaaagattgaccaaagttctatctaaagggtcaaaatgtattgagatggacatagttgaagacgacccactcgaaaaaatacatgctttgcatgatgctggtgaggagctctttgtatcgaaaaccaaagatatcgccaacaaactcggtaaagctcaaactagtaaaaagcatccagaaggtgtccttgtcatcgtgagatgttcctacgggatcgcaaagaaaatccgggctgtcgctataattaaagctgagctacatgaaggcttcacatccacagttaaagataatgtagctactatcggttatttaactaatttatttcttactccagaacaaaaactttacaaagtcgcttttttttcagaaaaaactcgaatgcctattctgaataaaaatgcctatgaagtctttttatttgataataatttaacatcaaaaaatgattcaggcgcagcagcctatttttacaaatcattcttagggctttctatatctgctgactccagtagacttacaagaagtttttatgagataacagaagattatattaataccacaagtagttctctggaagaaagaatcgatctatcaagtgcattaagaatatacattaaagcaggacaatctgaaattattggaacaaacgatttcgcagaaaactatatgtcagtagaaaaacgcgatgattatattatgttttgcgaagagaaagatcccgtgatctcatcatttaaaaaagatgacacattaatcaaaaacagaataaaaaattccacctttaagttcagtaatgaggtaaaaataatctatccttctatagatggcgatacaccttgtgaaatcatcgagcgagatgataagtataccacagtaaaaataaatggatgtttgataggaaactaa

SEQ ID NO: 205431 - DNA, 156 bp, Klebsiella oxytoca; identical to SEQ ID NO: 112167

SEQ ID NO: 205432 - DNA, 1182 bp, Klebsiella oxytoca
atgaaaatacaaaaaattgatatcaaagatgttggtggtataaaaagagcaacaattaattttgatgcaagtatgaatattatttgcggaccaaatgggatcgggaaaaccacaattttagattccgtggcacatagctttatttctacaaacagctatgtcctgaaaagacatgctcagtcgactgatggtcagataaataccgttttagatgattgtgataatattaaagaagcccatatttcttttgcgaatttcaatccgcaggattattcatttgttcatgggttaagcgatgctggaaggaaagtgatttatttgaacatttctagaatgtttaaatatgtatctttatctaatatttctaaagatgaggaaagacaagatcatagcataaatacccttttgactgatggaatttcggttgcggatatgaaaaattggttcgcaaaacgttgtctgttcgttaatacaccagaagcattaagtgaaaataataaagttaatttggagttggcaaaaaaatgtttttcactgcttaatactgaatataaattttctcgcgtagatgcgaaaagatttgatgttttcgtatctactccaaatggagaaatttggtatgaatatttatcatcagggtttaaatcatgtctgagtattttattcggcataataaaagagattgaactaagaatgcctgatgaagattgtttagcacagcattttgatggcattgtattgattgatgaactggaaatgcatcttcaccctgaatggcagtccaaaattgtttctgttctgcgagacacatttcctgcaacacaatttatagttactactcatagtcctcacattatacaaaatgcggaacctaatcagataattgcattagggacagatagtaatggatatacatacgtcagagaacttccgagtaatgagtttggttatacaggatggacagtagatgaggtactcaaagatgtaatggggatggaggacacaagaagtaagaaattacaaaatatgcttgctgcatttgatcaagctattgatgaggagaataaaattgaagcagagcgcatttataaagaattagatagggcacttcatccagcaaatgtgcttagaaaaatgcttagtattgatctttcctcagtaatcgaggagggcaataaatga

SEQ ID NO: 205433 - DNA, 747 bp, Klebsiella oxytoca
atgattaagctggaaagaaattttacacctctattcttttctcctcagaatgttagtcgtttaactgaaaaatttaagagcaacggtactcatgtatggcatcacgatgatgtaaaaaattcattgatggagttaagtgataaaaaatgtgcatactgtgaggttaagcttggtgaaaaaagcacatatcatgaggtggagcattttaaagataagaatgattaccctgatgatgtaatagagtggaataacctattaccttcatgtcgtcattgtaatggttctaaagggacacatgatgttgtccaagaaccaatagttaatccttttgaggaactcccggcagagtttttttatattaaaaatttcagaatgaaaggaagaaatgagaaaggtattctgactatagatgttttaaatcttaacgatagagagcatttggttaagccaagatgtgaaactggagctataattgcggaaaaaatagaagattctttaactttatttgagatatatctttcaaatccaacaggcaaaaataaaagaaagttaatcggtactgttagagggatacttaaagaatgtcaaagaagtgccatattttccgcagtatctgctactatattacatacgagtgaggattatctgactttacggggtaatatgatggcccataagttatgggatgaagatatggagaaccttcacataatgtcaaacaatatacaattaccaacaacagcttaa

SEQ ID NO: 205434 - DNA, 219 bp, Klebsiella oxytoca
atgccagacatctaccaattaacgctaaccactcaaacaggcgaaaccttcacgggcaagatgtcgcgacgtcagcctgagctggttaacggctttgtgccgctggcgaccgagacgggcgagtggctgtatttcgcgcctgctgatgtgaagcgtgtgcagtttacgccagcaccggcagagcagaccgaacagccagcacagcaatcaacggagtaa

SEQ ID NO: 205435 - DNA, 363 bp, Klebsiella oxytoca
atgttttcctttctcaacacattcaagcggctcataagcaagcagcagacggcgctgaccgtcgagccagagtattcagatgaacagctattgcagtgggctaccggttgcatgttagaaggtttgccagacgagttttatgaggcgagaatttcatgcttccgtagcatcgatagtgaaggacgcatagcaattgcagccatacatgacttcaaattaagcagcgaaagcgaatatacatcctttactccaccagatgacctttacgccacacactgcatagagaaaattcttaacgaagaaaactggcgcgaagccactataacctttaccacacaaacgacacgattcatgtggcaataa

SEQ ID NO: 205436 - DNA, 252 bp, Klebsiella oxytoca
atgagctcattaaaacttgttagcactgtcaaattcacgaacgctaaaggtagtgaagccaaatatgagatttattacgacgcagtaagtaatgattaccaggctgaggtatcatatctaacggatgtagtgtctgttgaagggttcactgcaaaggtatggtatagagttcctcagaccatccatcgtctctctggaaacacaatttctgatcttgaagatagttgtaaaaaccattttgaaggtaagtaa

SEQ ID NO: 205437 - DNA, 483 bp, Klebsiella oxytoca
atgaaccgcatcgcggagattacgtgtgccgtggtaattgtcgccctgtccactatgggatggctggcgaatcactaccactacaagtacctgcaggagcagaaacgcgctgataccgctgagcagggtcttaagctggcgaacgcgacaattaccgacatgcaggtccggcagcgtgacgttgcagcgctggatgccaaatacaccggagaactggcagatgctaaagccactatcgatcagcttgagcgcgatgttgcttctggcaagcgcaggctgcagctcaacgccacctgtgcaaagggtaacgccgccaacgcccccggcgtggatgatgcaaccaccgccgaactcactccagacgctcgacaaaattattttcgtctcagagagcaattagccacctctgaaaaacaaattcttggtctgcaggactatatccgaaaggtggtttttgatgagaagggcgaaagtaaccaatga

SEQ ID NO: 205438 - DNA, 225 bp, Klebsiella oxytoca
atgagtaaaatccaatatccaatgaccacggcggccattttcgatgatgttgtttaccctgtgcgcttcgataatgccgacaaggttaagcaagagatcgacggtgctgttaactggttctgccggtggtgcaatgaagagaaagcagttgtgaaagcacgggttctggtcagttgttgggggcagtatctgaactatgcacaggtcatggaggggggagtgtga

SEQ ID NO: 205439 - DNA, 246 bp, Klebsiella oxytoca
atgatcataaaattaacagcgataatggtatctgataagcgtggagacctgacgcctattattgataaagatatttatttaaatgatgttagtatttccaggtttataaagtccaggtttataaagaaagaggaggggacattgataaccttagtagatgggtttaagacccttgttaaagaacagccttatgagattttttgcacgctaaacggaatacaggataggtcaaaagtcgtttgttga

SEQ ID NO: 205440 - DNA, 261 bp, Klebsiella oxytoca
atgaaaaagaaagatagaatcgctgccattgcagggcttagccctgctttcggagcaactattacatatacaactcgttgcgaacaaggttttatgagaaatttaaaagaagagcagcgactgcacggactttggtttgatgcatctgctagcgttagtcagtatgataaagacctagccatgatttgcagagaaaaatctaaatattggttagaatatgaaaactatgatcatatgaaaattatcgatcttggtatctaa

SEQ ID NO: 205441 - DNA, 414 bp, Klebsiella oxytoca
atgagctttcaaccgattaatcaaccgtaccaacaacaaattactcgagagcaacttgctagaacgcgacaggcccttgacgaaatgaagttgcactatgataactatgaagctcatattcgacagatgcaacataacattaaaacccctgaggattcgattaagttctcaactcatatacttgagctgaacagatgtcgcgataatcttatccgtcatattaatgcttataacgaaatgattcagatctccaatttacagtttagttctcgtttgagtgagcaggctaaaactgagatttatcatttttataaatccggtcgttatactcaagagcaacttgccgctcaatatggcgttactcaaagtgccattagtaaaattgtcaacggttctgtacctgatcaaatctaa

SEQ ID NO: 205442 - DNA, 690 bp, Klebsiella oxytoca
atgaaatctcttgcagagcagatgcgtgaccacgaccgcgagcagatgagccgcctggcccataacctgccagagcagtaccaggagcgtgcgccggtcgagcaggtggctcaggtattcaacaagctgttcaacgagctgcgcgccgcgttcccggccagcatggcgaacttccgcagtcaggacgacctgaacgaatttcgccgtcagtggctgctggcgtttcaggagaacgggatccacaccatggcccaggtcgatgccggtatgcgcgttgcccgccgccaggagcgcccattcctgccgtcgcctggccagttcgtcgcctggtgcaagcagagcggcgggatgctgggtatcaccgttgaccaggtgatcaccgaatactgggactggcgcaaccgttcgttcgagttcacctccagcgagcaattcccctggtcgcagccggtcatgtaccacatctgcgtcgaactgcgccaccgcagcacagagcgccagttaacgcatggtgagctggcacgcgaggctggcgatctgctggacatgtgggagaagcgcgtcaccgagggcaaaccagtgccgcccgtgcgccgggcgattgcagcgccggctgccgagcacgggccgacgccgatccagctgcttcaggcgaagtacaaccgcaacaagtcgaacgggatggtgtga

SEQ ID NO: 205443 - DNA, 864 bp, Klebsiella oxytoca
atggccagatcgcgaaatatcaaacccggctttttcacaaacgacgagcttgcagaatgtcagccgctggcgcgcattctcttcgctggtttgtggactatcgccgataaagagggtcgcctggatgaccgacctaagaaaattaaagccatggtgctgccttttgatgatgtcgattgtgacgctttgttgcagcagctgcatcagcacaaattcatcaaccgttaccaggtaaaaggcgattgctacattcaggtttctaactggaaaaagcaccagaacccgcactgcaaagaagcggcaagtgagataccagaaccatctcagaaccaaaatggcaccgaacaagaacagtgcaattcagatgctaaagaggaaaaggaagaagagggaaagcctcaagtcattgaaaataatgaagcacaagaaaagaacggtgctagtaagatgcaagaacaggttcagaacagtttaaatcctgctgattcccttaacctgattcctgattcccctatccctgatccggattccttggttaacacccaagccgctcacgcgtcttgcgaagaggccaatgcagatattcatgagatatcgagtcggtacgcatttgagggccagatcgttcggctgaaccataaggactaccaggcatggctaaacctgtacccgctgatagacctgaactacgagctacagaagctggatatcgagttcactcatgagaagccaaaaaactggtttatcactgccagccagaagctgagttatcagaacaagcaggcgacagtgcgcggcaaaccagccgccaagccggatctggacttcaacaacactgactgggcctatgaggtgatgcgatga

SEQ ID NO: 205444 - DNA, 693 bp, Klebsiella oxytoca
atgcatctcgagccattaacaaagcaagtcggcgtattgaagactatggatgttccagccgactacagaatggaagggtgggtatacgtgttgagcaatccatgtatgcctggcatctacaaaattggaatgaccacaacaagcccggaaattcgagcgcgagagctttcatcagctactggtgttcctgctccattcaaagttgaggcggctttctacagccattctccgctcgatgctgaaaaagagattcacgatgctttgtcggaatggagagtaagcgagtctcgcgaattttttcagcttgatttgaaagaaattattcatgcgtgttcgtgcagctgtgaatgccaggttggtgaaaaagctgaatatatagctatttaccacgacttcatcatttttgagagccttagcaaaatcaatatacctgaactttttaatgagattgggattagcgtcttcggcgacaagcttgcagctgctgagcgattaattcgaatcggtgcggaaactattttcaatatccgtagaaaaagcggtgttgttatcgctgtgcacgattcaaatgcgtatgcgatcgaaccggctgatgaacaggcgctaaaagaagccatgaatgaatatcaagctcatagagaagagcttgagagacgtggaatttacggcccagaacaaccagtggagttttaa

SEQ ID NO: 205445 - DNA, 927 bp, Klebsiella oxytoca
atgacagatttcaatagcaatggatccccacggcaaatccagttgtttcctgtagtagaggtggtgtccgatgatataccaatgggggtattaaacgatggaaccccatatttaacactctacggactcgcaaagctatgtggtattgatgacaccccgctgagggtttttacgtctaattgggaaactgaaaggtttaaaccgaggggccagaaagttacatcttacttagcctcccgcggtaacagcaatgtagacaagttgtatacacgagttgtgaactctttaggcgttgaaactcatgcataccctgattatgtatgcatggccatattgagatattacgccttcgatgcgaacaactttgacaatagcaccgccgtagataatttcgttagactggcagaatacacccttaaaaggatgatctatgaacgctcaggctaccagcaacagaatacagaagtaattagccagtcatggaatgtttatcagcaaagaattgtagcaaacgacggcattccaatcggctatttttctatcttccgcgaaatggctgatttaactgttcgattaataaacagcgagtttaagcttgaccctcactccatcccagacatcagtgtagggcagaggtgggctaagcactggaaagacaatgcaatgtcagaaagatgcggagaaaggattcttcatccacataattatcctgaagattttccgcagagcaaaggaacacagaaggaagcgtatatctatccaaacgttgcattgggggagtttcgtgactggttgtacacaacatatgtcaatattcacttaaaaacatatttagcctcaaaggttcagcaaaaagcattgcctgcaccgcaagcagaaaaaataatacttgcactgcaaaagcctacacttccaaaaccacattaa

SEQ ID NO: 205446 - DNA, 291 bp, Klebsiella oxytoca
atgactacgatatgcccgcaatgtggttctgagcgtgtcagcgaacgaaatattggcaggaaggcaggaggtatcgctggaggcgtggcagaaacacttactggtgcaggtacgggggcggcaataggttctgttgttccggtggtggggactgcggctggggcggttattggcacaatactggggagatttgtcgccggtgcgacggctggagcggtaacaggggcatctcttgatggcgtcctgttcgatcagtatgaatgtcgtgactgtttacatacatttgactaa

SEQ ID NO: 205447 - DNA, 957 bp, Klebsiella oxytoca
atgcagcttatccgttttatcagagtgtttataattgcgtctgtcgcccagctggtatggattaatggtgccggggcatttacctgcaaagatattgcgggaaatacgcttaacagcggtgttaatgcgccaaaagttgctaacgtgtatgttaatctccagcccagcgtggcagtgggacagaacctggtcgtcgatttgtcacagtctatctcttgtcgtaatgatatgccaagcactcgaaatgaccttgtcagcatgcttaaaggatcggcctacggcggggtgttaacaaactttaccggcacaatgaaatattatggctccagctacccttttcctctggatgcagccacaaactcggttaactttacttctggaagttatgtgccatggaacactcagctttatctgacgccgctgacctcggctgggtcggcagccggtggggtagccattcagagcggcaccatgtttgctcaactggtgatgtatcaggtggggtcaaatatcaacgggggcggtaatgtccatacagccacctttacgtggaacatatacgccaataatagcgtggtggtaccgacgggaggctgcgatgtctccgcgcgcaacgtgacggtgacgctgccggaatacccgggcagcgccgtggcaattcctctgacagtgaactgcgccgaaaaccagagtctctctttttacttaaccggcactacctccaccagtaccgatattttttccaatacttataccggtacgacggctgcctccggggtcggtatacagttgctccgtaacggcagtgcgatcccggcgaatcagaatatctcgctgggtacggtgggaacgtctgcagtcagcctcggactgactgcaaactatgctcgtacatctggtcaggttactgccggtggagttcagtcaatcattggtgtaaattttgtttatgactaa

SEQ ID NO: 205448 - DNA, 201 bp, Klebsiella oxytoca
atgcaccactattacgacctccggatgcagcagcaatggcagcagacgctgtttaaggaagagatgaacggacgctttatcagtcatatcccggcgaagcactttaaaatggtgcactactatggctttttagccaacaggaaacacggcgagctgctaccgatggtatacaatgccctgcagatggaggcgcagaattaa

SEQ ID NO: 205449 - DNA, 294 bp, Klebsiella oxytoca
gtggcgcagcaggcggatgacagcgccacgtcagatttcttccacggcgtgctttttaaagaggaggtcgcgccagatgccatattttatatccagcctgctgtgggtaacggaaaggtagatgtgcagatgctggttgagctgtctgccgtacgtatgcagggcgcagaagatacgacctccacgctctgtttgcgggcccggcggagcatggtgcgggaggcgggacggaacagagcgttgagcagggaccagttgttgttgaaaaagggccacaaaagtgaggcatggtga

SEQ ID NO: 205450 - DNA, 951 bp, Klebsiella oxytoca
atggccagtaaaaataaaataattgtacatattggagatgagattcttttttctgttcttaaggatgaaattaagaggtctggagggaatagctctgaatttgtgcgtaagatactcgaagagaagttttcaggaaaggtttccgaggcgaaatatgacttaaataaaaattattcttataatagagatactgatgcagccagtgtttaccctctaaatataacggtagattcagagaggcaagttaccaaagatggaattcttaggtttgataaaattgaagaagttttattcgatgattatgagtctattttttttggtgtaatgagttttacccttagtcatattaagaaaactgtaaagaatgaagcagtaaagcgtattccggagattataaagaaagcatggtcttctattgagtcccaatacggttctgctgatattaatctcgtctttgttaatagggtcgacataagcttcctggagtataaagacgataaattttatgtgcgcataaaagttctcttcaatgtgtctaggtttgtttttagtgctattgaatggaataatgaatttttacgaattgactttttgaatgttaaatatcggcgttttaaaaatattgcaattaatgggtgtttgtccaagaagtatgatcgttggctttattttaagccagcaaaggaaacttcgctgggtggttttttcgcaggtctgttatatacaccaaaaacgaaagaagtattgattgaagaaattgaatggttgctttccaatcagggtgcgcatagagctgacatgctggacatacctggtaagtttgtgaaaatacatttcaatagcgatcagatcaaggttgatggacgttcttttggtcagggattcaaaatattagagcacaaaagggaaaaacatagatttggaatcgacaggccttcatggctgaaatga

SEQ ID NO: 205451 - DNA, 450 bp, Klebsiella oxytoca
atggataaacacatttcactgacccctgaggtgacagagccattcatcctcgcggccactgtcgtaccggatgaagagcgccttcgtttctggcctcagctctttggctccatcccgcaatggataacccttgagccctgcatctttgcctggatggaccggttgtgtgcggattacagcggtggcgtctgggctttttacaccctcagcaacggcggtgcctttatggctccggaagagagtgacggtccctggtcgatgtttaatacccttaatggtaacggcgctgaaatgagtgctgaagctgcgggtattgccgtctgtctgatggcttacagccaccatgcctgccgcgcggagtgcgatgccatgacggaacactattaccgtctgtgcgactatgcgctgaaccaccctgagtgcaacgccattatgcacatcatcgactga

SEQ ID NO: 205452 - DNA, 141 bp, Klebsiella oxytoca
atgatggttagttcttttccctcagttgcgatcgctgataaaagactgatggcccgtttcacacctgccttagaccgttcaacctctaaggttatttctgaactgcctacatatgttaatcttttgccgaatctgtactga

SEQ ID NO: 205453 - DNA, 588 bp, Klebsiella oxytoca
atggcaacacctatttacttggatatggaagaagtagtcaaacaatcgaccgataaattaattcgggagcaagtagatccttggatgaatttaatcacaatcaataaagttaacgtgagacgattcgatggcagagatatcagcctagagggtgtcgcttttcaaggaaccgcagtaaatttgttctggcacggatatatcgacccctatttgaaagatatgattaacaaccaaataattcatttcacaactttcgcgaagcaaaatcacgtagtagttgaacaagccttatttgaactacaggccatgttaatcagctcttcaataagagtttatacgaggatggtcgatattgatcaaagactcagagggaatggacacccacacactataattaaaaagcccattgaaaaagaactggaagacattaaacattacatttccactaaagtaagcaaccgtgtgaaaattgaaaaggctatcccatggtatgaaaaaccgtggctaaagtcgtggcctattattgtgacaatgttggcaaccattattaatctgctaatgaatatctattctaagtttacttcatga

SEQ ID NO: 205454 - DNA, 507 bp, Klebsiella oxytoca
atgaaaaaattgattgttgcagcaatagccttgatcgcatttagtgcacagggaaacgactggagcactggatacaaaaaagatgagatgcggggtactactcagaaaatcatgtggcttgagtctgaaaattctgcctattttgattttccttacgagggtggatctaagctgggaattgttttgctttccaaacgtgtcactctaaaaatggggcaaaagccagaggaccttaagccagagttcgcttatatatacatcgataaaggccaatttgtatgccctgcaaatgatccctgccatgtgaatattaagttcggccaagattctataatcccattcactatgactgagcctgaagatggcagctctaactacctctatttttattaccctgagcaatttataaaatactttaagtctcataaatcagtaatcatagaacccagattcttcgaggaaggtcgtaaacaatttaaattcgatttaagcaattatccggggtag

SEQ ID NO: 205455 - DNA, 471 bp, Klebsiella oxytoca
atggacaagttcgaccgcaacatacaaagggatctcctcttatcgctttacaactcatcccctgtcggcataaaccaagaaatcagtagcgcctttcagtcacaatttgggggtagaaataactatattgccaacattaaataccttgaagaacatggacttatcatttcaggaattagggaggtcacaagtggtgggttttctctggttcctgaaaagatgaaaattactagtaaaggcattgacttcatccgtggtgacggcggcctctcagcaattctcaacgttcagaccatcaaatttcatcgcgaagcagtagtcgtcctagaagacctgatcgcgatttcaaacatgaatgatgagcagaaagaaaaggctaaatcaacacttggtgaactatcaacagaagcccttaaaactgtggtgcaagctgcgactaccgcggggctatctaaactatttgggcaatga

SEQ ID NO: 205456 - DNA, 870 bp, Klebsiella oxytoca
gtgattaacttcgattctatattaaacaaacattctaatcagcccatcgttcagggggaatggtttactatccaatggtgtcctgatgtagctacgggtgaacagctaaatatcggtgttttctttagagatagcctgggtggggcatttatacagactttggagtattttgatagaatttcttgtctgtactcacaagggatgatatttcatctaaaattagcttgtgaagttgcgaaagagatagttctttcaggttcagagttaattgagcataaatattacaacttaacatttagaaataatggatatgctcaaggtgagtcagcagacgacatagtaaactctttgttttcgaatgtggttccgttatctgtcactatctcgaagaaaaaggagagagcatactcacctgtatctagagatcgactttataatattatggatggatatttgaagaaacatcttgaatatgaagagtattttgaaatgagggatccctcacctttaaagaaaattcatcttggtcagcaattacagaccatatatcttccctacaaggccaagaggtctcttggaacgatagcctctgctgcatatgcagatgaaaatttagcgaagtgtcatttgtatgatgctcagagagatatctcattggcattaaacagttatgatgagtacaagagcggcgcaatttttatactttcacctaacaataatttgaaagtagaaaagagagatcaagtcgatttagaaatagataagttctgttggtatctcaaaacacaggcaatagaaacagaagttgatagcgatccagacattttatctgatcgagccattcattggtatcgtagaatggccgcttaa

SEQ ID NO: 205457 - DNA, 732 bp, Klebsiella oxytoca
atggcgctgacatttttgtgtcttattgactggcctgatggtaagcaaaggcaatcctatgtgaaaatttttgatagggataaaggcattggtatcttcaatgaggtgcttggctacttactaaccaaggcctgtggacttcctgtagctccaaaagctgggatattgatattacccgaaggtattgttaagacaattggtttggatgtaacgccaattgcttttgtaagctctaaggtaacaggaaattctccatccagttattataatattggagatatgattaattttgatagcctaaggaagattcttgatggctgggataaattgcataagacgattgcttttgatgagtgggtggcaaatcaggataggaatcttggtaacttaataatcgattcccatagtcaagtcacgctcattgaccatagcaatatgcctgtcgatcttaagtggtcacccgaagacttatcagtaactataaatcctatcaataaattagaattggctttgcgcacagagcccactctccctcaaaaaatggagattgttaatggggcgaatggacaaattgacgcgttggatttagtgattgatgaggtgattcattggtgtaatcagcttctaagccagcaagcaagggatagcctgctgatttttttacatcaacgagctcttttatctaaagaaaggttaagcaaaaggcttggagtcctggcgggggtcgcgtga

SEQ ID NO: 205458 - DNA, 744 bp, Klebsiella oxytoca
atgaaatctatcgcagaaagcatgcataacttcgatcggaagaacttccaacgtatcgccgccggcatgcctgagatgcacgatgcgcagagctttgcacatcaggtgacaaagacggcagaggtattcaacgaactgtttcgccagctgctcgcagtattcccggcgctggccaacaaatcagcggaagacctcaacgagatgcgtcgccagtggctcctggcgttcaaggagaacggcatcaccacggtagagcagattaacgccgggatgcgtgttgcccgcaaacaggaaaaaccgtttatgccatcacctggtcagtttgttgcctggtgtcgttctgaggaggcggtaacggtaggcctgccagacgcgagtgagctggttgatatggtttaccagtattgccggacccgcggtcagtatccggacgctgagtcgtacccatggcctgaacacaaaatcgaaccgataacgctgaaacacaaagcctgctactggatggtgaccggtctgtataccgatatgcgcgcaaagggattaagcgactccgaattacgccgaaaagcatcagaggaactgttgcgcatggttcgtcgggtgaacgcgggtgaagttattccggagccggttaagcagatccagaagcttggcggaagaccattaacacaagagcagggcttaaacaaaatcgctgaaatccgcgcgaagttcggtttgggaagagggcgcaatcatggctag

SEQ ID NO: 205459 - DNA, 480 bp, Klebsiella oxytoca; identical to SEQ ID NO: 112170

SEQ ID NO: 205460 - DNA, 351 bp, Klebsiella oxytoca; identical to SEQ ID NO: 112171

SEQ ID NO: 205461 - DNA, 291 bp, Klebsiella oxytoca
atgaaagtagaacttaatacgacagagcagtttatcaaagaggctgagtattgttataaccgttatatgaataaacgactgcaaaaccagtcagtgcattcctaccattttctgaaaaataaggagggtatgaacgaagtgattgaaaatattatcgagaaaacaaaggtctgtttttatggggccgaaggtgaacaaaaagcgggacggatctccgggagtgttaactatgtgaaagtaaaacagcatcttcgtcggctttggattatctataagtgtgtataccgctga

SEQ ID NO: 205462 - DNA, 747 bp, Klebsiella oxytoca
gtgactccgactctgacagcgattcggattccgacagcgattccgactccgacagcgactcggactctgacagtgactcggactccgacagcgactcggactctgacagtgactcggactccgacagcgattcagattccgacagcgactcggactccgacagcgactcggattctgacagcgattcggattctgacagcgattccgactctgacagcgactcggattctgatagcgattccgactccgacagcgactcggactctgacagtgactcggactccgacagcgattcggattctgacagcgactcggactctgacagtgattctgactctgacagcgactcggactctgacagcgattccgattctgacagtgactcggattctgacagtgactcggattctgacagcgattcggactctgacagcgattccgattcggacagcgattctgactctgacagcgactcggactctgacagcgattctgactccgacagcgactctgactccgacagcgactcggattcggacagtgattcggactccgacagcgattctgactctgacagcgattccgactctgacagtgactcggattcggacagcgactcggactctgacagtgattcggattccgacagtgattcggattccgacagcgattcggactctgacagcgatattgaggccaaccccgatagcaacagcccggacgttgtcgcgctggaaggtaacctga

SEQ ID NO: 205463 - DNA, 342 bp, Klebsiella oxytoca
atgctaaaaataaaaacaaagatctatatacctacaactttaacagggaatatggataaacactatatccttgttttagaagatttaagaaaagcgatatacagcgacagaatgttatcaaggcttgcagatagtggcaatattgtaatccatagttcacttggatatccggttgctaaatataaaaatacggggattagcataggtgtagaaccattaaatccgatgttaagacaggatctaactcttggatatattgtggtagtcagaaacagaaaagtatctcaggatattaatggcttacttaacaggtcattgccaaaaagccataagcatctttaa

SEQ ID NO: 205464 - DNA, 936 bp, Klebsiella oxytoca
atgaaaatatatgatgggaatgatcttaattatctttatttagatgcgttgtcagattctttaaaaattagcagtcctaactcgtcacgctctggaatagtttacgatattggaccagctgtatttcaacttccttctgataagttgaatttgataactctaaatacaagagcgttaaatcctttttttgctatcgctgaagcggcttgggtgatcggtggttttaatgatcttgcatatctggattactatataaagacatatggtgatttttcagatgatggaaaaacacttaacggagcttatggatatagacttcgacaacaatatggatttgaccagatcgattttgcaattgaagaattgaaaaccaaccctaattcacgtcgatgtgtcttgagtatgttttccccgagcgatttgataaatacaaagtcaaaagatattccatgtaacatatcggtaatgttaaaaataagaaatggggagttagaccttactgtaataaacagatcaaatgacatatactggggagttccatataacttttttgtttttcaggttttacattattacatagcatctagagtaaatataaaagttgggactcaacgccatttcactgactctttgcatttatatgaaaaagacataagcagtattaagtctatcataaaaaacaatgattcaggtgtggctttaactcaaagcatgaatgttgagctcattgacggaattttaaataacattgctgctataaaccaaagaaattttttaaatatcacaaacacgcatataaatagattgctaagtaattacagtaaatataaatcggaaggtgatctctttgctttaaataaaaaaacaaacaacacgactcttgattttttggtgtcagattggtcacgtaagtatattgtaaattctatttgttga

SEQ ID NO: 205465 - DNA, 339 bp, Klebsiella oxytoca
atgaatctaacattaaaagaaatctgtgagaaacaagaggatttcgataaaaaaaccgccataaaaggtcgtgggttttacaaaaaaattaatggaagtaatttgcatgaattagaacatctcattgtatgcttgctaggcgagttaggtgagttttccaatataacaaaaaaaattgtcagaggtgataaagcattaaatgaagtaaaatctgaacttgacgaagagttagttgatacctttatctatcttattaaaatagctaatcagtttgatgttgatctcgaaagcggatttatggcgaagttagaaaaaaataaaaaaaggtttaaagattag

SEQ ID NO: 205466 - DNA, 885 bp, Klebsiella oxytoca
atgtttaacatagaatataagaaaatttcttctcttgaaattattgctagtgatgcttgttcaagcatcaaccctgatgaatataaaattaatctgattcttgcctatgaaataagtacagcatctcttatagaaaatgttctatcggatgttcatcaactagcagagcaatggagtgcggatgagtgtccgaaaaacttgtactttaatcatggccaatataaagtgggtggggtcgataatattattagtgagcttaaagaaaaaccttcgagtaacagggcgctttattcgttaataaatcaagagacaatcatgaactctggtgatgatccaataccatcattcatgttatttcaatgtgttcttgaacgtggggtattatactgcaatgtttatttaagagcgttggaagttagcaagtttttgagaataaatctcgaggaaattcgaatcaacatcgagaggatatccaattcatcattaagttttgattctgttagattggtaatctttgcatgtagggcccaccatgctcctaattttaaccctctcgaaaagccaaagttagatttgctatctcagtaccaaatgctcactatgctcaaacatgacagaagtgagttagcacgtgtattagaacaaatggcaggagtgcagactgttatcaagagtaagtcattacgcgatctttatgaaatagttgacggtgagtggaacgaaagtaataaacaacgtctgttgtctttactcgacactacgattggagacattgaagagcttcatgcaattcgtaagcaacactctcatcatgaacgggttagcgccttgaactcatctatctctaaaaaacttaataatatagcgggggagtttaaacaatga

SEQ ID NO: 205467 - DNA, 786 bp, Klebsiella oxytoca
ttggatattattcatttatctgatttacactttggggatcccaacgctccatttcaggaaagcaaacttgcctattcactgtctaaatacattattgaaactacagaaaacccaatcttactaattagtggtgatgttacaataaaaggccaaaaaaatgggtatggtatagcctctattttttttgaaaaattgattgcagatggtaagttaaataggagcaatataattgcttgccctggtaatcacgatatagttgataataagtttagtgattatgatgactttatttatggtctcagacgcgatcatgaaatggacttctctgaacaatcattccgagtgattaatgtcgaggatattaccttcttacttttaaatagttcatatcatttagaccataagtatggattgattgatactgatgtttttaaggtggatatgagcgagagggaaaacacaaaaaaaatcctcgtattgcatcaccatatacttaatcagtttagagatgatacgtctgctattaggaatgcatatgatcttgtacagtttattgagaagaattcctttgatatggttttacatggacatcaacatagtgaacaactttaccatttggggaaatgcaaagttccggttatatcaaccagaagtggtaactttaatcaaagaggctatctaaatgcatttaatcactataatttttctaatgagacatttagtatagatagttttgcttttgaaaataacaatcatgaaataaatataatcaaactatcaaggtag

SEQ ID NO: 205468 - DNA, 1011 bp, Klebsiella oxytoca
atggaaagtgattctgagatgattaaatttattgaggattcttggttttctgatgaaccttataagctggatgatgctaatgatttctatagtgtttcgcttttcgctaaaaaacaccttattcaggtagaggaaataatatctctatggttgattggtagaattaatatttatgctaatcttcgttccgaatattgtaaaattaatcgttatcttcataaaaaagagaatcgctacgataaatctgatattggttatggtaaggatttttatcagcaccaaaacagcccacaatgtaacgtaagaaaatttataccctgtaagaaatcagaagtgagagagtatttgaattttgaaggagccagtgtttttaaatatagttatcatggatatgcaagtggttattggagattgcagaggacaaaaataacgcatttagtcacagggaattataatcttaaaaatgctgatgatggatgggtttcaattactggcgaagttgatgtttttggaagagataataaagatcacttgttatttaatagggatgttttcattggctttgaaagattgtatatttcattattggactgtaatttattggttaatatattaaatcttaataatgataaaaaattgaaaggttttgaacctccacttaatagggttgcgattgttttactaataaatggtcttttcaatattgatggtcaggtgacttactctaacgtgagcacacttctctcaagtaatggaattaagatagagcaaactacgataaaacaaattctcgaagaaacatcagaaaaaagagataagccttatcgatcccattctaagcattcaaaaatagcctcatgcctgatcacaatttattgccaagaaaaaaatatgacgactacaccagccaaagtagcccaaatactgaatgatcttgcaagaacatcatcgaaagaatggagtgtgacctttactgctgaaatcgttaataacattatgaaatcaaagtaa

SEQ ID NO: 205469 - DNA, 1515 bp, Klebsiella oxytoca
atgtctaaaagaaataagagtaagaaaattgaagagctcagtttggagtttcaaacgttaccgacatttgcacaacgattgataagttatatacattttaaaacaggagctgccgctgagcttatttttaccgtattacttggtgtaatggcgtatgcctgccaggataaatttgatgttcagcttaagaatgggaaaacttttacatcgctttatcttctgttgttagcaagatccggaagcagaaaatcaactgtatttaaattgttgatggaaccaatctatcgactggagaatgagttgaaagatgatttcctgctaaaggagaaactctatgaacgagagattgcatcatgggaagtggaatttaaagagtataaaaaacaatacagtaaagctattcgtcagataaatggtgaaagcgaagcacgaaaaaaacaggaggaatgctatctaagaaaaccagttataccgataagaaagtatcttactaaaaatgactccacaagtgagggacttagaaagatattagcgcagggctccccatcgttgatgctcgggtctgatgaggccggagggcccttcgacagtaatcttttccgcaatacacctgtactcaactctctttggggagaaggaagaattgcagacagtagggcttcacgtgacagttacgatgttgatgatgcacggctaacgatgctgctgatgatgcagcccggtttatttgatgactttcttgaaaaacagggagaaaaagcaaggaattcaggatttttggctcgtttatcgccggtcgacatggaacagatccctgaattgatctgtatccctgatgctggtatatggactgatgaactaggactggaagaatttttttctattgtcaccaagcatttgcacgatggaatgaggcgtagagaaaaaaatgaggagcgtatatgtattattctttcttctgaggcacaaattgtctggagtttacagagtagacaaattaaggaaaaaataaaaaaaggaggtgaactacaccattatgatgattttagtgctcgatttatggagcatgcttcacggattgcatcagtcatgcaaatgtttattacacctgactcaccagtaattacgaaggaaactttaacatcatcattcaaaataacagaattttttattaatcatcttatcgctaaggttgattctactcgaaaacctacaagggctgaaaaattgacatggtaccttgaagacaatctcgttagcaatggttcatacgacttcaaaagaaatgaccttattaaaaaaggtccatattcagtcagaaattcagaaaatctgatgcctactttagaacaacttgagtctgaaggtgtagtgcaattattcgaaagaggaggagttaattatgtgaaatttattggctcaacgatggaaccgaaagaattggctgagaagactaacatccctgttttacactcgggatcgattgcgatgagtaagctacctaacttcgagtaa

SEQ ID NO: 205470 - DNA, 699 bp, Klebsiella oxytoca
atgaaatcacggtattcacttagtagtgaagagttcgatggcttagtaaagataacatcccgaatgtataattcacctatcgaccagtatattctcacttcactacttaacatggtgtatgacatcttggaacagcattaccggatattcggtattcgtactgacctgagattcgcccagtctcatgtagcggaagagcctgaccttccattatgctttcaacgtgacgacccgcaggcaatcactcgcttttcagaatcactgaaaagtcagatacgggtggatcacaaccgatccgggagacctggaaatccgacattaccatcttatgggtggtgcagagaacggaatactggtgaacatccccattaccatctagtgctgctgtttaacgctgatgtctatgcgtatctggggaattaccaagaccggaatgctaataacatggccacccgcatacagagagcctggtgcagtgctatagaccttaactacgatgattacgcagtattagctgagttcccactcaatcccatttacaggttcagcaggatagatgctttgggtcgcactaaaatatactgggattttctgattcgcttggcatacttggcgaaaataaggactaaagatatccacgacggttaccgtaattttggtacgaaccagttattatgcttgaacaggcttacctgttaa

SEQ ID NO: 205471 - DNA, 1899 bp, Klebsiella oxytoca
atgacaacaagtaacgatttagcattgctgactatcgaaaaattattcagcgaaaacagtcattatgttattcccatttaccagcgtaactacgcatggggagcagcggagatcgagcagctcattcaggacattgccgatgctgttcaaaacctcaaagaaaccggagaacaaaacgaggcgaaatactatctgggcagcctggtagtgtatatccgggatagcgctgaaagccctcataaaggcgaaatcgtttatgaaacgattgatggacagcaaaggcacacgacgctgtcgattttgctcgcatacttaaaaaccgttattcatagtagcgaacaagatttatcgcgccttcacctcaatcttgactttgacagccgtcctaaatcagcacgaacgctgcaaaatctgtttgaacaggcgcagaggagcgatccggaagaaccctcaatacgggctgcgtttacccttatagagcgatactttaagacccataacatagacaccagcgacttctgcaagtatctgctcaaacacgtgactattttgcgggttccagtacccaaagatactgacctcaaccactactttgaaatcatgaataaccggggtgagcaactggaaaaacatgaggtactgaaagcacatttgatgtcagtttacagcggcgacatggcttcaagaaatagcttttcagccatatgggatgcctgcgcagacatggggcgctatgtacagttaggctttagcccggaagctcgcaagattttatttggcgaaaaatggtcaggtttcccaaccgattttgaggcaataaaatgcgcgacagaaacccatcatggcacagacgagaaaccgacactgcggaacattatcgggacacgacgctttcatgacacggataacgacgatgaaaaagtcaaagaacagcgctttgattctattatcgatttctccaactttctgctgcatgttctaaaagtgactgttgccgataccgtttctctggatgataaaaagctgctccaggtctttgagatcataaaaaatgacagagaaaaaatcactcagtttgcttttaacttgctgaagtttagagttttatttgaccgttatatcattaagcgcgatcaggatgaaaagtggagcctgctgacgctggaatactattccagagatagaaactcgagctttagctataacaactctttcgaccaggatgggttgtctggactaaacagacaactggcgatgatcttgtcgatgttccatgtctcacaccccgcctatgtttacaagcgatggcttaatcgctctctggtcattctgaatggtcttgcttcgaacgaactggacataaacggaacggcttatctggaggcgcttgagaagctcagcagtgagtttctagctgagatctgtggtgaaaaagggcaatttaatgctgaagctctgcatcgtggcactgctgtgcagaactatgtgtttaatctgcttgattatcgcttgtggcgtgatctcactgcgggtcagagcttcgacggtaaaggggctaatcaccccggtattaagaaacacttcgatgatttccagttttcaccgagtcgaacatcggttgaacactactttccccaaaccgatccgtctggagcaaataaaatggggaatgatgtccatcgtttcgggaatctttgcctgatttcaccaagcagcaactcaagactcagtaattattcgcctgcggataagaaaaaattctatgctgaaacagagcgagctgagagcttaaaacaagccatcatgatgagctatgaggaatggggacctgagggacaaggcatcaaaaacattgaaagccatgaaaaggcgatgttggaactactaaaaggtgactaa

SEQ ID NO: 205472 - DNA, 1341 bp, Klebsiella oxytoca
atgggacaggtaaactatcaggtaaaaaaagtcggagacctgctcaggcagcacctcactattccttcctaccagcgcccctacaaatggaagcccaaacatgttaatcaactgattgatgacgtgttaagccaccgggataaagaatgctaccggcttggaacggtggtgttgcacaaagatgaagtaaagccagctaatgcgatagcgcttaatgttgttgacggccagcagcgacttctgacactcacactactttgtacactactcgatcaacgcggtaagttttcatcccccttgctggagcaggtatttgcttcaagggtgagcatcaataaccttgagcacaatgccaaagtcattgaaagccgcctcgtggggcttaacgatgatgaacgtcaatcactgctgcattttgtgtgtaaccgatgtgaactcatcgaagtgacgctggatgacttaagcgaagcatttcagtttttcgactcgcaaaatgccagaggcaaagccctggcaccttatgatttgctaaaggcataccatttacgcgagatgatggagacaaccggacaggcggaacgactccatcacgtcagaatttgggagcaaggtgtcagtccggatgatgaatccgccagccttcatctgattatgggcgagttcttattccgccagcgccgttggctggatggtgactatggtatccagttcagtcgctacaatcttgaggtgttcaaaggcatcaacctctacacatgtgattaccactacttgcagtctctgctggccctggattttgccattgaacattacaataacgaccccgcaaggaagtgggataagcagcatcagtcttacccgtttcaaataaatcagataatcattaacggaaaacgcttttttgagtacatccagcactacaagtctttgtatcacaccctgtttgatggtgagaaagcgttgcttggcgatttcttaaaaaaacatacccgttattccggcagctcacgtaagggagatatgtatatcaaaaatctctttatgtgcgctgtgatggcctattacgataaatttggtgaccatgaattagctcaggcggcaaaaatttgtttttgttggagttactacttacgactgcaatatcaaaaaatcggcatggacagtattgatagctatgcgcgtgaggcacgaggactgttaagagtcatgggtaaagccatccacccacaacaagttctgcgcttcgagccaaagcgatgtgaaaatatccgctttctcaatgccaggtccgtacaggattccatcgctcaaatgctgggagatgtcgatgacaacaagtaa

SEQ ID NO: 205473 - DNA, 1131 bp, Klebsiella oxytoca
atggtgccaaagataaggtttaagtcattctcagcctccctaggtaagcataaaattgaggatattttagctcgctttgtttcccctgtatctgtttctaaaataggaaagtatcgagaaatagggattcgctcccatggtagaggtttattctataaagaggaggtgtctggtgctgagttagggaataaacgcgttttttggataaagaaagatgctgttatttttaacattgtttttgcctgggaacaagcggtagcaattacttcgtcgaaagatgagggatgtattgcatctcaccgattcccaatgtacttacctaaagataacaaatgtaacactgactatatcagaagatacttcctaacaaaaaaagggaaatatttattagaacttgcatcccctggtggtgcaggtcgaaacaaaacactaggccaaaaaaacttcgatgagttggttgtaactattcctgatgttacagaacaaaccaaaatcgctgattttctgtcctctgtcgacgaaaaaatcacgctactgaacaaacagtacgacctggtttgccaatacaaaaaaggcatgatgcagaagatttttagtcaagaagtgcggtttaaggatgagaatgggaaggtgtttcctgggtgggatagaaaatttataggtaatattctaaagataggtagcgggcgagattataaacatttgaatgatggtaatgtccctgtttttggtactggtggtttcatgacaatggttgatcagtttctttttgaaggagaaacggtatgcattggccgaaaagggactattgataagccattttattacaatggaaaaatttggactgtagatactttattttatactcatgaatttaaaggcgtgcatccaaaatttgtctatcagttgtttttaacaataaactggaaagaatataatgaggcatcgggagtgccaagcctttctaaaaataccatagaaaaaattgaggttaatattccttgtttatctgagcaaaacaaaatttccagttatctctctgcccttgacgataaaatcgccataaaaaaagcagaactggacaagttaaaaatctggaagcagggcctgctccagcaaatgtttgtataa

SEQ ID NO: 205474 - DNA, 459 bp, Klebsiella oxytoca
atgacgacacaaactcaacgcgaattgatatccgctaatgagtctcaatttgaccttactgtaacaccagtacctgacgagcagcgtctcgatttctggctgcagcactttggctctatcccgcagtggataacgctggaaccccgtattttcgcctggatggaccgcttctgtgatgagtacagcggtggtatctggtctttttacacgctcagcaatggcggggcgtttatggcccctgatactgacagtgacgataaatggcatctgttcaacaacgtgaacagcaatggtgcggaaataagcgcggaagctgccgggatagccgtctgtctcctcgcgtacagccaccacgcctgccgcacggagtgtgacgccatgactgagcactattaccgcctgcgggattacgccctgcagcaccctgaatcccacgccatttttcgcattattgattaa

SEQ ID NO: 205475 - DNA, 483 bp, Klebsiella oxytoca
atgatggaacagtcacttatcccactgactccggtccttccactaaccgcacaacgcacggtaaaacgcgctttagcgctgcttgaccgacacctgcgcgaaacaggcgtggcattcacctccactcaggctgcccgtgactggctgaaactgaaaatggctggactagagcgcgaagagtttatagtgctgtacctgaaccagcagaaccagttgattgcccatgaaacactattcaccggcacaattaacagtaccgagatacatcctcgcgaggtggtcaagcgggccctgtacttcaatgcggcgacggtgattatcgcccacaaccatccttccggtgaccccacacccagccaggcagataaaaccatcacgctgcgccttatgcaggcacttgccctagtggacatccacctgttggaccatctgattgtcggcgggatcgagattgtctcgtttgccgaacgcggctggctataa

SEQ ID NO: 205476 - DNA, 222 bp, Klebsiella oxytoca
atgaatatcatcagcaagcgtcaagcgatgacaatctacagtcagcatccgcagtcccgcttatttcggttttgcaaagggaaatataagtggtccggcagcatctgccactacgccgggcgcgaggtgcaggatattagcggggtactggcggtatatgccgaacgacgtcaggacttcaacggcccgtatgtggccctgcgttgtgtcacgctgaattaa

SEQ ID NO: 205477 - DNA, 351 bp, Klebsiella oxytoca
ttgtcgaataaaacaccgacagcaagcaatcacacgaaagcgccttggtggggactgaaacgcgatatcatcccgtgctttggcgcacggctggtccaggaaggcaactgcctgcattacctggctgaccgtaccagcatcgccgggacattcaatgatgcagagttatgccatctggaccaggactttccggtactgatgaaacagatggaactaatgctcaccagcggcgaatttaatccccgccaccagcacagcgtcacgctgtatgtgaaggggctgacatgcgaagcggatactcttggttcgcatggctacgtctacatcgtcatttaccccgcaaaacgttaa

SEQ ID NO: 205478 - DNA, 138 bp, Klebsiella oxytoca
atgaccactcaagccttgcctgtcgatacgtaccagttcgtacttatctaccaagaagttaaccgcgtcggtgagagtgataccggcatcaatatgtttctgaataacccgttcttcactaaaaggcgtgtcgtttaa

SEQ ID NO: 205479 - DNA, 834 bp, Klebsiella oxytoca
atgcaaacacagggtgaagtattaactgaacatcgcgagctaatttgctcgaccaatattgaacgtgtagtcactggtcgcaatacagccctaaaacagatcgaacaactcatcgataaaattgatgccatttcacggctaacctcagaaatcggtggcggaactgctcaaaattgggcgatgaaatccgggcgccgctatgatagctggttaacagagacggtggataaagctatgcctgccattacccgtaatattgaccgtagtatctggcgagacttgatgttgaagtctggaatgatggccttgatggatgcccaagcccgcgaccagtggcataaggaccttgaggagggcgaccttccgacaatcagcgaagtgaatatcctcaccacatttgaacaattacatctcaacaaaatggatgtcttcgaacgtgggatcatcaatgtctttaaagggctgtcgtgggattacaaaaccaatagtccctgcagctttggtaaaaagatcatcgtcaacaatctggtgacgcataaccgctggggatttagtctgaactggggctggagacgagatcagctggcagacctggaaagaatgctgtttctgcttgatggtaaagcgatacctgacaatcgtggcgatgttactgcacggttgatggagcatattcgggacaacccctcgcaggatgtctacgaagatgatttcttcagtattcgttacttccagaagggaactgcacacatcacttttaagcggtacgatctcacagaaaggatgaatgatatcgtggcgaagcattatcctgggatgctggcagccagatga

SEQ ID NO: 205480 - DNA, 390 bp, Klebsiella oxytoca
atgattatctggcataacggtcaggtccaccagcggaaaatctccgccgtacagcgcgccggcaagctcaggaaggtcaaaaagctggagccagttgagcgtatgtggccaggggctgacggtgccgtgataaaacagaatcgggaccaccagcggcagcgtattgtggccggcatccaggtggcgctgcatggcggccagcgtatagcgcatcaggcgaaaagccatcagcttatccggcgagctttgatgttcaatcagcgcgtagatatatcccgcgccgtgctgcgtttgcagggagtagagaatgtcggagtagctggatcgcaggtcttcttcgataaagctgccagaagccagctgcagcgtattgagatcgcagatacttaa

SEQ ID NO: 205481 - DNA, 765 bp, Klebsiella oxytoca
gtgaccgatatccatacgcttgaaaggttgctcagaaggttacgtctgacgcgcatagccaccgagtggcacagccaggagaaacgcgcgctggccgaagggtggaccccttcgcgttatctgctgtcactctgcagtgaagaggcgacgcacagggaaagcgaacggctgcggcggtatataaaggatgcgcggttgccagtggggaaaacgctggccgaatatgacttcggccaggtcccggggctgaatgccgcacaggtgcgtcagctgtgtgaaacgacggactgggtggacagcggggagaatgtcctgctgttcggtgccagcggtctgggcaagagccaccttgccgcagcgatcgcggacggcgtagtgagccagggctatcgggtccggttctacagcgccggcgagttgctgcaggagctgcgtaaagcccggtcgttgctgaggctgaacgagatgcttctgaagctggatcgctaccgggtgatagtgatagacgacctgggctatgtcaaacgggataacgcggaaacgggcgtgctgttcgaacttatcgcgcaccggtacgaaagaggaagtctgatcatcacaagtaaccatccgttcagcacatggggcagtatcttcgtggacgaaacaatggcggtggcagcggcggacaggctgatccaccacgggtacatcttcgaagttacaggagaaagttacagaaagaaaacatcaaaagcagtcacccagcagtcagctaagaaataa

SEQ ID NO: 205482 - DNA, 1146 bp, Klebsiella oxytoca
atgttccgccaggagcatcaaccgggaatgcgggcgctgtcagattttacccagctgaaaggcacggttatcaccattaacggctgcccgctggaacacaagctcttccacttccgccttgaatggagtcgctggagctggatgcgggttgtcaccggcggcgagagcttcaccgctctggccgaaggactacaggaggcgctgggtcagctgggtggtgtaccagcggagcaccgtacagatagtctggccgcagcatggaaaaacctgagcgaggaagatcaccgggatcagacagcgcgctatgccgggttgtgtgaacactacggcatgaccccttcccgcaataacagcggacggggccatgagaatggttcagtggagtcggctcacggacacctcaaggagcgtatacggcaggccctgctgctgcgcggaaataacgacttcggttccctgaatgaatatcgtcagttcgttacacagcaggtgctgcgtcataaccagcgcaatcaggatctcgtccgtcaggaactggcacttctgaagccccttcctcagcgacggtgtgctgactacgaagagttgtctgtccgggtcagcagcagtagtaccatcaacgtccggcacgttgtgtacagcgtgccatccagacttatcggacagatgctgaaggttcgtctgtgggatgacagactgagttgttacgttggaagcgatgaagtaatgagctgtcagcgggtccgggcaccgaaaggtaaacggcgggcccgcagtatcaacttccgacacgtgatcggtagtcttgtcatgaaacccggggcgttctaccacgccacactgcgtaacgacatcctgccggatgatgaatggcggcagctgtggcagcggatgtgttcacgtcttgcccctcagctggccagtcgcctgatggttaatgccctgaagctggcggcagagcgggaagacatctcagcggtcgcgaaggggctgaaccacctgctgctggagccgggagagccggatctgcagaagctgctcaactggctgggcgtgaaggataaacgcccgctgccggacgggaaactggttcagcacagcctgcagggttatgacaacctgatgcgtaaaggaggcctgcagtga

SEQ ID NO: 205483 - DNA, 159 bp, Klebsiella oxytoca
atgccggtggtggccgcagcggctacgttgagccatgtaaaaactgacctgtctggtattcagcgtcacaacctctccctggaaagaagaaacaggacgctcagattacaaacaggccagagtaattgtcgcgatgcggacggggtaattgtcgcctaa

SEQ ID NO: 205484 - DNA, 177 bp, Klebsiella oxytoca
atgaagtatttcagtagtgaccaggttttttacgaactggtgagtggtaaagccacacgagatttaatctacgcatctatgtacgtagccagaaaacgaaagtatttcgaacgtgaacagatgtttaaagaagcactatcccgttttgatgaatttaagaaggattccaaagaatga

SEQ ID NO: 205485 - DNA, 159 bp, Klebsiella oxytoca
atgaagattaacttcacccctgaaacttacgaggctctgatcaatcgggctaatcgtgaaaataaagccgccgccgcactggtgagcgaattaataacaacagtccttaacaaagaggaaaccaatgaaccaaagaagaaaagtagtaaaattcgttga

SEQ ID NO: 205486 - DNA, 1449 bp, Klebsiella oxytoca
atgaaccaaagaagaaaagtagtaaaattcgttgatgcaatttgcggatctggaaaatccaccacattacagtactacatcaaatcaagtttattaacaaattccgaagcaattccccctcgttatcttctcgtgatgccaacacatgatttatgtaagcaagtgaaggaagaacttgaaggccgaagagtgaaaagttttcatgtggacactgaaacagaagcggtaagacacctaatttccaccttggaatacgatttccagcattcggttattatctgtacacatcaatgtttcattcattactgctatcgtgcagcgcttgaaacagaacttcaaaaccttctccgtaatttcagtatctttgttgatgaaatccctgatgcaatgtttggcgcttacatcaaagtgcagcataccaaacggacggaacaaaatttcccattcctggattggctggaagagcgggacggattgttattcctgagtgaggataagcgtgaagatttctacgactattggcacgaaacagaggcgaatggtgctgagttaaagcgcctgctctgggcgattatgcagggtgctggacttctctacgaagaaaataaacacctgtttgccttcactgcttcaccaattatcagatctgtagaatgggctgaacaatttacactcttaggtgctggctcttctcgaagtttgtttacctgggctgctgaacatctggcgcaatacgaagtagaggaagctggtgaacatttacagccgccacttgaaagacgtaagcacaagcgtgtgccgatttctctggtcgccgtatgtgaaaacagatgtaccctgacagctttacagaaagtatttcatgaacatctacaggaaattatccagcgtgtgccaggtgaatttatctttgccactaacagagataaatccatctgcgaatttaagacgattggagacgagattctaacctgtgctgaacggggcaagcgtgtttcaatggcttcctacggactaaaccattaccagcacatgcacaatgctgtgtttctgggatgcagtaatcttgatcgtgatttccagggtaaatggcggcagtattcagagcttaacggatgggatgttgaagaatttgaacagaagcaacgcgccgcgatgaactatgaacggtgctaccagtttattagccgtacatctgtacgtaatgctgatactgatcatcctctggtgtttgtagtgccggatctggctactgctgaatacatcaaagagcattatttcccaggcgcaaagattgaatgcttcaactttgggaaagtaagaaaaaaggttaaaggcgacaatacacgcgcagaagtgcaggaacataaatccaaaggattgacccaaaaacaaacggcggcactcatgaagaaagggatcgccaccatcaaacgaaactggaactaa

SEQ ID NO: 205487 - DNA, 390 bp, Klebsiella oxytoca
atgggaagaaaagaacgcagtaacattgtcagaattgaaaaagcagtgagagcaacaaaacgtaaatacagccataagctaaaagattattcaagagaatctattccaggctcactaaaaacaactattttagaacaccctccctctgtaccttgcggtgatgaatacaacgccttgcaagaaataattagcactacgcctggcgtattctggaaacctcgaaaaagaaaagaatacataattgatagtagccagcttaaaccctggcaaattatcggatttgaacattactccgattatgtcgggtattcacaaactaacggcctgagtggtcacactgccgatttagattttttatttaatgacgatagggaaaattataatgactaa

SEQ ID NO: 205488 - DNA, 672 bp, Klebsiella oxytoca
atggatactacattcattgctgaacctatagtaagcattgacgaaaagttgttgggcgttgagcttctcactcgcttcatttccccagatggacgcccccttcatcctgagttcgtaatttcatcttgggatttagataggaaacggcttttcctatacgaacaatgcggaaacattgccagtatgcaaaagtggttcgaacgaaagaatctattttgtacactgaacattgatcagcaaatggcttttctgatacgtaatgactacatacttagacaaactttcgaatcgatgccattcatcaaacttgagctttctgagaatttcccaggtttagataaaggattaaaaagccccttgttaaagtcgctgagccagggtgtgaatgggctgtggctcgatgaccttggggcaggtaattcgaatgtagttagtttgatggaaggatactttgaggttgtaaaagtagatcgctgcttctttaatcagcaggtgcagaaaccaaccttctacccgctgattgcttccattcaaaaacactgcggcaaagttattatcgaagggattgagaatcgagaacatttgggaatactgcgtgaggtggggatttggggattacaggggtatcttattaaatctgtcccttttaaaaatgtggattcattgctgtag

SEQ ID NO: 205489 - DNA, 819 bp, Klebsiella oxytoca
atgctgagaacctttgaaaaggatgtgttcccttatatcggtcaccggccaatcaaagatatcaagccgatggagttgcttgcagttctttcaaagatagaagcacgaggggcaacagagaaagtccgtaaggttcgtcagcgttgtggagaggtctggaagtatgccgtggtgactgggagggctgagtacaatccagctcctgatctagccagcgccgtgactcctcatgagaaagagcattatgcatttttaacccaggatgaattgcctgagtttcttcaaactctgaacacctatgccggtagtgtgcttgttaagattgcgatgcaattgcttattttaacgggagtaaggcctggagagttgaggcaagcggagtggcaggagtttgattttgagaaaaaggtttggaatgtaccagcggaacgcatgaaaatgcgccgccctcatctggttccgttatcaagccaggcaattgacctgcttaaccagcttaaacccatgacaggtacaggagcgttgctgttcccaggacgtaataatcctaagaaaccgatgagtgatatggcattgactgtgttggtcaggcgtatcggctatgccgggcgcgttacagggcatggattccgccacacgatgagtaccattttgcatgagcagggtttcaattcggcctggattgagttacagctggctcacgtcgataagaactcaattcgtgggacgtataaccatgcgcagtatctggacgggaggagggagatgatgcagtggtatggcgagttgttatcttttatgtgtgatgtaagtacataa

SEQ ID NO: 205490 - DNA, 504 bp, Klebsiella oxytoca
atgaaaaatttaagccagctgcaccccggctcgcgctgcgctcagccgggctacgggtttaccgtcgcctgcggacaagtagtccggataagacgtttacgtcgccatccgggaataatgaaaagcttaagccagctgcccccccggctcgcgctgcgctcagccgggctacgggtttaccgtcgtttgtggacaagtagcccggataagacgtgtacattgccatccgggagtcatgaaaaacttaagccagctgcaccccggctcgcgctgcgcttagccgggctacgggtttaccgtcgtctgcggacaagtagcccggataagacgtttacgtcgcaatccgggaataatgaaaagcttaagccagctgcttcgtctctgcatctttgctgctgttcagcgccagcgagaccgccagcgtctgggccaggcacagcgaggccacctgcgagcggaaaccatcaacctgcgcctcgcgcaccacaaagcagacatcgctga

SEQ ID NO: 205491 - DNA, 231 bp, Klebsiella oxytoca
gtgcgagatttcaacgaatccgccacactgttccgtcgtaagtattacatcaacggcagtcacgccgggttcatcatgtgcgtgaccgacgcgacacagaaccaggaagacgtggacaatatccgacatgcgatgaaaagcgccaaagtaccggggaactttcgcaatctgtttatgtactccgccagcgggaaaaggacggtatccaactcattctgctgtcagagatag

SEQ ID NO: 205492 - DNA, 1782 bp, Klebsiella oxytoca
atggctgaactactaccacaaacgacttctatacaaacaatttattcatggtttactgaaggtaagatcttcgttaatagacgttatcaaagaaaattggtttggacagcaattgagaaacaaaagttagttgagtctatacaaaaaaaatatccaataccggcagttcttcttgcggaaagagaaaatgatccaggtacatatgaaattatagatggactgcaaagattacatgcaatcatgtctttcattgagacgggatatgaatctcttgatggaaagcgttttaatttagatgctttccctacagcgaaaaatagagcagatgaaggtaagtttacagcggtaaaatctgacaatattttaagtcaacgcgaggtcactcagttattagattatgctcttgctatgtccattatgcgaaatgccacagagaatgaaataaacgatgtttttgatagaattaatacgtatggacatcggctaagtgatcaagagagacgacaggctggtattcaaaacaaattttcaaacatggtaagagatatagcttgttcaattaggggagatgtttctgacgacatacttcttttagaacaaatgccatctattagtatcgatctgccattaactaaacatggttatcaaatacaatcagaagaggttttctgggtagagcatggaattttacgctcaacagatcttcgtgacagtatggatgaacagtgtattgcagatatagctgcttgtatagttggtgggaaattaatagatcgttccaaagatgcgcttgatcagatttataataatgaagatgaagaatatggtcgtattggctcagctataaatgtttatggtgaagataaatttactgaggaatttaagttttgcatccaagaaataataaaagtatgcaacagtgatggaaatgtgaaacttagggacctgatttttacaaaacgaactacgaatgcattcccagctatatttgctgttttgtttattgcttttcacgaattattgattaaagaaaataagaaaattaataactacaaaggtgtcaaagataaccttaataatatagtcacacgattggatactaagagatcggcgaccagtggtgaggaaagaaggaaaaacatcaattctatcattggtttgattaaagataattttattgataacgcagataacagtcatgtttataattctcataatgcaattgatattgagaatattatgcgtagatcagaaatagaacttgcaaactatgagcttaaacaaggtttgctgaagttggatggtgatagaagtattgatgatggtattcatgataagatattttctacaatatgcgctattgctaatattgggaagggctctaagaatggagtcgttggtaaactattgatcggtgtcacagataaacctagtgatacaacaagaataaaagagctagacaatatagatgctcatattgtaggtgagagaagcgtagtgggagttaaacgagaagctgttaaacttggcatatcaatggaagagtattacaggcgtttttgtgacgaattaaaaaaatcagctttgagcgaaccactgaaatcgcaggttgcgagtttaattgattataacgatttttatggttatggaatcattgttattacagttccacttttagcatcttattctagttataataaagacatatattatcgctctggtgataatacagctaaggcaacggttatcgaagcagcagatattgcaacacgctttaaataa

SEQ ID NO: 205493 - DNA, 159 bp, Klebsiella oxytoca
atggtgcaggatttgcatgatctaaaaaggatcgtaatggtccaaaatcgcctgggttgtcgggctttctggtttatcatacatctgcatgaaaatcactccactaagcgagcaggcgtgacggggatgcgagagctcgctatacgaattcctgaataa

SEQ ID NO: 205494 - DNA, 1761 bp, Klebsiella oxytoca
atggcacaaataccactaccaaccccgaccgacaatgacgtgcctagcacagatatccgggacgcagtttatgccggcgccatgctggataaggttgtcaccagtactgatctgaaatacaccgatcgcctgggcggtgagcactacaccgtagacggaattaaggcggaaggggacaaagtagttgaagaaacgcggcagaatctaatcccgctcagtcgccagtatatgacgttagctgatgctcaggctgatatcgagaacatacctgaaggttctacgacatacgtgcgtagtccggatggaagcgcgctggctgacgagtacgccaacaacggcggtacgctggaggcaaccggtcggcatatgccgtctacagtaacgatagatgacaagataagtcagaaattaccatcaggagactttaagcctaattttttccctttggcgcatgatcaaatgaaaaatgttcctgcctggtttgataattcgcgatttgatgcggctgaccttggccctgtgttgcgcgcagttgtgcagagcatcccaaatgcatgggcgcaatattatttgcgtcaactagatttcagcccatcatttttcccggcgtggtttgatcagaatgaaaatgttgcagcatggtttgataagtcccggtttgatgtggcagggatcggccctaaccttcaggccttgattaccgagctggttggcactaacaaaacggaatctttcattgaaggggatcagtataagttcaattttaagcgcggccgcattgccaatggtgtttcagcaagccttaacatcgcatttacaggggattcatggactgagaagaacaccattcctcagtcagtgataaatattcttggcggggcatacaaagaccctggctggatcagttgttcaaacaggactgacggtgtgatggccggcattactttggtggtaagtaactttaccaaatatgatggagacaatgaaaacaacaacgcaccacctcagtacggttccggaccagacgggaacgcatactggaataacaatacggtagggactctgacctggtcgaatgttactgccacggacctgtcattattttattatgatggctcaggcaattttactatcaccattgatggtggggcgccagtcagcattgcaggaacaaatagcggggtggcgaaaaaatatgacatcaccggtctttctgctacttcacatacagtggttataaccagttcaggctctggagttgtttctatactggggatgtatggtaaaaatagcgcgaaatcatccggtataacagtatcccgcatggggaatggtggagctatggctagtgattatcttcactggcaggactggattactcccattgtttctggacttgatattgacctgttgtttatcatccttggtactaatgattttcggaaaagcgccgggattccagagtatacaaatgggatacaggttattatcgacaaatataagtctgccactccaggtatttgtatttgcctggtttcacctgcacagtgtaatgcaacgggagcgccggcgctgtcagagtacgacgaggccatgcggaaactggccggggataataacattaatatggttagcctctatcacttatttccaaaaatctatgataactctggcggagcatgggcggacgctcttcatctgagtaatcttggcgcatatatttttgccagaaaatttaaaaatgaattctatcaggagtaa

SEQ ID NO: 205495 - DNA, 213 bp, Klebsiella oxytoca
atgttagagaactacttaaagtcaggttctattaaaactgacgatgaaacaaagcgcttaattgctgtacaggctgcccttgaaattgctaaggcatcggttggaagttcagatgcagctacaacctgcaaaacagatgttgagcttaaatatgtatctgagcacctggcggaacttgccgacgccattcaagatgccttgaaggttaaataa

SEQ ID NO: 205496 - DNA, 660 bp, Klebsiella oxytoca
atgctgcagccagttatcctcccactagtggatttgcctcctgatagcccccatatacccggcattcttaacgaactgtcatgtaagtcagttgtatcaatccctcggacaccacagggtccagcaggcatttgttattggaacgttgagtcgatggtaaaatcccatggcggaaaacttatcattggctggcttatacagtgggttccaggactatacgtccaggctatgcatcatggagtttgggaaagcccagatggtaagatgtgggatttaactgctgatcagacagaagccgctgttggagacatcaaaaatggaacatctacattcgttcctgataattctatctccattgacctccaatggcctgtgatgattgtcaacaaacaccacgttattactaatgaccctgacgtcatagagtcactttacttttacaggctcaactgtcaggcctcggcatccctttttcaatatttaaaaatcaagggtggttataagtggcaaccaatctctggaatgtcaggcccggagccaaacgaagaaatcaatatttttttaatgaataataattctttaaaggatttatctttcgagcttatgcataaacatagagataatatcagaaaaaaatatttcgctaatgaaccaagttag

SEQ ID NO: 205497 - DNA, 282 bp, Klebsiella oxytoca
atgaaagaagacatagccaatcagctctttgagagagtcagccatctggaggatgccattcgtcatcttactgtcagaacagacctgatgaatcaactgattgctctaacagcagtatgctcaaatgttccatcagcggtttatcccgaacaccttcgcttgcagcgacctactgaagagattattggcctacgagaggttcttgagaaggaggttgctcacatcgagtctgagttaaacaaagttttctcaaaagtggagagaacccctcaaaatcaataa

SEQ ID NO: 205498 - DNA, 1656 bp, Klebsiella oxytoca
atgaaaccagttatcacacttacgatcggcgttgatgtggtgccggtcgctgattaccggatcgtgttggagttaagcgcatgtgggcgcggatttattaccgcagcgatcgatcgtgactgtaccggcgatttggttttactggatctaggggttaatactacggtttatcgctggtttactggctatgttgagcgttgcgggccagcggaaaacggatttaagcggctatttatccgggaggcgattggcgttatgggtctgaaaactcccgtttcactgcaacatccgacaatgcgcgacgtttgcgccgccgtaactgaccagaccggggtggtttttgcgctgccggatgagccgtatgtcgatgaaaagatcccgcattttaagagcctgggcgcggggtatttgttattggatagcctgggtggtgcattcggtattagtgattattgttggtatcagttaccagatggcacggtatacgccgggagctatgcgcattcgcgctttgcctcacttcctctcgatcttcccgccagctttgccagtagcggcgttgccggtaatacgctgagaatggcgctcattccttcgattcgtccaggcgttgtgcttaatggtcacaggatcacccagattgaggtcgacggcccggaaatgatcatccgctgggcatccgggcggggagtgattggggatccaccggaaaagcgccagattgacaggttttatcctgagctggcagcgggactgcatttgccgaagctggggcgtgtgaccggcccgaccgacaccgcagcgcttggcgatcagtctgataaattccgtccacgctatgccgtcaacgtgcagctactgaatgagagcggcggcgatgatgattcgccggaacttgtcgccgtgccgcttccggtcactatggctggcccggagggcgggttttatcaattcccgcctgaaggcgcgatcgtagagttgggatttatcaacggcaggccggatgcgccgattgtgcgcaatactttacaggatgatcagccgttgccgagtatctcccctggcgagcagttacagcagcagcgagccggagtgagtcagcgtgtaacaaagtcaggcagctggcagcgcgaaaccgatcaggcgatcgaggaaaacagccgacaacggattatcaccggcgacaccgagacaagagagttaagcatgcggcaggcgcttatcaaaggcagcgatcagcttactgtgatcggtacgcggcgcttgcttgcgggcggagttgttcagattattgatggtgattggtctgttgtcgcttctgggaagatggccacgcgatgcgaaagccgggaggatgtgacagccggcgcggtgacggcggagattggcggcacactgtcagaacgaatcactgggatccgtaaaagcgttgcggcggcacaccatatccttgcaccctcgatcgtgatcggttcagaggcggtaaacctcatgcgcctgtttaccgataccctggacgtactcgaagagctggcgaggcagacggcggagcatactcataacaacacgggaaccccgacaaacagcggagagataagcgtgacggcggcgaagcccgcagcactccgcgcgaagtacgacaacctgatcggctaa

SEQ ID NO: 205499 - DNA, 555 bp, Klebsiella oxytoca
atgagtgacggggtagagtttgccctgagcgggcgggcggttttactgaaaaatcttgatgtgtcggtgtcgatgcaacttaaagacaaagatcagagcgggcaggcgtcgagcactgccagcagccagcagggaacaaaagctaaagagttgagggtaagcggcacgatcccgtatagcgagtccgcgacgttggcgcttttgtacgagctggcagaagccgaaggagaggacggcgatcgccagcggtaccgggtaaaccatgagaccgctacgctgataaaatttcgggttgcgcagttttccggcagcgtttcagccagtaaagacgggcgcttgcaggcgtggcgagtatcgttcacgttgcgtgaatattacagcgtggcagagaaaagagctgaggccagcgcggcgggcggtggcgcagtcacggtgcaaacggcgcaaggaactgccagcgccgaagatgcggaagcatcattaacctggtttgaaaaacagctcaagaaagttaacgatgcgatcggcccgccgatcgggggcggtgaagtatga

SEQ ID NO: 205500 - DNA, 693 bp, Klebsiella oxytoca
atgtgggtgcggaaacagcttcaaccatccgcgacggcggacggcgttttgtgctcggtgctggcggtaaatccctggacgccgggagccggacaccgggaaaaatcgggcatttatcttagcccggagaacgcgatcgagtgggcggcaaaaaggctggttggggcgtcatcttcgctggatattgtcgctgtgttactgaccgcgccaacgcttgagacttttacgcgtgaattatctgtttttcatgaggtttttccattgccggaagtcggcgcgatctggcgaagggctacaaccgccgtttctctggagatctcaaagatgcagatcccggcccgcgccagtggttttccctcacctatgccgctttccgtagcttccctgcgtggcgcaagcgcggcggcggcgttgttaaattcggtgcaggatggaggcggcgggagccttgcggatgcgctggacacattcagtgcgcaacgcgccgccgtgattgctgctgcgcaagaatcattgacggacatcaccggtcgggctgtcggggtttataccgtatcgacggtcgggaacacagcaggagccgtgcgcgaaatgcgcgacgggatcccgaatcccgatcatgttttttcgctttgcctggttctggcgggtgatgatctgacagagattcggaggatgttacgtgatgagtga

SEQ ID NO: 205501 - DNA, 1479 bp, Klebsiella oxytoca
atgccgagtgtaataacaaatgcgtttcagtcatggaatgtaaataaaatattggcggatgaaccagcagtaccggatcagatgatttttgccctggtgccggggctggatgccggggctgacgtggatccgaatgaaggtttgccgccagcggctcaaatttcctatgtttccgctattactcacaaagccgcgctcaatacaaatgcggttgtgtattccgccgttttggacacgacgatcggagactggcgatacaactggatcggcctggtggatagtgcaaccagtacagttttgatgattgttcacattcctgagcagctgaagatcaaaacgcagggcgggcagcagggaaacaatcttgtacgcaatctggctatggagtttgccggggcggcggaggcgacgcaaatcacggtgacgccggagacgtggcagattgactacagcgccaggttgcgcagcatggacgaatcacgccgggtggctagggtggattactacggatccgcagcgtttgacggtggaggatttgcggtatcggttaacggcggtacggcaacaatcgcccccggcctcggctatgttgctggtttgcgggtttatctggaagaggcggcaacggtggcggcagcaaacaccgctatctggatcgatgctgtttggtcgggaaccgtcacgggtgcctggaaatatggttttactattcgcacgggggccgcgcttactgattacgtggacgctgccggataccctcattttgtggcaaaaatcgcgacaatagcgggcggggttgtaactgacgagcggtcgccgttcccgttgcaacgtattgagcaggagatcagcgatctcgatgtttacgataaaaccgaggccgatcagcggtttttgcggatagagaataacctctctgacctggacgacccaggaagggcccgtgaatcgctagatgtgcacagtagaaccgaggccgacgagcggtttttgcaggcggagaataatctctctgacctgagcgacgtaaacgaagcacgtgaaaatcttggctttaatatgccggacgggcctgtttttcgtgccatcatcgatgctgttttttgggttgggcgttctgttatttcagatagcaatccgcaagagcaatacacctggcaaaagtggcgggatctaagtgctgattatggcgatcgcgttttgcgtatcagcgatgaggccatgaaaacaggcggcagtaattcggtaaaaattgaaggtaataacctccctccacactggcaccgctccggcgacaggtcgccgggtacagtgtgggatcctgacactacgcacggcaccgataaccagaaaagcgggccactggccctcaccgagggaacctttatcgattcgacaggtaagacggaatccgcgaacgaacccatagacgtgacaaacgaatacgtcaccgtgagggtatggcggaggacggcataa

SEQ ID NO: 205502 - DNA, 1602 bp, Klebsiella oxytoca
atgaacaaaggagagccattaaccctggctcacgcgacgcatacatggtggcagcgggtttacgagtggatatcctttccgctggcgcagatcgacgccgacacatgcgatgaggaaatgttatcgctactcgcatatcaacgcgacattgaacgatttgagggcgagtcgttgagcctattccgcttgcgcgtgaaacatgcgtttccaaacgcacaggatgccgggagcgtggcagggtttgagcgtatctttgcccgtctggggatcggcgagctgcaacagcttgaacgccagatcaactacgattgggacgtgatattgctgcgtatcaatgatgagcaattgagccgcgataatgcattaatgatgcgtattgttcgccaatacgggcgcacatgtcgccggtatttttttgatgcactaaacgaaaagaaaacgcatacattctcggcggagtttgagtgtgattttagtttcttttccgctgatctcagaatcaggccggtagcgattatcccggagaggtacgagatctgggttgcaccaacgcagcgaatcacaatcggcgtttccgtcttacctgcggaagctgaagatcgcagctttacggcggaaccggcagacaaaacattgtgcagcgtggaggcggggagtgattcgatcacggtgctcggcctggattggggagagactgagatcaccctgacggcgaacgatggcggcgtgtcggcggttatagctgtacatgtggtgtcagcaataaagatcactttcgagtgcaataacccattgtcgccggtatttttcacgcctggcacagatgatttattgcttgcttatggcgatgaaaacccggcgcaagagtttgagcctcatccgacaataaaaaacgcctatattctgtcaagggatatcgagatcgggaggcgttatgacattacattttataatagcgatgaagtgacattctccgacgctacaacgggatacgccgttaatacagcaacaaaattacattatcttgtcggtttacgtaccgatattgaccatattttttattaccataacggactcgaagaggttgcggaaaacgcggtttatttgccaaaagttcaatctatggttaatgcgtttcacacaacaggtattgattatcctcctgatgattttctttctggcgatatgcctgatttggtggatatcgaagggcttttcagggcttcggcgctgcgtatagcgcctgaaggatttttgaaaaggtcgccaaacgttaatactatttatcgcgcctttgcttatgtgcatttcgagaagactccggcaggaatatttgattcctgcgctaaaaaattaaaccgggccgactggttattttatcgggcaacattcccggactctgatattaacgatattttttcggcgagtgcttatccgaatattggcaacgttgaatatctggtttaccaggtcacgacattacgcggcgaaggcttgaaaatagtagataaaatgcagacggcaacaatcacgcgcatggctcttggtggcgcaactggcttatcagattacgcggatattccagccgggtggagaacataa

SEQ ID NO: 205503 - DNA, 1179 bp, Klebsiella oxytoca
atgagcacgaagccggatccagactatgaaaaaatccttgcatcaaagggattgcccgtcacggaagagcagataaaggcggagtttacgcagatcgtcaaggatgaggggctgattaccaatacctcgaaaatgtcgccattctggcggctaatactggctattgtgaccgcgccggtgctgtggctaaaagatgcgctggtgaatgtcgtcatgcgcaatggctttctcgcaaccgctgaaggcgtatttctggacttattcgcctgggcggtaaatctggagcgaaaaggatccacggcgctggcgggtgaaatccgttttttcaagtcggaccccgcgcgggaagtgacggtcgcgcagggggttattattcagaccgagcgcattgatggggtgatctatcaggtgcaagtgtcgttcgatacggtgattgaaggggggcgggaaagccagctgatccccgttgtcgcacttggtgacggcagcgcgtacaaccttgcgccgggttattttcggatcctgccggtcgctatagatggtatcgccagcgcacaaagcgaggaagactggatcacaagccctggtgcggatgttgagcacgacgatgatttgcgcgaccgggtaaaaaatcagtacaacctggtgacgcagtatcatatcgacgcggtttatcgtgggcttatcagcagcattgccgggctgacgactgatcggatttattttgagcacgacgcgccgcgcgggccaggtaccgccaatgtatatcttttacttgatgccggggtgtcatccgcgccatttatcgatctggtaaataataccgtaatggggcaggggaaccacggtcacggtgatgatgtgctgtgtattgctatgccggagacgcaatatgatctaaatgttgtgttgtatctctattcgtccgccgtcctgactgacgaagagcgggagcttttaaaggccagcgcctccaatctgatccgctgcgcattccgtcaaaatagcggatatgacgttgaaaaaacctggccttatgcccggttctccatgtcccgcctgggggaagagttacacaatactttcccggagattgaatccgtggtgttttcccgaggggatatcctgagcgatctggacgtgccgcggcttcgcgcgctgggggtgacatttggataa

SEQ ID NO: 205504 - DNA, 336 bp, Klebsiella oxytoca
atgaatgacgaaaaagagctttatttcgatctgctgattactgacaagaatttcacgctaaaccctggcaatgagccgattttatgcaaaaaccgggacagcatcggacaagacattattcacatgattattgaatccgcgctgacgaagcagctgatcgccgagcgtagccgcgtgttgcgcggtgatgttttgttgcagcttgaactgttggttgaaacggatgtacggattgttgcgggtaccgtgaggatcacggaaggcggatcggggcgatatctcatcgcggcggaaacgcgggattttggcccaatatcaggggagtttaacgcatga

SEQ ID NO: 205505 - DNA, 2067 bp, Klebsiella oxytoca
atgaaagaactggaattcgtcctcaaattaaaaaataaactctccgccccgctgggaaaggcggggcaagttgtcgaccgttttgccaataactccgttaaggcattaaagcgggttggcgtaggactggcggggctgtgggcgacggcaaaaaccctgggcggggcgcttaagcctgccatggggatccgctcggcgctcgatgagctttccacgcgtggtgttagcgatcaggcgctggataaaatcagcaaacaagcggcgcggtttagtaccgaatttggcatcgcgcaggaggatttcattaactccgtgacggctattcgatcatcgctgaatgggctttctgatgctgaattgccaggcgtggcgcgtgccgtcaacgtcctggcggtggcgatgaaaacaacgggcgatcaggcggcgggctacattgccgaccttgcagcgaattttactgaggacgtggagcgcatggggcgtgtgcgttttgctgaatccttcgcctctaaaactgcctggcttgttcgcaataccgggcaggatatggcaaagatccaggcgctgattaatggtgctaaagggatgggatccggctatggcgttggcgctgatgagcagttagcggttctgggcgagttgtccgccccgctcgggtcgggggctggcgcggtctatgaggcattcctgaaaaatgcccgtgaaggtggcaagcagcttggggtgacgctgacggatgcggcgggccagctgctttctttcccggatatcctggaaaaattacaggctaaatacggatcatccgttaccggcaatattaagttgcaggaaaagctaaataaatcctttggaaaaggcgctgcggctttaatcaaagcctggggatctgccgacaaactccgcaaaaacatcaaagagcttcaggggcagcaaggattatccggcgcggcggatatggcggcaaaaatcagcgatatcggcgagcgcctcagtaataccggtaccaggattaaggcggcatttggcgcggcgttgctgccagtgtttgagccgctgtttaactggattattaagatcgggtcgggttttgcccgctggctggaaatgttccccaacataacccgctggcttggatatatcggcatttttcttgccgcgctggcggggctggcttcccttgttgcgctggcggcgggggtgaagctggtcgggggcttattggggctgggtaaggttctgtcgatcctgaagtttggccttgccggagtgaccggcgcactgtcgctgtttaatctcagcctgttaccgacgcggatcggattgcttgcgcttgccgttcaggctaaggccgtggcgctgtgggcgggtatctgcaaggcggcgattgtggcgtggaatgtggtgttaggtatgggagcgatcgcaatgaaggtctacgctgccgccactgcgctggctggtgcggcactgcaatttttaatgagtcccatcacgttgattgttctggcggtcgccgcgctggcggcggggatctggtatgtcgtcacgcgctgggattccctgtacgcggctatttcggaaaccagcgaatttaaggcgctcgccgccctctttggatggctgggtgatgttgtgagcggggtgtggtccgggatctgtgcaggctggaatgcggtgattaattatttttcgggccgctcaccgctggaagttttccgggatatcacagacaggatcgccggtattttctcggggctgtgggagaacattacgcgctcattcggtaagacctacaactggatcgtatcgaagttaaacaagctacccggcgtcaatatcgaaatgaaggatcttgcctccccgcaacctgacgtaaaagagccgcaaaaaatgagcgccccagctggcagcgttgccccgcgtatcgctgcgggtggtgcagcaaaaatgatcgctgataacaggcagacggatcaaagcacaaatattaacgagctgcatttacaccctgaaaatcgggagacgttcgatactctgcgcgaatcactggagctggcagcatcatga

SEQ ID NO: 205506 - DNA, 273 bp, Klebsiella oxytoca
atgagcaacgaaaatactgttatcaccgttattattctgggtcatgagctggtattccatccgaccgaaaccgcatataaccagtttttaaacgaagcggcgcgtaaacctaacgttatgggggtattacgtgaatatattcaaaaaattatcgcgccagaaagccgcgaagacctgaaagaaattatccggcgtccgggcgttgccggaaaactggtcgagcttgtgaatgatgaatatgcgccagatattgaggcttttatcaagcggtag

SEQ ID NO: 205507 - DNA, 573 bp, Klebsiella oxytoca
atgacaaaagatcagatttttgatgagttgcttggaaaggagggcggatacgttaatcacccttcagatcgcggcgggccaacaaagtgggggattactgagaaagtggcccgcgcccatggttatagcggcagtatgaaagatctcacgcgggaacgtgcgttgagtatttacgaggcggattactggtacggcccgaggtttgaccagatagcgcaattatcgccggatattgccgccgagctgtgtgatacaggcgtcaatatggggccagctattgccagcaagtttttgcagcgctggctaaatgcaatgaataaacgcggcacgctttacccggatttagtcgccgatggtttaattggttcacgcacaattaatgcgttgcgggcatacctcgacaacagaaaacaggacggattaattgttatgttgcgggggctgaattgcagccagggtgcccgttatctcgaaattaccgagtcgcgagaggctaacgaggattttattttcggctggctgttaaatcgcgtgactattccgggccatattaaacagggtgtcggggggtaa

SEQ ID NO: 205508 - DNA, 315 bp, Klebsiella oxytoca
atgctgggcgcgtggcctctggtgttgctcctgttttttatcggcgcagcgctcgaactggcccgcttgctgaatagcgacgatgagatcacgttacggcttgctgttggcaggatgcttgcgggggcgataacggcaatgctggcgctgctgataaaagtcaaaagtccggatattgaggatctcgccgttgttgggctgggtgccgccgtggcggcggtgggatataccgccgtacagccgacactgaagcgggtattaagggcgctgctgaatgccaggcaaggcgaaaatgatcgtgaggataaatcatga

SEQ ID NO: 205509 - DNA, 456 bp, Klebsiella oxytoca
atgacacagcgaatcggcggcgctgactttgatatcacggtcggcactgagttgatccatgttgagacagcaacgctcgacattgaagacaacggcgcgaccgcgcaaacaaacggcgtgccagatggttgggtaaagggggataaatcagcttccggggaaatggtagtcagtgagagtgagtttaaaaagctcctggcgcaggcccgcgcggcgggtagctgggaggatttacgaccggctgacatgcttttctacgcaaagacctacagcgattttgtgaagatcgaggcgtttggatgcaagtttaagatctcttctctcctgaatatcgattcaaaaggcggggagaaatcgacacgaacattaccttttgaggtgacgtcgccggactttattcatattgacggggttccatatatcgggccggattcattgaacggcatcacggggtaa

SEQ ID NO: 205510 - DNA, 1158 bp, Klebsiella oxytoca
atgacctggcctagtgtagatattaatcaactaaatcagcggcagggtgagatcgccggaatcgaaaggatcatgctctttgtgggccaagcatcaaaagcgctcggcgataaaagcccaatgagggcgttaaacgcgcaatcggatattgacgaaagtttgtcagaggcggggcctgtactgctggagaacgtccgcgccgcacagcttaacggcgggcaaaactggtcggcttacgcaatgcttctcgaacaggatgatgaaaactggacagcggcgatcaccgccgccctgtcatctgtcagtgttgaaggcgtgttggtatgcactgagattgccgaaaaatcagccggtcgcacgctgattaaccagcttcacgcgctccgcgcttcagttatcagcaacctcgggcgctggatctggtttattgcgacggtggcgggaccgctgaagctgccgacaaaatgtacctgggaggattaccggttattcattaacgaactgaccaaagatattgccgcgaatagcgttcagcttgtcccctccctgtgggggaatgaggcgggcgtgctgtcgggtcgcctgtgtaatcgtgcagtaacaatcgccgacagtcccgcccgcgtcgaaacgggggaattgctcgggatggggattggctcaagcgatctccctgtggatgttgacggtgtggaggtgtcgctcgcggatcttaaggcgttccacgatctgcggtgcagcgttcctatgtggtattcggattacgagggcttgtactggtcggacgggttaatgcttgaggtaaaaggcggagacttcgaggcgatcgagtatttgagggtagcggataaagtggcccgcaatacccgtatccgcgccatcggtaagattgccaatcgtaacctcaatacaacgccaagcagcattgagacacaccagacctattttgcggggatcctgcgggaaatggcaaagacgctgcaaatcaacggtgtaacgtttcccggcgaggttgaatcaccgaaagagggtgatgtgttgatctcctggacgacaaaaacccgagtggcaatcgtgattgtggtgcgcccgtatgcgtgcccgaaagagatcaccgtgtcgattgtactcgatcgctcactggaggatgacgcatga

SEQ ID NO: 205511 - DNA, 687 bp, Klebsiella oxytoca
atgattgagggtggcattagccagcgccagatcgccgcgctaaaagaggagatcggcaagcgcgatttaaagccgcggcagcgtcagcgcctgctgtggcgtatcgcaaaatatggcgtgattgctgcggcaaaacggaatcagcgccagcaaacggatcccgattgcacgccgtggcccgcccgtaagcgcggtaaaaaaaagatgctaagaggattgccgcgcctcctggcggtcagggaaaaccgggaggcggaatccgtcacgatttatctgagggggaagggtggcagagcgttaagcgccggagcattgggccatatccacgcaaccggcgcggagatcaccggcagggcatccagccagccaaaacggcagcaggaggggccagccacgcgtagacaggcagcacgtttgcgaaagctgggatttaagcgccgcgatcggggccgctgggtaaatgcttctgcctcctggatcatgcagaacatgagcgaagcgcaagcgggagtagtcatccgcgaaatgagcggggaaccagtaaaacagacgtggaaaattgtgcttccggctcgcgcattcctcggggtgaacgatcaggaatttaataagattttggcgcggcagttacaggcgatcgattttggttggcaggtaacggcgcaggatatcagggggaaagtgtaa

SEQ ID NO: 205512 - DNA, 486 bp, Klebsiella oxytoca
atgagtagatcccagcttgacgatctgacggcgtttttaaacgaaagaatgccgccgcgtgcgcttcaggcgtttgccgccgaggcagattccgggcgcatggtgagaaccaggaaagatctcggtaacgggcgatttcggatctgtgcggtgcgctactcagtaacgctgagttggatcgattttcctttccggcagtatccgcccgcgcttgtgtatgcgcacgtcgcggcctggattgaagagcgccagacgataccggcaggtatgagccttgagcaatcagagccgcagatagacccgacgttgaaccatgagcgggccggtgatctgtatatcaccatggaggtgattgatgaggtggtgattattcaggatccgcggggagagatagagcttatggggcatctgtggacgctggaagatccgcgcattgataccgccgaagagttcgagctctccgtcacggtagcgggtggcgaatga

SEQ ID NO: 205513 - DNA, 474 bp, Klebsiella oxytoca
atgcgtcatgcaagcctgggattcagtggcaaaccgattgattacaccgatgagatcatcactaacggggaatcattctggcctgatctcaacctggcggagtttcaacgacagcgatcgctaccggtcaatattccacctgatacggcgattattgccgttttgaccactatcgcggaaatcaacgccgatcttgttgatgtggttacgggacaccaggcgaagggacacacaacggcgcttgaggtgcctggcgcgaaggcgggcgatgaaaaccagttaaccgcgcagtacaaaaaagcggtttacgccagggcaaaggccgatcttatgggggaatttcagacgatcgggcggcgcgatacgctccctggcgaagagggccaggacacgcgcgaaagcctattggctgaggcggcgttagtgattcgtaacatgaagggattcgggcgcgtgggggtgtatcaggtatga

SEQ ID NO: 205514 - DNA, 711 bp, Klebsiella oxytoca
atgactatgaccgttgcgcagcgctggcgagcaaaaatcctggctcagcagcagctacaggcccgtgaagcgctggaaagtaccccgcaaaatctgggggtgattgaccaggatttgcattttgatatcgagcaattacgcgatattgagcggatcgatcaaagggcagagcgcaagcgtgatgtgttgttgcctaagtggttgccccaggtcgaaaagtacattcaaaccggcgaatcctacccgtttttaccgcttgtgtactgcatggtgtggctgattgacacgggggagtttgaacacggaatcgatctggcggaggtcgccgttgcgcagggtcagaagatgccggaaaacttcgataactcccctggcgcgtttattgccgacaacctccgggattgggtggagcttgaataccggcagggtcatagcgtggagccgttttttacgcgcattttcacgctgattactgagaaatggcaactacatgaagagttgaccgcgcgttggtacgtcctggcggctcgcctggcgttgcgtggtgcagacggaaaagagactgcgcccagcatgattagtaacgtcgatacgctggaaaaggcggctgcattgctggcgaaggccgatgaggtttgcccgaaaaaatccggcaccaaaacactgacaaacaagatcgcgtcacgtctgcgggcgttgacgcgggattaa

SEQ ID NO: 205515 - DNA, 1008 bp, Klebsiella oxytoca
atggcaaacttacacgacgttaagcgtcgtattcaggcttatctctcatccatggcgctgacgtatggcgttgagtcaacgaaagaatttttcgcgatcacctcgccgattgatacccagctacgtgatgcgttgatgcacagcgtgcagtttttgggtcagatcaatatgcagcatgttgatcaaatcgccgggcaggtcgtggttacagggacaccgggtatttataccgggcgctcatctacgggccgctttaatcgtgagctgggaaactccgggaatacctatgcgttaaacgagatggattccggctcataccttccctataaaacgcttgttgcctgggcgaatgctggcagtgaccaggaatttattaaccgcatccaggcatttagcaataaaagttttgcgctggatatcctgcggatcggctttaacggtctcagggctgaccctgataccgatccggtagctaacccgctcggtgaggatgtcgcgccgggctggcataagattgtcgaagaccgttccccgattcagattgtgaaggatccgatcaccctcgaccgttctgcgccgccgtcttcaggcggaaactatgtttcgctggatgccattgtgaccgatatcaaaatgaatctgattatcgagtcagagcgcgaaaaccctgatttggtcgcgttgattggtgccgatcttatcggggcggacgcaaccagcctgatgaaccgaatcgatcgcccaaccgagaaggtcgccgcccagctaattaaccgtgaagtgggtggcctgaaagcctattccccgccgtatttcaagccgggttgtgtaacggtaacgacgctctggaacctgcatcactacgtgcagcagggaacagaaatgcgcaaggcggaatgggtggatgatcgcaagcgcttcgaaaataactatctgcgtatggcgggttatgccatcgagtatgacgagttatacggatcctttgacaacatcacggcggcagcttaa

SEQ ID NO: 205516 - DNA, 1068 bp, Klebsiella oxytoca
atgtcggaaaaaatatcggattggatctgcatttgtgcagctggtcaatctgttctgggagagccaataaaagaagaggttatccaggaggcggcggataactacgacaccagtttttatactgccatgatttggcctaatcatccctggcccgaggtgggcggttatctggcccgcgaaatgtatacttacaatctcgggcgggttgttgagatgaaagccgagagagagggcggcgtattaaagttatttgcccggtatgcacctaatcaatttttgattaatttaaatagtgatggtcaacgccttttctcatctgctgaattcgatttggatttccagggggaggggaaaatttatatgacgggcgtcaccgcgacggatattcccgccagcacacatacgcaaatgatgcaattttcagcgtcaaataagcgcgatggcgttttgcgtagtgattttaacgagttttcattaggtgcgttatctgaagcaaataaaaaagagcaatcattatttagccgattttttccgcagcgctttaatcagcaaaaattatcagtaacagacattcaacctgaagaggatccagaaaaaatggaagaactcaaagcattaatagaaaaaattgcggcgcggctggatgcgctggagggcgcggcgaaaggtgacacaaccacgacgacttccgaggcagcagacgaagtgcaaagtcaggccgaagagatcgccatcctggcggaagaggttgtggcactggcggaagaagtcgtggagaacccggaagatgaggtggtcaccgctgaattcagcgccgcaaaggcgcagtttactgaaaaattccaggggtttaccgctgcggatccctcctttgccacgcgtaagcgccgcgccgcgaaagcgtttagcgccgcacgccagcagtcacgcgagggatcccaggagaccgcagcgcttcgccaggaacttaaagaaatgaaacagttgctttccgccgcaacgggaaaatcaattaccaggacgccgagcggcgcgccagcgactgaagagaaagtgtctgttctctga

SEQ ID NO: 205517 - DNA, 1821 bp, Klebsiella oxytoca
atgagtcgatatccagaagaaataaaaagcgctgcccgtagtctctatattaaagggtttacgcctaaagagattgcgcaggaattgaatattccgcaacgcacggtctataactggtctaataaataccagtgggcaaaactcatcgcttatgaatcgatggaagaagcgatcacgcgtcgttataacctgctcgcgcaaaaaaacggcaaaactgagctggagcttgtcgagatgcgcgatctggtcgcgcaacacgttaagatcgtagggcaacgcaataaacacgccgaaaaaatggcggagatcaaggcccgctgtgatgccgcaaattatgacgattccggcgataccgccgaacgcgaaagcggagccggtcgaaaaggacgccgtaagaagaatgatgtatcgcatctgacggcggaggtgttcgaagagtgggcgcaggcccacctttttgaatatcagctatatgtacgcgagcataaacaagaggattggcgatttatcctcaaggcccgccagatcggaatgaccttttattttgcctttgaggctttcgaggatgcgtgcctttccggtgataatcaggtcttcttctccgcgtcccgcgcccaggcggagatctttcagcaatatatcatcgagatcgccgaacaacatttcggcgtgcgcctgtcatccactcgcaacaaaatcaagctgagtaacggcgcaatcctgcgttttctttctacaaacgccagcaccgcccaggggttcaacggtcatctgtatggcgatgaaattttctggatcccgaaatttgccaagctgcatgaagtcgccagcgccatgacgacacagaaacgatttaggacaacctacttttccaccccaagcgccaaaactcaccaggcctacccggtatggaccggagatcactggaaagaggatgacaataaacgcaaggttattccgttcccgaccgataaagcgctgcaaaaagcgggtcagcgctgcccggatacgctctggcgatatgtcattactatggaaatggcggtcgcgggcggtctggataagctggttgatatcgatcgactcaaaaatcgctacagcgaaagcgcctacaacatgctgtatatgtgcatctttgttgacagcaaagacgccgttttcaaattctccgatctggaaaaatgcgccgttgatgcgtcccgttgggcggactttaaccctaaatcctccaggccgtttggtaatcgcgaagtgtgggccggttacgatccggcgcgtaccggcgacaactcgacttttgtcatcatcgccccgccactcaacgagggtgagcggttccgcgtgctgatggtctggcactggcgcgggctaaatttcagctatcaggccaagcagatccaggagctgaagcggatttttaatatcacctacatcgggatcgatatcaccggcatagggcgcaacgtctacgacatggtgtctaaattcgccccgcgtgaagcgcgcccgatccattacagcgtagaaagcaaaaatcagctggtttcgaagatgatcgacaccatcgagcataagcgcatcgagtggagtaaagacgcaatagacgaaatcacccgcgatcgcgctgaaatcgccccatcatttatggctattcgtcgcacaacaacggcaagcggcggacaaatgacctttgtcgccgagcgatcggaggctaccggacacgccgatatattctttgctatctctcacgccatgattaatgagcctatcgatcatgagtttgagggaagctcaacatgggcctttgggaaagcagcatga

SEQ ID NO: 205518 - DNA, 1074 bp, Klebsiella oxytoca
atgggcctttgggaaagcagcatgagtaaacgcaaaccgattaagcgcggcaaagggccgcaaacacaaaaccactcggcgggccgtgggagtgtgatcacctttggcgctccagagccaatcctcaccactggcaccgaatattacaatattcagtacgatctacaggccgatcactggcgcttacccattgaccggctcgccctggcccagcttcccaacctgaacagccagcacggcggggtaatgtatgcccgacgaaatatgatctccgccgattacagcggcggcggtctgacacatgaagagctggagggcgcggcattcgattacctgctgtgcggtgatgtggccctattgaaagagcgcaacatttttggcagtgtctgcgccctcaccccattaccgtcaatctatctgaggcgcaggaaatcaggggattttgtcattcttcaggagggtgagccgctggtttattcacctgatgacattatctatattaagtcctacgacccacggcagcagatctacgggctaccggattacataggggggatccattccgtgttactgaacagtgaggcgactatttttcgccgcaaatattacaataacggcgcgcatatgggctttattctgtacaccaacgatccgaacctttccacggaggttgaaaccgaaatcaaagagaaaatccaggagtcaaaaggcgtcggcaacttcacaaacctatatatcaacattccacgcggcaaccctgaaggcgtgaaattaatccctatcggcgaggttaacgccaaggatgaatttaataacgtgaaaagcatttccgcccaggatattttgaccgtgcatcgcttcccggcaggcctcgccggtattattcccgaccgtagctcttcgctccctaacccggaaaacgcacgatcgacataccgcaaagatgaggtaatcccgctgcaacgcaaattcatgcgggcagtgaatgaggatcccgaaatcccgtcacgcctgaaactgcaattcaacctcacggaaaacgcggaaaatgacagcgaagaacaggacaaatga

SEQ ID NO: 205519 - DNA, 291 bp, Klebsiella oxytoca
atgcgcgttttaaagatgttctgtaaatactgccatgcgccagcggtgatacagaaatccgatccgcaaatcgaacaaggaaggccgagaggcggggaagttatcaggatttattgtcgctgtaccgatattgagtgcggtcatacatttgtttctgaagtcatttttaaacatacactcagtcccagcgcaaaaacaagtgatgacatgatgcgagcgctggtcggcgcgatcggcgctttgcggcctgatcagcgtcaacttgcactcgacttactacaagccggatag

SEQ ID NO: 205520 - DNA, 465 bp, Klebsiella oxytoca
atgagttggattgaagttattgactcagccataaaaataggtttaggtgcattaattactgcattagcatcgtattttatgttaagaagaaaccatacgcatgaagttgatcaagaaattcgcaagctaactaatagaaaaaaagaagaaagaaaactgaattacagtcaatacctgactcattcgctcatgcttacgcagaaatacagagatgagagttgtaatgctcaagaggcagattacattgaatatttaaacatatataaccgcatacagattacatcctctgacaaggttagaataggagcgtacaatctttttaacgcagtgaaccagtttgttgttataagaaaacacgaacaggatcgcgaacttttgcgaagaatgcgtgaaagcattgattattttacaggagaatttcaatttctcgcgcgggaagatgtcgttggtagtgccgaagtataa

SEQ ID NO: 205521 - DNA, 648 bp, Klebsiella oxytoca
atgaaattagttaaagaaataattcctatctgtttttttgtagtttttacctctatcaatggttttcttttttacatctcaaaaattacggctggcgaatcaataacattcttcgccctatgttccgttattactttgatgctatatttttcgtctgaaattcaagagttttctattgctggtaacattgtcaaactcaaagaagttcgaagggacgctgacaaagcgatagctgaactacagtcttctcgcctcacgatgttcaaattcttacttgaaagtaccaaaaaattcagtggtggatttggcagtgtttctcctaaggatgagcgaattgatgattttttgtttctgtatgaaaatatagaaaaatctggtttaaccgaagagttagctgaaaaaatagcaggatgtgcagagttgtttatgcaagctcaactttacaactgcgcaagcaattattctaatgtcaatctcagtcttacttatactcccgatgagcttactattgaggcactaaagagtaataacatacgtaaagataacagccatactgaagatgaaaatcgtaaatttattttggaagctgtctcacattatcgcaccctctacaatatacttcagaggactaagaaaattactacctga

SEQ ID NO: 205522 - DNA, 2538 bp, Klebsiella oxytoca
atgacaagagggcgctatgcaccaacgccgccaccgccatttaaggtgggcggcgtagataacacggaatatgcgtacccgtggaattatccacgcaaagcgatcggcgtggacaaaacaccggcacaagatcccagggagctggcggcagagcatgaattctggcagcgggcgaggcataccctccacccgttgccgctttttatccgtcgccgcatgatggcccgtgttgagaaatcccacgaaaagagcggtcggcacattgccgatctgacgctacgcaatatcgtgcggcgtgagttgccgcacatcagcggagtaatgaagcggtattccctcagcctaaaccgccacgcggatcaggttgatgaaacgccgtttgcagatctggacgcgctttatcataacttccctcaactaaacgccttgttagcccgctttaatagcttgccggatttctccccggaggatgtgaaattgctggcgcaagacgttgcgatctacgtccgcgccgtgatggctgaagttagcggagatgcagaagacttgagcctgaatgagtcagcacggcgaatgtataacgaagcaattagtattgccgccgtttttaatgtcgtagttccaggctcacataaacgccgccgcccgattgatgagattgcagcggctatccgtaaagttctcgatgatcgtttttggaatcgccgcttgctgaaatatgccacgcgatggcgcgaacatcttcggattagcctgggcgacgtgcgccgcagcgtttcaccttattgcagtaaagaacgcgtgagcatatggcgggagcgtcgccagcgtagccgtgagatcctgggcggcctggagatcgaggataaagaaaccggagagcgcttttcgttactggaacaaatagacaagagcacctctaacccggaaaagcgacgcgttgaactcatgacgaggatcggcggcttcgaaaaggccgctaatgagtggggttatgtcgggagctatttcaccataaccacgccgtctaaatatcatgcttacaccgcattcggtcatcgtaatggcaaatggcagggcagcagcccgcgcgacgcacaaaaatatttaaataccatatggcaacaaatccgcgctgagctggcgcgggaagaaattggcgtttttggtctgcgagtcgcggaacctcatcatgatggtaccccccactggcatggcgtgctgttcactttgccggaacatcaaaatgccttgcgtgacgttttacagcgctatgccacgcgagaagacgccggagagctggcgacaaaacacggcattcacccgcgctttgattttggggtaattgatccagaaaaaggcagcgccacggggtacatcgttaaatacatttccaaaaatatcgacggctatgcgctggataatgagaagtgcgacgaaacagggcgaccgctaaaggaaacggcgcaacatgccactgcctgggcgtcaacgtgggggatccgtcaatttcaatttttaaccagcgtccctgttacggtttggcgcgagctgcgcaaaatgcgcgatcaggagaaggccgaccagatcaacccgctgtttgcagagattcaccgcgccgcggatgtaggggactggcatatgtttgtcaatcttatgggcgggccattggctaagcgatgcgatctgccattacgtacttattacgagtataagcccgaggaaaacagctacggggagtttttgcgcgtcattaaaggtttgagtatgcctttaatcagtattccgccagtaatcaccaggttgagagaattccgtattgttaaaaaatcatcggaaggcgcggagcgccccgatgattgctgttcatcttttgaccttaagggcgcgcccgcgccctctgggacccgtgtcaataactgtactgaggttgaaaaacaaccagatcaggaagagccggaacaatatgagatcggtcaaatgacgcgggagcagagaaagaggtttactgaaagtgtcagaaactacaaaccagatcgccagaagtcaccggcagatgagtttgaggaaatggcttttgcactcactttaggtgattgcaccgacgccgagcgcgatcgggcggaaacatacatgaaagcggcagaagaattgcggctgcgggaaagcgaaatgccagcccgtgcgccaatagttgccccgcccgaggatcgcattgctactttagaagattatgcaagatcgatcagcgtggaattgagccggggtcagttggcgctattattgcgcggcgagaatttgcgcacagatggttatgttatttccgcgacaattaacggagagatcagacgccgcaaagatactagccaggacaggaaaattgcggaaatctggcagcacatgaaattgcggcataacgtggatggcggggatattagatacgatcctgttggtaattatgcagatatgttgaaaaaggctgatcctgaagcatggcgaagattgtttagcatgaggggaaaaagaagtaaccagtaa

SEQ ID NO: 205523 - DNA, 288 bp, Klebsiella oxytoca
atgactattaatcaaaaactaacaaatgaagagcttgacgctttgatattaaagctgaccgtaggatatgagttttattttcgaagcggtaggcgtcccggcgcaagttctatggctgaattattaacaaaagcagcagcggcggcgaatgaattacaggatcgccgtaagcatgatgaggcttattttaattcattaaatatggaggaaaaaacctgcgaattatgcgggcgcacaacgacccaccctgaaggttggcactattgcagcggtaaggcgaaagaatga

SEQ ID NO: 205524 - DNA, 858 bp, Klebsiella oxytoca
atgattaaatcccctttgcgctgggcgggcagtaaagcaaacgtgatgcccgaattaaataaatacctcaaaccgtccgagcgtcttgttgatctctttgtgggtggtggcacggtatttttaaatacggattatccgcgttatacgctttgcgatagcaactttatgctgatgaatttctatcgtgagttaacaactaatacggatatttttattgatcacgcaaagtttatttttgataactatggcgatgagtcgtcttattacgattttcggaatcaatatcgcctcctgtgtgcctcccttgagacttatggcaaaggtgataaaggatctgctgcgttattatttctctatcttaatcgccattgttatggcggcgtatatcgctgcaatgagaaaggcgagtttaatatggcttatagtaaggtcgggaaagcaaaattccccgaaaaagaattaagactctttgcggaaaaagcaaacgacactcatgcaacattcattgttggtgattttcgcgaagcgctttctatcgtaacggggcggttattcactcaacatgaaactttgactatttacgcggatcccccttatttttcgcaggaggggaaaaagagttttaataaatatggcggcaagccttttggcgattctgatcatgaagagttaaacaatattctcattggcacggcggagtatttcggctcgcaaattgttttatcgaatagtgatacaaaagccacgcgcgaaacatatttaggatttgagttttatcaagttgaaacgctgcgaaaacttgcgcctaaaacacgagagaaggtgaaagaactaatcggggttccgcttccattttaa

SEQ ID NO: 205525 - DNA, 663 bp, Klebsiella oxytoca
atgaatcgtcaatataacccgatcaccaaagaagagttaaaagcgaaactgcaaagtcattcgtgctggcttcaggataaggcaaccggggagcgcctcgatctctctatgtttgatttatcaaatatggatttaaggggggcgtatcttctggaagctgtcgcagaggatgcctgttttgatggggccaacctgtcgggggcggtagcgtcatttgctaacatgtccggcagtagctttaagaatgcaaatttatcaaagagcatttttaaattttctgatttctcagactgtgattttaaaaatgctgagattgaaaattcgatcttgtggtattcagattttaatcgtgcccagtttaaaaatacaaaaatgtacggcgttaagaccacgggcgcaaagtttgaagaggctattctatatcagtcattaatcattattcagggtgagcaatatcgaatcgccatttccgataaatcatttgcgcaggttgggtgcgagcatcacagcgccagcaaatggcgagcatttacaaagaatgagattcttttaatggacggacgcgccgcgctcaggttttacccgcgcctgttagatattctggatttttacaccggcaaaggcccgcgtccggattgggttggcgaggtggcaaatgattaa

SEQ ID NO: 205526 - DNA, 246 bp, Klebsiella oxytoca
atgagttacattgtgaaaaataaacctgaagttttgaatgattctaagccgctaaccgtggcggaaatatttaattctggcgttactaccggaaaaatctctatgcatgtgcttttaggggcgcatctttcaattttaaaggcaaaaattcagcgcgacaaactcacttcgctggaagtattggaagatttagaaagatgggcggagggaaaaattgggggaattgatgaacctatccaacggtga

SEQ ID NO: 205527 - DNA, 198 bp, Klebsiella oxytoca
atggcctacggacccaatcaccgctacagcaaaacaccatcatatttaagaggcatgaccgccgacgatatcgaaaagaatggctttaaagtgcagtgcaaggaaacgttaatacaatttaatgttttaccaaatagcgatctttgctatgcctttcttgctgcattaaaagacgcctggaaaaacgaaaagctttaa

SEQ ID NO: 205528 - DNA, 249 bp, Klebsiella oxytoca
atgaatccgtattacattgaaatattcaatcaggctcttgagtcgtaccacttcaaccgggagaacgggactacatcgcacgattccggcctgaaaattctaaacagtgtcgttactcatctttatggcctggcgttctgcctggaggatgaggaaagcctccgctttcttcgtctcattctggaagagctgcgcagttataaaatcccgcgcccgatctccagattcactacaacgatatggagctaa

SEQ ID NO: 205529 - DNA, 1932 bp, Klebsiella oxytoca
gtgattcggattctgacagcgactcggattctgacagcgattctgattcggacagcgactcggactctgacagcgactcggattcagacagtgattctgactcggacagtgactccgactctgacagcgactcggattccgacagcgatgccgactctgacagcgattcggattctgacagcgattccgactctgacagcgattcggattccgacagcgattcggactccgacagcgactcggactctgacagcgattcggactccgacagcgactcggattcggacagcgattcggattccgacagcgactcggactctgacagtgattcggatagtgacagcgattctgactcggacagcgattcggactctgacagcgatgccgattccgacagtgattcggattctgacagcgattcggacgctgacagtgactcggattcggactccgacagtgactcggattcagacagcgattcggactcggacagcgactcggactctgactctgacagtgactcggactccgacagtgactcggattctgacagcgactcggactccgacagtgactccgattctgacagcgactctgactctgacagcgatgccgattccgacagtgattcggattctgacagcgattccgactctgacagcgattccgactctgacagcgattcggactctgacagtgactcggattccgactccgacagcgactccgactctgacagcgattcggattctgacagcgactcggactctgacagcgactccgattccgacagtgattcggactccgacagcgattccgactccgacagtgattcggactccgacagtgattccgactcggacagcgatgctgactccgacagcgactccgattccgacagcgattcggactccgactccgacagcgactcggattccgacagcgattcggactcggacagcgactctgactctgacagcgactcggactccgacagcgattcggactctgacagcgattcggactccgacagtgactcggattctgacagtgactccgattcagacagcgactccgattcagacagcgactcggactctgactctgactccgacagcgattcggactccgacagtgattccgactctgacagcgattcggattcggacagcgactccgattcagacagcgactcggactctgactctgactccgacagcgattcggattcggacagcgattcggactctgacagcgatgccgattccgacagcgattcggattcggacagcgattcggactctgacagcgatgccgattccgacagcgattcggattcggacagcgattcggactctgacagcgatgccgattccgacagcgattcggattcggacagcgattcggactctgacagcgatgccgattccgacagcgattcggattcggacagcgattcggactctgacagcgatgccgattcggacagcgactcggactctgacagcgactcggactccgacagcgactcggattcagacagcgactcggattccgacagcgactcggactcggatagtgactcggattcggatagcgactccgattctgacagtgactcggattccgacagtgattcggattctgacagcgactcggattctgacagcgattctgattcggacagcgactcggactctgacagcgactcggattcagacagtgattctgactcggacagtgactccgactctgacagcgactcggattccgacagcgatgccgactctgacagtgattcggattcggacagcgattcggactctgacagcgactccgattccgacagcgactcggactctgacagcgattcggattctgacagcgattcggatatcccgcaggccaatgcggataccaataccgcgctga

SEQ ID NO: 205530 - DNA, 699 bp, Klebsiella oxytoca
atgttagagcaactgaaagccgaggtgctggcggcaaacctggcgctcccggcgcaccggctggtcacctttacctggggcaacgtcagcgcggtggatgaaacgcgccgtctgatggtcattaagccctccggcgtcgaatatgaggtgatgaccgccgacgatatggtggtcgtagagatcgccagcggtaaggtcgttgaaggcgctaaaaaaccctcttcggatacgccaacgcatctggcgctttatcgtcgctatccgcagatcggcgggatcgtgcatacccactcccgccatgcgacgatctggtcgcaggccggtctcgatctccccgcctggggcaccacccacgccgactatttttatggtgccattccctgcacccggccgatgaccgttgaggagattaacggggagtatgagtatcagaccggcgaagtgattatcaaaacctttgaacagcgcggtctggagccggcgcaaatcccggcggtattagtccattcgcacggcccgtttgcctggggtaaagatgcggccgacgccgtacataacgccgtggtacttgaagagtgcgcctatatgggcctgttctcgcgccagctggcgccacagctgccggatatgcagtctgaactgctcgataaacactacctgcgtaaacacggcgcgaatgcctattacgggcaaaactaa

SEQ ID NO: 205531 - DNA, 468 bp, Klebsiella oxytoca
atggatatgatgagtcttttggtgggggttatggggagcatcatcgcagcaggggtaattactctggttgccaagtggatttggccaaactttagtgacacttgtttgtacagaggtgttcgtgttgatggttcatgggacgtaacagaagaacgtaatggtagcagtgcaacagtaggtcgccttgaactgaagcagcgaggatgccgcttaagaggcacaagcgccagaacacagacgcgtgatggtagaaattcagatagaaaattcaattaccatggttcaatcaacggcaaccagataacgctggttttcgaagatgctcgagggattggtttcgacaccggaacctatgtatttactgtctataacgacggtaaaacaatggtggggatgtcgacctttcacggtaaggcagaaaataaaattatatcggagtcaagaatattaaggaaaacgatagtttaa

SEQ ID NO: 205532 - DNA, 579 bp, Klebsiella oxytoca
atggcgactagttacattagtgaacatagcgctgagtactatttagtaccagcactaaagacgattttgcaggaaaaatatatccatgttgctccagtcttcccatggatatatcgagagtttaataagatctcaatgcatcttcataaaaatgaccagtttcatgtgctagtaatgtttccacgtaggccaaaacttgatagtccatacagtgacgagatatatgtcactattaatagagagctagaggcttttaacaaagttgggagagaaaaaggagtaccagtgatagctggctgccctaatgctatagatctatgggatttatccaattgtaagaattacgtatggattgatcttgcacattgtaattatgatgaatatttaaatccaataagtaagctaaaacaaaatggatgtttgctagataaagaggacattttatcccttgtaaggaacagtgcaatttttgactttgcgtcttttgtagatttcttccgagctgcaaaagaaactcaaccttacaggatgtatggcagcccatataagccagtttactttctgattaagacacactaa

SEQ ID NO: 205533 - DNA, 945 bp, Klebsiella oxytoca
atggctgttagaagaattatatatgcatattatgatcctgcttgggataaaactacgatgtctcttgcagctctgactcgtactgaggttggacctttagaatatacctctgaaatgaggggccaccttcattgcccatcatgctatgagtcattgatacgtgtccctagcgatccgtcaatcagtatcatggctgacctaaaagaggccttgtttagacatctgcctgatacagatcatacagcacctcaatgcctgttaagaagcggcatcatggttggtaaaaaatacaactctgaggaagaagcacttcaagccgttgaagatgaagatattataatcattagtgggttcatgcaggaacgagcgaataataatgccagagatcctgccgagggtgaaggtgaacaagttgagactgactatgagagtgaagatggacctgcattggatgtcccaatatctcggcatgagggacaaacctttaatgtacccagtaaaataaccagtgtaatgtctctttgttccaattttcggcgtaatttctatcgtgacattcatatattagtcgatggggaagtgaaacattacgtgttgagtgaatgtttaactgacgcagcagagatagcagaagaaaatgacactccaaacttttattttggagaaattgtatcaattagaagatttgatcataccagtcatgtatttttgagacacccacgattagcaggtaatgttgatttcaaaatttcagcaagcaatgaagacttggatgcaagagggatcaccgcagctaatgctcaacgtagaatcttggttttttttggtaaaataaattctgttggtgctggttattggtctcaaaataaaaaatggggagaaatttcactcctaccagaaaaatatgaagattttttacgtgccaattatgagcgtgaagaataa

SEQ ID NO: 205534 - DNA, 438 bp, Klebsiella oxytoca
atgaacaaacctaaatcccaacgcatcacccctgccaccatgacaggcgagcagatcgcagacgcgatcctttacggcacgtacaccaaaaccgcgctttggtctttcatctccagaaatggtggagcggatgcggtacacgctaagtacccgcagattgccgttgcacttcatatcctgaaacaggaaaagaagaaggcaaagagcgcccgagcggtcaagacgatcctcaagccgctctcccggcaatacgctgacggtcagtcactgactgagattctggcctcggtgctccagggttaccgcagtctgtaccgtgagaaattcaatctggatatgacgcccgaacaggtgatcatgttcctggttgccacccacggtgtggagactctgaaaaactacggttatagccccgctgccgggaagtcgccagcctga

SEQ ID NO: 205535 - DNA, 579 bp, Klebsiella oxytoca
atgagcaacagagcagcagaaaataagccttacgaatcactgccccagccgaatgaggccgagccgatcacgattgatacgttttcaaactggtcaatcctagtagcgcggatcaaatgcttcaacggggtaaagaatgatccattaatcatggcggtatacagccatctgcttggctggaagaaaacgactgggcagattcgtccatctcagcagtacattgcggactgctgttgcatgggcctctcaactgtccagaagaaggcgaaattacttgaaaaaatggggtggattacaactaaaccagtttataaatcaggcagtaaggaaatcctctttacggattataccgtcaaagatcctgaggccatcctaaccgaactcaacgctgcccttgttcagcagggagatacaacggtaactgtcatcaagaaatccgaaggtaagccccttgggcagacacaacgacaaacagcagccgccaatgatggtcaccacggtggacgtgtaccgcgtgtaccgcagagattgaacgctccagtggaagagaatgaaaacgacgacgattgcccttattga

SEQ ID NO: 205536 - DNA, 582 bp, Klebsiella oxytoca
atgaataatgatgaccgtaacggcctaaacgccgcaccagaaaagattgacccagaagaacaagcaagtaacgagcttcccgatttacccgcacaagaattacctgacccagagttgccggatttgactcgcctatataaacggcgttgccgcgatggcgacgttatgcagaagtgcaagcaccttttaatcgcgggaatgcttcctggcaaggtctcgctgctgcttcgtctgccgctggaaaaggtgcaaaacatctacgacaacagctataacccccgctgccgccgcttcgctaatccgaacaacgagagattaattcccactatgtggagcgaaggcgcaatgctcgcggaggtctgccaagcgctgggattgccccttttcactgtagtaatgtccctccggcagaatggcgttaccgaggccgcaatggccccacgaatgccagattacaatgatccgctatgcgtggaataccgccgtgttgtggcccgaaaagctgcgagcaaatcgcggcctattcagataaatcctgttcgacgcatacgtaaatccgcagggaaaaatgcgacagcctga

SEQ ID NO: 205537 - DNA, 141 bp, Klebsiella oxytoca
atgcgacagcctgacataatctctttgaatataatagacattttaccttacctgctcatcatctggctggcgtatcgctgctcccgtgacgggctggttatcctattaaggaataaaaacaaaaatgaaaaacttgcttaa

SEQ ID NO: 205538 - DNA, 369 bp, Klebsiella oxytoca
atgaaaaacttgcttaaaaccgttcgcgattccatagccgcagccatgaacgggcgcaccatcgaacagatggaaaccgaacagcggcaggacgctgtaaaaaacgccgtggatgactatttaatccgccatcccgattggcaaccatcaacgaagccagcgccgaaagctgcgccagtgactaacaccaagcagaaaaccgcgaagatcaaaaaggcgcttggtgctggggcaggtggcttccaggcccacgagattgatccggaaatgctccgtctggcgcgggataaatgccgccaggtggtcgcctcagaccctgaacgctattcgcacatcatcgaatccacaccgcttaaaagaattgagtga

SEQ ID NO: 205539 - DNA, 207 bp, Klebsiella oxytoca
atgcaattgaaaattctgggtgtgggcaatgcgcctttactgtctgtcaacgtcaagacgcttgatgacgtgggaattttaaatatcagcggcctttgccgaaagctcggggtgaagcgaagcacttttttgtccaaggtggcaacctcgggactggaagcggcgatcttgcattatgtccataaaccgcaaaaaaagaagtgttaa

SEQ ID NO: 205540 - DNA, 369 bp, Klebsiella oxytoca
atgagtatcacaacagttttttcaacaagtccatttttttacctacatgacattagagtaaaaacagtcaaaggcagagtatttacaattaacatactcgagcacagcaaaacttactccggtgatttaagtatattagaaataggcaccgggccatgtatcaactacccacttaaacagcgaactcccaatgcagagttaattttcgatgaagcactggacactatagttaaatatttaaattataaaaatgataatgacacaataaatgacatacataatccatgcaacactccttttgttagcatgtcagatcaacaaaaaatccttcaaacaaaagctataaacgtgactgttcgggtaaattaa

SEQ ID NO: 205541 - DNA, 150 bp, Klebsiella oxytoca
atgaacaaatcagcagcaactaaacgcaacaatcgcaaaatccatgtgaggaagtttctggcgacgccagagggcaaggcctggctcgagcggaagcaggccgaagaggctgagttgaaacttgtttctgagctaaagaagtttgtctga

SEQ ID NO: 205542 - DNA, 207 bp, Klebsiella oxytoca
atgaaaaagctaattttgttgggtctattgattctcagtggtcaggcgaatgccacacagattacgatgaccaatccacagcaggaaacgacggagaacggtaagacgctttgcatctatgagaacagtatctacacattcacctacctaactaaggggaaatgtccctatacgaaaaccttcaatacagaggattcagaagagtga

SEQ ID NO: 205543 - DNA, 444 bp, Klebsiella oxytoca
atggatacaaataaatttacacgccatgatttttctgaaacttcctttactctgatgcagattattggagatagccgtgaatacgaggctaaaattagagaagattattaccgatccgcgcttttatctttaaatcaactgaatgatctaatagcaattaatgaagaaaaaaccatagagaataagcgtatagtatttactttaggcgatagtttatctttcaatcttgaacttaaaaatcactttgataaaactgctataacattaagctgcattgagcaagatgaatatggcaaagagtttttgagcaaggataggaattacacatttacaatagacataaatgggaaactaaacgatgttgatggtgccttaaatcgtagacattaccatgaacactttacacatatctttaccttgcttgtagagaaaatcatcaagtaa

SEQ ID NO: 205544 - DNA, 1371 bp, Klebsiella oxytoca
atggaattatcctcactgaccgccgtttccccagtcgacggccgctacggcgacaaagtcagcgcgctgcgcggtatcttcagcgaattcggtttgctgaaattccgcgttcaggtagaagtgcgttggttgcaaaaactggccgcgcacgcagcgatcaaggaagttcctgcttttgctgccgacgcaaacggttaccttgataaaatcgtcgctgatttcagcgtagaagatgcagagcgcatcaaaaccatcgagcgcaccaccaaccacgacgtcaaagcggttgagtatttccttaaggaaaaagtcgccgatgtcgctgaactgcacgcggtctccgagtttatccactttgcctgcacctccgaggacatcaacaatctgtcccacgcgctgatgctaaaaaccgctcgcgacgaagtgatcctgccctactggcgcaagctgatcgacgcggtgaaagacctggcggtgcaatatcgcgatatcccgctgctttcccgcactcacggccagccggccacgccatccaccatggggaaagagatggcgaacgtcgcttaccgtatggagcgccagtatcgtcagctgaatcagattgaaatccttggcaaaatcaacggcgcggtgggtaactataacgcccacatcgccgcctacccggaagtcgactggcaccagttcagcgaagagttcgtcacctcgctgggtatccagtggaacccgtacaccacccagattgaaccccacgactatatcgccgaactgttcgactgcgtcgcgcgctttaacactatcctgattgatttcgatcgtgacgtctggggctatatcgcgctcaaccatttcaagcagaaaacgattgccggcgaaatcggatcttccaccatgccgcataaagtgaacccgatcgacttcgagaactccgaaggcaacctcggtctggctaatgcggtgatgcagcatctggcatgcaaactaccggtttcccgctggcagcgcgacctgaccgactccaccgtcctgcgtaacctcggcgtgggtatcggctacgcgctgatcgcttatcaatccacgctcaaaggcataagcaaactcgaactgaaccaggatcgtctgctggatgagctggaccacaactgggaagttcttgccgagccgatccagaccgtgatgcgccgctacggcatcgagaaaccttacgagaagctcaaagagctgacccgcggcaagcgcgtcgacgcgcaaggaatgcagcaattcatcgatagcctgccgctgccggaagatgaaaaagttcgcctgaaggcgatgaccccggccaactacatcggccgcgcgaccaccatggttgatgaactgaagtaa

SEQ ID NO: 205545 - DNA, 201 bp, Klebsiella oxytoca
atgttttttacccatggtttccagatcaaccataacgtgaacataatcaattggctgatcttcctccttattatgatgaccggattcaatatctacagaatccgtttgatgaacaacttcatctgctttttctttttggttaaccttgcccgtaacgtcaacaagaccttcaatggaaaatactccgtccccaatttttga

SEQ ID NO: 205546 - DNA, 1347 bp, Klebsiella oxytoca
atgagccagaaattgaaggtagtgactatcggcggcggcagcagctataccccggaattactggaaggattcctgaagcgttatcatgaactgccgattagcgaactgtggctggtggacgtcgcggaagggcaggaaaagctcgatattatccacgcgctgtgccagcgcatggtggaaaaagccggcgtcccgatgaaagtctacaagaccctcgatcgccgcgcggcgctggaaggcgccgatttcgtcaccacccaactgcgcgtcggccagcttaaggcgcgcgagaaggacgagcgtatcccgctgagctacggctatttaggtcaggaaaccaacggcgcgggcggattgtttaaaggtctgcgcaccattccggtcatttttgacattgtgaaagatgttcaggaagtctgtccgaacgcctgggtgattaactttaccaacccggcgggcatggtaaccgaagcggtgtaccgtcataccggctttaagcgctttatcggcgtgtgcaatattcctatcggcatgaggatgtttatcaccgacgtgctgaagctgaccccgagcgatgagctgaatatcgatctgtttggtctgaaccatctggtgtttgttcgcgatgtgctggtcaacggcatttcacgctttgacgagctgcttgacggcgtagcgtcgggtcgattgagcgcaaactcggtgaaaaatatctttgatttgccgtttagcgaagggctgctccggtcgctgcgcctgatcccttgttcctatctgctctactactttaagccaaaagagatgctggcgattgaaatgggcgagtactacaaaggcggcgcgcgcgcgcaggtggtgcagaaggttgagaaacagctgtttgagctgtacaaagatccggatctgaacgttaaaccaaaagagctggagcagcgcggcggggcctattactccgacgcggcctgtgaagtgattaacgccatctacaatgacaagcaggccgagcattacgttaacgtgccgcatcacggccacgtcgataacatcccggccgactgggcggtagagatgacctgtacgctaggtcgcgatggcgccaaaccgacgccgcgcatcacgcatttcgatgagaaggtgctgggactgatttacaccattaaaggctttgaagtcgcggccagcgaagcggcaatcagcggtaaactggatgacgtgctgctggcgcttaacctgagcccgctgatccactccgatcgcgacgccgagaagctggcgcgtgagatgatcctcgcgcacgagcagtggctgccaaactttgcggcgactatcgaaaaactgaaacagtaa

SEQ ID NO: 205547 - DNA, 162 bp, Klebsiella oxytoca
atgttcgtctatcagcacaaaggcaacgtacttacctcgcagagcccagacgtcgcgaaaaccatccattttgacggcgtgttcaggcggcgcaggttccactcgaggcacgtagctaatgacctgacgattttgttggcgaagtggtttcatcacaaatag

SEQ ID NO: 205548 - DNA, 198 bp, Klebsiella oxytoca; identical to SEQ ID NO: 123805

SEQ ID NO: 205549 - DNA, 240 bp, Klebsiella oxytoca; identical to SEQ ID NO: 123806

SEQ ID NO: 205550 - DNA, 1110 bp, Klebsiella oxytoca; identical to SEQ ID NO: 123807

SEQ ID NO: 205551 - DNA, 3135 bp, Klebsiella oxytoca
atggaatttttctatgtagttaaggctacgcagaaatccggcaaagaagacgcagtgatttggttcactgcgaaatcagaagcccgtgccaacctgcagctcgatgttgagctcgaagatgccggtattgaaaccggacgcggtaaggattacgccaaaccggttcgcaccgatttcccggtgtataacgacctcccgaaagaaagcaccgtggattacacatggtgcaagcgctacgcactccaggacgatggacgcacctggctgccaaaggctggtgctgagtcggctggacccgtggacagaactgccgcaccggaaactaccgtaaaagtcgaaactaccgtcgatagtgtcccggttgaaaaccgcactccagcagttcgttatgccgtccacctgaccagcgacaaataccattcacatatcactaaagagcagcaactggctgccagcgaaatgtcactggatgaaggaaacacctatctccagaacctgctgctggcgaagaacgacatccctgaagttgccgaactcagcctgaacgctgagtggaaattggttcaggcgattaagcaggtcttcgtgccagatgaagcgcacgaaactgagattatcgctgcattcatggctgactgggcgagagcagatgccggcgaccgcaatcagttagttgaagagtggagaagcggaaagctttctcttctcaaatcagaaagcaccagcgacaccgatgtgacaaccggtcaggatccagaacctgcaaacggtcttcagattgacgagaatgatgacgaaaccactcgttatccagtcgttcgtatgcccttccgcaagcagctactcgcccagtttaccgccgacgaactgcgccaccacttaacccgcgaagaatacgaaggtatcagcgcgctggagatggacactgacaacagctatgtccagaaccttctgctggcggcagaaaactgcgaagaggttaaggcttacgataccaaagacctttggcggtataccgacgccattcgcaaagtgttcagccaggaaaagcgtcacgaactcgctttagttctccgtttcacccgaatctgggcggcgactgattatattgaccgcggcattctcgttcgcgaatgggcagccggaaacctcatcagcagcgtgcaacgtactgattcaggcactaacgctgatggcggctatattactgaccgcggcgaaggtgcgcatcacacattggacactctcgatcttgagattgcctgtgccctactgcctatggacttccatcacttcgaaattccttcgagcgtgttacgacgcgccaaagaaatcgtggccaagaaagaagagccatggaagtcatggagcgcaatcttacgcaatcaaccaggcatactggcggtgaaccgtgcggcaatcttcaatctgatccgcatcgcaccagaaaacattcatcacacgccagcggctcatcttgagtttgtgaataaaaccatgacggctgagtttaactctgctgtggagttgctgccgctgtctactccggctgttgagaccgaagcacctgttgaacaaccgcaggttgaaaatctcggcagcgccatgttctccatcgatggcctgatgggaggaaataccgccccggtcatcgatatcccctcaaatgaagtcaaaaaaacggaaaacacagcggagaccaccagcgatgtgcagatggaaacggctaagccaaagaaagtcgaaaatactgatccggtacaaccaggcgaaggcgctgatgcagctaatacgcaagcagttaccgtagcgccggaagagcagcagtcagagccagtaatcgaatacccggcttacttcgagccaggccgctacgaaggcctgccgaatgacgtttaccacgcagcgaacgggctcagcagcacgcagattaaagatgctcgcgtcagccttatgtacttcaatgtacgccacgttgccaaaaccatttcccagcatgataacccggctttcatttttggtcgcgccacacacagttttgtgctggaaccagaaaaattttctgataactacgttctgccagaaaaaatgccggaagacgtggtatccacgacaggagagatggttgcgatcatcaaagaatacaacgcaacgctgcctgctttaatgaccccggatgaacttaaggcatggattgaagaatacaacggcaacctcacgcctccgctttcactgagtgcaggtgccgaggagaccgctaattcatacatgtctctgccggaagaatttcagcggataccagcggaaacaaaaccaaccgctacagcaatgaaagcatgtatcaaagaatacaatgccagcctgaaaccgatgcttaaaaccagcggcactcgtgatcagttgctggatcagatagcaactgtagcacctgagttcgctgaacaggagcgcgcaaagtttatcccttacaacgtcagcggcactaaagagcaactgtccgaaatcgttcgcacgatccgccctgacgtagtctttgccgacgactggcatgcacagcaggaagcggcaaatgcaggtaaagagacgataagcgttgagatgtacgagctgataaaaaatatcaatgatgctcttcagtccaataacgatgccagccgcctgttaaaccatccagccaggcagtctgaggtcagttatttcgggttcgatgaagagaccgggcttgaggtgcgcgttcgtcctgacatagagatccgcctcccgtacgaaagcatctgcgctgacctgaaaacggtaagtcttgggtatgtgcgccaggacaaactgaaagaccgacttcatcgtgaaattatcgaccgcgattaccacctaagcgcagcgatgtattgcgatgttgcaggattggataaattcacctggatcttcgtgaacaaagaccccggttaccattgggtagctgtggtggatgcttcccccatgctgctggagctgggtcgcaaagaataccgccgggcactgcgccagattgaagaagccatggagacaggctactggcctgcaccaatcactgaagcctacaccgacgatctgaatgattatgacactcgtcgtcttgaagcactggatgcggaataa

SEQ ID NO: 205552 - DNA, 774 bp, Klebsiella oxytoca
atgaaccaagagtgcagagccctccctggcaccatccggcttagttattctgaaggaggggatggcaaatcgataagtgtgtcaatcccagagtctgatcgcgataccttcatgctagttgctcagcaggtgtctaacctaacaggaaacaatgatgtaaagaaattggggggagacggcaaatctagtgtaaactcttcggatgaaccattttacgttgaagtgccactggatgatgttgttttgttacagggaaaagaagactctcacgaggaggcaaccatcatgcctgaaatgagccgtgaagaacttcaggcgcacttagataaaaacaaggctgaggtttctgccttagcgtctgacttacgtagcgaaatggagaaatggagcaaggataactctgaaaaaatttcgcaactcactatttctatcaatgccttaatggcaaatatagaaggcaaagctgaagcgaccaacggccgccttgagggagttcaaggacagatgaatggtatgaatactgctattagtggtgtgaatacagcaatatctggcattcagtcaggcctgtcgacgaaattaactatatttggcgtgattatcaccgtagtgattgcactagttgggtttggagccagcctaatctcaagctcttccagtaaagctcaacctgaagcggctcagacgcaaccaataataattcaagttcctcaaagcgccacaaccaccatgcctaacccgccccctgcttcatcattaaagccaaatcattag

SEQ ID NO: 205553 - DNA, 294 bp, Klebsiella oxytoca
atggctgacaaacttgaaaaattaccaagagctgagacttttcaagaacatagcgctgactttgggaatattgtacctcaaacagtaaataaggacattgccactatcctatttatgataaccaggcctattccggctataaaaagtgttcgtgatgagaacaaaggaactgtaacagttgaagtcgccgtagagacagaacttcagcattcgtgttctgtgaatattcacatagaccaacttgctgcactcaagaataatatagaagagtttttagccaatcataacgcatag

SEQ ID NO: 205554 - DNA, 468 bp, Klebsiella oxytoca
atgagcaaagtaaagcatcaatttactattgagtcaatacacgcatgcctaccaagaggtaaagctattgtttacaatccacgaatgaacaaaaaagatcccaaccagagtcttatctccaggctgactgaattgaacggcaaaggcttctctaaaacagagatggccaaagtagctaatgtcagtaagcaagcagtaaccgggtggtttcgaaccggtaagatcagcaaagagtcagccctagcaattgctgacgcagctggcgtgtcggtgccctggctgctcggtgaagatgtgggtgaaaaagatggtcttaagccggacgaacagcgtcttctggagctctatcgacaactgcctgaggaagagcaagaaaacatgctccgcatctttgcgcttcgcctgaaagagctggatgagctgtacgagaagtatatgaaagggcgtattagaagtaataatgactaa

SEQ ID NO: 205555 - DNA, 219 bp, Klebsiella oxytoca
atgactggtattgaaaacgcaattcgccgttcaggttcagcccgcgcactgggtgcgctgattggtgtatcaaaaatggccgtttcgttgtggcgccgtaaaggtgtccctgctgaacgagtacttccagtgtttgaagtaacaggtgtaactcctcacgaactacgcccagatctctacccgaaccccactgatggtttacctaaacaggagctttaa

SEQ ID NO: 205556 - DNA, 552 bp, Klebsiella oxytoca
atgcatactgtttcatttcaacagagtagcagagcttcctctaatccaatgatattcccgtgtcatcaaagcgaatcggcagcgcagggtattgctcatcgagatatttgttctgcagtccgggcgtgggcggcagcagaagggcgcgtagcagtagcacttcaaatccaggaagcggcggaagaacttcaacttgatggcgtggatttgtcaggccaggcagatgtctggaacgtgaagctgttccgatggctggacaacaaagaagactccgcatcgtaccgaaagaacgtcgaacagctggtgcccgcgatcatgtctgtattaccgattcgatatcgcgaccgtgtagtaaagaacgactcgttcgcttatcgcatggccaggttggaaaaggaagtgagtgaggcgaagcaagctctgatgctcgatgcaccgaagaaggaaaagctgaaggagttaggcgaggggatttttgagatattccgtgtcgatccggaccttactgcgccgctgctggcgatggtgacaaccatgctgggggcaatgtga

SEQ ID NO: 205557 - DNA, 411 bp, Klebsiella oxytoca
atgactatcacattacaggcagtaaacgagctcatcgcctccctggagtctgcaggcgagctgtcgatcagagagcagaagttcctgaagctggctaaagcgtaccagcagctggcggcggagaatgtggcgctgaagagagttccggaaacagacagcgtagcaatgttgctggctctggattcgttccgcagcgagttattaccggatgtaggtttgcaaaaggcgtttgaaagcttgatgtatcaccggatgacccccgccaccgatgcctacctggccgggattaaggctgatgccattgatgaagccgcggcagagctcgaccgggtcgacactgtggcaagtaccagagtaatcgggttcaaactccgtgagttttcccagcagctgcgcgagggggccaaatga

SEQ ID NO: 205558 - DNA, 333 bp, Klebsiella oxytoca
atggatacgtacatccaaatgaaactgattctgaaccctgccaaccggcggggttttgcttttctgggggaagcgatgcagcagccatatttttttaatccgggcatgaccactcaacagcttgaagactggcttgggcaacagaaaatctatcttgcccacttcaaccgtctgatagcagaaaaagccgctcttgaggagcggctgagtcagatctctgcggagattgggcgagtcgctactggtagctttgaaggaatactgagttttccctgggatcccagtcctcttgtggaaaatcctcaacaggatagtggccagtcggcagattga

SEQ ID NO: 205559 - DNA, 474 bp, Klebsiella oxytoca
atgattaaaacatcaactggtgaaaatatgagtaagtactcagaccttttacaggtaatcaagtcccgggtttgtcaaaataacaacttcccccaaacattactggcagactcacacagttacagagccaggcaggtttggtatcgaataggacaaatattcactcttgaatgtattctcgatgagtacaggaaacatttttcatcggattattattatcttgataacgataaggctcttcatcaccttatcttcgaaatgaccaagtggaaacctgaagagattagaagactctcgctaaacgactgtctctttatcattgccagtcaactaaagcccagttatatgtcagaagatgctgccgctgtcctggcgtcactcaatctgccgactggccactatcctgttgaggattttccacaagaggactgggatcccagggaaaactcagtattccttcaaagctaccagtag

SEQ ID NO: 205560 - DNA, 252 bp, Klebsiella oxytoca
atggaatattcaaagttattttctactcttaccttcgttagttctgtcggagagcaatataagtatgagatttaccaggaacgtcaggactccagtttttacgcagtgatttctgctaaacaggaaatcgacactgaaaagtacggtcgttctgaatgctgggttgaaatcgagagccgtatacgcttacagccttctaatccgatggcttgcgaagaagaatgcaaagctcatttcctgaatagtttctaa

SEQ ID NO: 205561 - DNA, 423 bp, Klebsiella oxytoca
atgcttcaatctctgaaccacttaacgcttgccgtcagtaatttgcaaagcagcctgaccttctggcgcgatttgttggggttgcagctacatgctgagtgggatactggcgcttatcttacctgtggtgacctttggctctgtctttcttatgacgtatctcgtaactacgtagccccgcaggaaagtgactatacccactacgcattcagcatcgcgtcagaggattttgagccgttctcgtataagctgaaacaggcgggagtgactgtctggaaagacaaaaaaagcgaagggcaatctttctattttcttgacccggatggccataagctggagctacatgtgggagatttagcatcccgactggcgcaatgccgagagaagccttactctggaatgcgtttcggatctggaaaataa

SEQ ID NO: 205562 - DNA, 2118 bp, Klebsiella oxytoca
gtgtctcgattgactgatttaattgcaagagccagaattaaagattcagctttaggagaagaacttgaaaaagagtttaaagctctttcactacgaagagcatttggtcttaattttgaacgtcataaacctgaaagtattgaattgccaggacgacctgttcgtaagggcgacaaagtaaggatattaccacctcggggaagtcacaaaaaaggagatcaatcattatggaaagttattaagattagcaaagttaatggcgccaggattgctgaattagttaagattggtgtagaaacccctgagacaaaagatatgatggtagatgaccttgtagttgtcgccgaatttcgagattacatctatccaggtttagttagtacaggtaaggttgaaagaggtggaaacaaaccttttcatactgtaataaatggggaaaacttccatgcattagaggccttaacctatacgcataggggtaaaattgacgctatatatatagatcccccatataattcaggagcaaaagactggaagtacaataatgattacgttgaagcagaagatatctatcgccactcaaaatggttggcgatgattgaacgaagattgctcattgcaaaggaattattgaatcccgagaattcagttctgattgtatcaattgatgaaaaagaatatcttcgcttagggttgcttatcgaacaaatatttaatggtgaaaaagtacaaatggtctcatctgctataaatgcaacagggaccattcgagtaaacgaattcaccagaattaatgaatatatattttttgtacttttaggtgatgcaaaaatagagccagaacttgttaatgaagcaaatagtgaagtaccatggaatcttttacaacgtcgtgagatgccttcgagacgtggaggaccaaaacctggtccagatcaattctatcccatatatatagatactaaaaagcataaaatacataaaattggtgacccattacctctaggcgttgataaatcagcagctccagaaatagaaggatgcttaactctttttcctatgaaacccgatggaacagaaatgacttgggggttaaacccgggaagtcttcaaacactacttgatcggggctttgtaaaagttacagctaacaaacggaaaggaagccaaggctatagcgtctattatttaacaagtggtaaggtaaaagctcttgaccaagggcaagcagtgattcgaaacagaaatccagatggttcagttaacgctttttatgtcgaagggcaaaaagcaattcccacaactatgtggttgcgagaaagccataatgctcaatctcatggtacgaaactgctatcaaaattcttacctgatagaaagtttccttatccaaaatcactctatgcggtagaggatgctctgaggttcttcgtaaaaaacaatccaaatgcgataatattagatttttttgcaggctcgggtactactgctcacgcaataatgcgtctgaatcgacaagataatggcaataggcaatcaatctcagttactaataatgaagtttctgcagatgaacagttacagttgagaaacgcaaaacttcggcctggagataaagagtgggagatgttaggtatatgtgaatatataactaaacccagaattcaagcttcaatcacgggaaaaacacctgaaggaacgaatgttaagggtgaatacaaattttatgacggattccctatggaagttggttttgaggaaaatgctgaattcttcacactaacctatgaaacacctgttgcagttcaacataacatcgcttttgaacgtatagctccattactttggatgcgtgcaggttctcaaggacgacgaatcgagaaaataccaaatcaaggatgggatgtggttgaaaactatggtgtactcgtagatctcgatcaatcgacaacgttctgtaaggcgctaaaagataataaaggtacacgtatcgcctatatagtaacagatgatgatcgtcgttttcaggcagtagctcgctatttaccagattcagttgagcctgttcgtttatatgaatcttatttgtctaattttcgtttttctatgggccgttaa

SEQ ID NO: 205563 - DNA, 2583 bp, Klebsiella oxytoca
atgaagtttacacttaaagattatcaagaagatgccgtcagagacgttcttatcaatttaaggaaagcatctaagcgttggcttgatgatggtgacaaacatgctttctcactaactgcaactactggtgccggtaaaactgtcatggcagcagctgtgttcgaagctctattttatggtgatgataacttcgatttcgaaccagatcctggtgctgtagtcatttggttcagtgatgatccttcattgaatgagcaatccaaatttagattattggaagcttcggacaagatttcccacaatgatcttattgtagtacaaaatacatttaaccgtgaatcatttaagccagggaaaatatattttctcaacactcagaaacttagtaaaaatagcttgttggttcgaggttctgaaatagacgaagacggttatgacaaaactggtcataaagctatgcctgaccttcgtgattttacaatttgggatacaattcaaaatacaataaatgatccttcattaagtttaattttattgctggatgaagctcacagaggaatggggtctggatcaaaactaggtgagaaaactacaattgtaaaacgattaattaatggaactgaatctgtatccggaattccagttgtatggggaatatctgcaaccgtagagcgattcaattatgctgtagcagatatgcaaggacgagccactttaccaaacgtagttgttgattccgcgaaagtacaagcctcagggttgctcaaagataccatcattctcgatgtaccaactgagacaggtcaatttgacactgttttagttcgtcgagggacagataaattaaaagatatttcatctgcttgggcagcttatcaccaagagcaaggtgatgcggaagaagttattccactcatggtattacaagtacctaacacaccagaccataatgagattggtcgagcattagatacgatctatgaacgctggccggaaatgccagatgatgcaattgctcacgtgttcggtgaacataccccccaaacattcggacgatacaatgtccctcacatctccccagaaagagtgcaagactctaaatgggtacgcgtattgatagccaaagatgctattagtactggttgggactgcccacgggctgaagtcatggtgtcgtttcgtcccgcaaaagacaaaacacatattactcaactactcggacgcatggtaaggacgcctttggcacgacggattcctggtaatgatcgtttgaactcagtggattgtttattgcctttttttgatgaaaattcagtaaaggaagtagctgattatctgatgacgggaaatgatggtggcgataaacttcaaggccgcaggattcttgttaatcccgaagaaatgcttcccaatcaattagttcctgagacggtttgggaaaaaatgctttccctcccctctcagacaatgcctaaaaaacaatcaaaaccaatcaagcgattaacttcgctggcacatgaacttgcgtttgatgaaattttgcccaatgctggcgcattagcccacgctgaaatgcataaagtattaaatgcagcacgccagcgttacaaagatcaaattatagaagcaagacaatcagtccttacagttgaaggtcgaacactgaacgcaaatctgattgataaaaaaacgtctttcgatgagtttttagaagcagctgattattctgttatagatgatgcctatcgtcgagcctgcagagctattagccctgatcttgcaaattcatatagtgaatttctggcaaaaacagaatttgatacagacgattatgaagaagcgttaatggatgctcatgcaacggtcgctgcactcggacttgttccagaaatacaaggatatttagaatctgaagcagataaattagcaaaaagatggctaacgcattatagaataaccattaaagggctatctgatgaacggcaagatatataccgtgaaattcgtgaaatgagtacagagcctatggatgttgatcttgccagacctacgtcatggatgcagccaaccactattagagaaatggatagttctgaaaaagcattaccaacgtatgaaaagcatatgttgtgtaattcagcaggtttgtttccagatgatttcaatgtatgggaaaaggatgttcttagtattgaactaagtcgtgctgactcaattgcatggtatcgcaatcctgctcgtgcaagccaagattcattgggagttacctatgaagatgctggtacgataaaaatgatgcgccctgactttattttctttgcacagttgactgatggcacaattgtagcagatattgttgatcctcacggcactcaatttagtgattcaattcctaaattaaaaggattagttcaatatgctgagaaatcaggagagttttatcgtcgaattgatgctatagcgaaagttggtgatgattacaaggttcttgatcttaaagaatcgaaagttcgtaaagctatcacatcggcaacgtcagttgtcgaattatacagtagtgatattgccacaaattacatataa

SEQ ID NO: 205564 - DNA, 1065 bp, Klebsiella oxytoca
atgaaagtaaattttgatagttattcatattatcctgcattaagaactcgtgcagctgagatccttggcttgagtaagcttgctcatgataagaaagagaaaatacttccacttataaccttagggaaatggccccgctcagatgaaattcaagtttctcttgataagagtttggaggcaatggataacttgccttttattctggacgtgactcaagagaacaagcatcattgcgcatcaagctttgatcttctatcttccgaaaataatttttcaaactggatagctttctgctctaagaatgagaatgttatccccgtagttcaaatgcctgaatctgcaagattaagagatatagtacagcaagcaagaatacttgaagaaaataaaggttccattgcatttcgcataaagaacctcaacactgatataaataaaacaatagcatcacttgtgtctctcgattctcctgaaaatgcggttatattcatagatttgggctacattcgtggacatgtctcggcaatgacgtctgctgccataagtgcaataaaccaaataaggacagaaattcctgaagctataattagtgtactatcgactagtttcccaagttcggtcgcaaactttgcaggagaaaatggtcaatctggttatattgacattatggaaagagaattccaccaaactattggaggtcgaggggtatctatatacggagatcatagttcaattcactctgtcgtatatgatgatgttggtgggcgttatgtcccaagaattgatattgcattagatgatgcatggttttttgagagaagaccagggcttgatagtaaaggctatatagaagcagcaagagcgattcttaaaagatatcctaattatcttgaagaagaatcttggggtgcgctgatgattaaaaatgctgcatcaggcgatattgctggtatggggagtcccgctaaatggatttctgtgcgcgtgaaccttcatataacaaagcaaattgagctatcagaagcacttaaaacagattacgatcctgaagaggatttcttctaa

SEQ ID NO: 205565 - DNA, 795 bp, Klebsiella oxytoca
atgtcagttttattaagagagcaagatgtaaaagtcgcatttattgactggctttttagaaaaggtttgttagacaacgcaaccattattaatgaaatggttgtagcgaattggagtcgccgcgctgatctggccgttgcgaatggacacttgcaagcttttgaaataaaaagtgattttgattctcttaaaagattggatggtcagttagaaacctttacatctcgttttgaaaaggtaactgttgtttgtgcgccaaaatttacttatgaaattgcgaagaaagtaacatcagatgttggtgttattgaatatataaacactagtaaaggtgttcgttttaaaatagttcaacgtgggcgtacggcagttctcggtaataagaaagtttatattaatttcttacttaaaaaagagttgcaattacttcttgttgaaaacgggaaaaagtttttacttgagtctggtcgtgaggctttagagcgtattgctgaacaaattcccctttctagaattagagacttcgcgcttaaagcaattaagcaacgctataaagaaacttctgatgattacttgaagaaattagcaggtagcgaattatcgaatgctaacgatttgattttattaagtaaatcaaaaaagagacggaaaaataatcactttaaagattatgaagataatgctaatgaaaaatctgatgatttttatacagttgatattgaggagtttatgagaaagcacggagaggttgggagtatcactcccatcaaagttttgaaaagggttgtgcgataa

SEQ ID NO: 205566 - DNA, 330 bp, Klebsiella oxytoca
atggccgtatcttaccatgtgaaaaattttcatatcgctgaaactactgatcctgacaaaatcaagcgcgttcacttagatgctcatttcatcaactccaacgagcaagaagtttttaaggattattggctcgttgaggttgttgggattggttctacatacaccaatgcaaatataatcaatattataagcacaggctttcactacgccatttctaacaaagataaggtgaaagtatctgtggataaagaccatacctatctctatttttaccttccttccgatgatggtgaaaaaatgttcaagttcactggtaaggagaataaataa

SEQ ID NO: 205567 - DNA, 213 bp, Klebsiella oxytoca
atgagattaaatttattaggtgttgggaacatccctttactatctgcccgtatcaaaacgttggacgatgcagaggggttgctgaacgtctccgcgctcgccagagcgttgggcgtacaccgcagcacctttttatcacgcgtagcgactcatggccttgaggccgcgatattgtactacgcgaccgaacagaaattgaaagatgtaatctga

SEQ ID NO: 205568 - DNA, 543 bp, Klebsiella oxytoca
atgactgatgagaagcgtaacagcctgacggctgaccagaatacagaccaaaacgaaccagaacaaaaaccagacctgacccttctctacaaacggcgttgccgctccgatgatattatccagaaagccaagcaccttttaattgctggctactctccaggccgcgtagcttgcctgctgcgtttgccgctggagcgtgtccaggaactctacgacaactcgtataacccaagatgtcgcagatttgccaaacagaacgaacacaccaatgcccgcttggcgctgacctcatttaacgagggtgagacgctcgccgatatcgcagcggggctgggattgtccctgtactgggtggtgatgtccctccggcagaatggcgttgctgaatccgcgatcaattcacgtctgccgccagcagatgacccgctctatgtggagtatcggaaagtctgtgagcggaaggcatcgagccgttttaaaccgatccagataaacccggtgagacgcgttagaaaagccgcaggcacgacagctaaagcctga

SEQ ID NO: 205569 - DNA, 936 bp, Klebsiella oxytoca
gtgaccacagagacagaaaaatacatcacggtttttaaacgcctccagtatgcaacgcacattgtgcgccgtgataccggggaggagataaaaaaccgcatcgaagtcgccagcttctacggctacatgcgtgatcagtacacgagctactccgcaaaggacttggagttcttcgagtcgatggagagcatgggactgaaatttcagaatactgatcgccggacagttaaaaaatggctggatgtgttaaacgctatcgggctggttatttcagacaagagggggaaggatgagcgcggctatgatcgctattaccacacagtgattcccctggaggagatcgcggacaacctacttttctacggttcagcatcaatcagcggtgggctactggctgagggaatgttgatccgctcgttggagaagaagaagccacgcgggaaaccgaaacaaaaatccggggataaacagggagatgggaattgtcataaagagggcgcagaggccgcaaaaacgcaggcagcaaccgctgatcagagtgttaacctggcccctgagcctgctctggatgattctgaacagcgctctggcgtggaatctgaccgtgagcacggcagcgattctggcaccgatgatactgatgcggtgaagccgcaggagccgaagatctttgatgagcacggcgtcattactgaggcgtttattaacagcctgactggtgatgtggctcctaaccgcaacgctgacggcacattgcagagtttccgttacgtctattgggtggctcgtcacacacaggatgcgcttgacggaatttcgactcgtaccaaagatgaatacatggcagaggcccgcgagtggcatattccgtcgcacctgttatcgacaccgacaacagagccggaatacgaagaagatcctaattttttaacgtga

SEQ ID NO: 205570 - DNA, 201 bp, Klebsiella oxytoca
atgaatatctcattcccggatgagacgtaccgaacgttgctgaaagaagctaatcgccgcgacgtgccgatggcgagattgtgtagtgaattgctgcaaaaagcagcaaagatcatcgaaaagacaaattcagataaccaaacagataaccagcgagggaatagtgaccacagagacagaaaaatacatcacggtttttaa

SEQ ID NO: 205571 - DNA, 570 bp, Klebsiella oxytoca
atgggctggtcttcgttggtgaggataaccgttggcacatttctgttagctgggttgtcgttctctgcatacgcaaagaactgcaagaaagggattccatgtggaaactcatgtattgcagcatggaaaacatgtggtggaagttctcgctcctcttcggcttataatagccatttatactcttatccttcatcttcgcttcaaagttcaactccaaagtcaacggttcacacatcatcgaagaaagtagacggaaaaactacaccttcgaccaccaaaacttatctttgccagtatgctattgccgcaatacagaatggtagaatgggcgcattacgtgttatggggaatgctgaggtcacgatgtatttagatagcttcaaagctaaccgtttaaacggtacatacctcatctcaccaaagctggaaactaaaggcaagttgatgacggccgatgataaaagcaaagtgtatgcttatgattcgtggttgatgaactttgcaattagcgaccgtatagcaagaagcacagagcaatgggatcattgtaagctggttcataataaataa

SEQ ID NO: 205572 - DNA, 690 bp, Klebsiella oxytoca
atgaaacataagggcgcatatagcacaggagtgcagcgcggtgggtctgacgactggatgtcgccgcgtggtctattccgcaatttagatcgtgagtttcgttttacattagacgcagcagccagcgctgagaatgcgttgtgtgctcgattctggacggtagaggatgacgcattaacgcaggattggtcacaggaaaaatctgtttggtgcaatcctccatattcccagatcccagcgttcttggttaatgctcaaaaagcggagacaactgtgtttctggtgccaacgagaatgcaggcgttatggtggatgcgtttggtcttgattaatccacactgccatgaaatccgtcacctgctgagaaatccccgttttgttgctactgaggagatcagagcgcagcaggtacaacctggcaaccgttccccgcaggcttgctgtgttttggtattccgtaatgcaccgcgcaacggtgaaatccgtcagactctgatttgtgctgatactgcccttactcttcatgtgatcgctcgcggcggtattcctggtaggccgactgtttacgatgctgaaactttggaagcgatgctccagctttataaagagaagaaaaaaccgcgagaaattgctcaaaaaacgaacatgtcattgcgcagtgtttacagggttattgagaggttagagtaa

SEQ ID NO: 205573 - DNA, 507 bp, Klebsiella oxytoca
atgctgattaactggctgccgatgctgttagtcggccagggattcagcgccagcgaggcggcgggggtgatgtttgtcctgcagtttggtgccgcctgcggcacgctgctgctgggggcgctgatggataaactcagcccgctatggatgtcgctgctgatctacagcggtatgctggcgtcgctgctggcgctgggcaccgcgacctcgctcgccgcgatgctcttttccggcttcgtcgccgggctgtttgccaccggcgggcagagcgtgctttacgcgctggctccgctgttctatcgcaccgaaattcgcgccaccggcgtggggacggcggtggcgatcggtcgtctcggcgcgatgagcggcccgctgctggcgggcaaaatgctggcgttgggcaccggcacggttggcgtgatggcagcttccgcgcccggcattttgctggcaggcgtggcggtgttctggctgatgaaccgccaaaagcgcgccgcgctggcctga

SEQ ID NO: 205574 - DNA, 3852 bp, Klebsiella oxytoca
gtggcaatctttgaaattgaaaaagacgaattacttcgactctccgatacgcagctagaagagctgatcgctcggctagcagaagctgaagtggcaatgcacggccatagcccagcatgtgtaaattggtctggttcaattacagcccctgatggtggagttgatatccatgttcaggtcccagttgatcaagtgaaggctggctttcttgtaaggtctgatacggtctttcaggcaaagaaacctaagatgccaaaggcttcaattgagaaggagatgggtactggcaaagctctttcatccatcatctctgaacaagccagaaagcaaggcagttacatcattgtcagcctgggtgatgattgctcgccgtcaggaaagaaggatcgtctcaaagcgatgagagatgcagtaaaagatgatcctaacgaaagttatcttcatcttgatttctacgaccgctccaaactcatccaatggttgcgccaacatccatcagtcatgctgtgggtaaaagcaaagcttgggcaagggtattccggttggcaaccctacggagcctggagcaatccaccacaaggtgttacagacactttaatctcagccccaggcgtaaccattactttaccatcgggaaaggggcaaaaactcaaaattgatgaagcaattaacccaatgcgagcactgatccgttcgacaaataaggctgttcgtattacaggattgtctggtgttgggaagactcgaatcgttcaggcgctctttgatgaaactgttggaacagatgcgcttgaccggacagtagctatttatgttgatactggctatgagccagtaccgtcggctacagcaatgcttgataacctactcgctgaaggccgacgagcaattatgatccttgataattgcccatcagaactccatgcttcgcttgccagcaaagtatcagccgcagggaaagaagtaagtctcatcacgatcgagtacgacattagggatgacaaaccacagacaactgaggtcatccacattgagacagatggtccagaggtggcagagcaacttcttatccgtcgcttcccttctattggtcagaataatgcccgtcggattgcagagttcgcagatgggaatgcaagagtggctttggctatagcggaaagagttgaggaaggtgagagtttagccctactttcagatgcgcagttgtttaatcgcttgtttgaacaacgtaatcatcccgacggccatttacgcgagcaagctgaaatattgtcactggtgtattcgttctcgatatctagtccagatgcagctaccgatgaactggaaatattgagtgcgctctctgggtatcccaaaatccagttattcaaaactgttacgaagttgatggaacgtcacgttgttcagaaaagatcccactggagagccatccttccccatgccattgctaacaagttggcagcatctgcacttaatagtattccgattgatcaacttagaatgacctttgaagctccggatcgacaacgattattgatgtcgttcgcgcacaggttggggctattgcacagccatgctgtggctaaagagattgttgaagcttggttacagcccgaagggctgcttggaaaaataatagacctagatgatgtatcgacacgcattctgaattatgtcgctccagttgccccgggagctttgcttgagcggattgaagaaacacttgttacgtctaattttgagcattttaaatcacgctacaacccacaacgaacagcaattatcaaattgttgcagttacttgcatatgaatcgaaatactttgaacgatgcattaagctcttaatccgtatcgcagatcaggaaagcgcgagcaataattatgattcggctcgaaataagataaagaggtttttccaaccttatctatccggtacccatgcctctttagaacaacgtgttgcggtcatgaatgaatgcattggttcaagtatggccggacgtagaaggctggggctcgaaatgcttgaaactgctctcggcggaccaccgtggacaggattcgggattaatgagtttggtgctcggccaagagattatggatttcgacccagctacgatgagcttgttgagtggctaatcaccttcatcgacattgtggtgagattaggaacttcaagagttcccgaacttgaagacgatgctcggctgatcttagctaataaatttcgctggatttggcgtcaggaaggaatgaggtcaaaattaattgatgcgactcgcaaattacatgcccatcatccttggggtgaaggctggaaagcggtccgctcaacaatttacttttcccataccaaaagaaatgacaacgaagatttagatcctttgccggaaggacttgtgacattggaacgagaattggagcctaatgacttggttccggcagttatggcttatgtactcagtaaggggcgtgatttttgggcgctgaatgccgattttgagcgtgaggggcctaacaaattcataaaaataaaggaaatacttaacgcaaaagcgttccagttagggcaagactttgcagtatccacgcatgaacttgatgagttaggccctaatttattcttacgagatgggatgccctatcgcgtcgaattcggtaaaggcttagctaaaggagcacctgacctacgagtttattggcagaaacttatcactcaaatgaatctacagcataaatctcaaagtgatttttctgttattcgaggtttcatagaagagacgaattctatcgataaagcattagcgcaggaactgctcgatcagtgcgcacaacattccgaacttcgattcgaattagtcaacctacatccttggcaggagtttactgaaatcgatctggatcgttgcatgtcgcttctggatgactctgacatacggccccatatgtatggggcaattctgtggggtgaacaattctctaatttgccagaaagcagggttctcgagcttgctcaaaggctgctgagtaaaccgaatggtgatgaagtagtattggaagcattgagtatgaaactacctgataaaggagatgctacggatacactaggtcttgcgctaagaacaatcggactatccgctgcaatccagaggttccaaagagaccacaacgatctcggcggatatctggattatgcaatggaacgtgttatcgatgccacattgcgcttcgatggcaacgaggctgaaaagctagaatggctgaatacaatcttcgctgttgttgatgagcattttggctacattttttctttcgaagacgctatcggtatcaccactgcatggatgccaaaagaatttctcagtcgcatttttgatggtacggaggatcaacaacagaggcggctgcatttcatcaatcatgatgattcacatcagtctcctattgcgaaaatcaatgtagatattttgattgaatggtgcgggaccactaaagaccctcaggtttgggcttcagtcgcttcaggtattaatctatggtcaaaagacggggagcaaagtcctatttgcttgcaggatgatgctctgagatttctagaagcctcacccgagccacgagccgtccttgagatctttgccgaacacgtagcaccttcatcatggtccggtagtcgtgcgaacgtgatgcaacccagggttgaagcgataggccggttggtcacccacgagcgtgcagacatttctgagtcggctagagctgtttataaaaaactgactaactgggttgaaaaggaaaaagaacgcgagcgattggaagatgaggcattggaacaacggtttgaatga

SEQ ID NO: 205575 - DNA, 912 bp, Klebsiella oxytoca
atggaatctgcacgtgataaatataccagtgagattattgaggcagaagatctttggttacttgatgttgtagatacgaacggttacgtatgctggggatgtgggattgagatgtatccttctgcttggcaaaaaggaagtaagaaaagaccttcgtttaataaaatgcctggaaaagagcacattaattgcgatgctgatgcagaaagcacagtggttaaacaggggcagaagaaaagtgtccgccacatgttagatagcgcaccgggtttgatgcctgcaggattaaaactgattgaaaatcgacccgttgttgatcctgacactactggtagcaacaacaaacccaatccaatacgttctacaacatcggcatccagcgagggaaatgctccagcgcggcaatcccgccgcccggttaatgctattcgccagatttgtagggcatttattcgcttcccgtatgaccgtggtatgtcattaaatatccctagtattgatgccgatacttacatgaccgcgtttaaaaaacttaaagatccggttcagccttaccctgagcgccgaattttttattcacagttgttgtggcagaaatttgaacaagacgaaaaccgaattgtcattccgctctcgggagaatgggtaaaagacgaatctggtaagtttaagccctcacgtagctataaactacacattaagtggggagactggtcaaaagccaaaaagactatgcttttgaatgagcttgaaactgtacaggaagaagcaaaagaagcagtaaataaaaaagctaaagagagagctcaagtcttctttatcggcgagcaaagcactgagaatccggaaatcttctacgttaatgattaccggttaatctgcgcgattatgggatatatcacttacccttga

SEQ ID NO: 205576 - DNA, 1167 bp, Klebsiella oxytoca
atgagtaaagtgtgcaaagatcccattgcagagtggtatccccgcattatcctcaaaatcaacaatatgctgagagaagtcggaatgacgggaaagcaggctgcgatagctaagcactatctgatgggggcactggaaatttatctctctgtagatggcaaactttcttcagccatggctgagtatgctgaacagtcccattcaaatacgctttttgaagaaagaactatttatgacatgagtactcaaacggcgagaaatttcagtttcacaatgctttacactgctgcggaaaaaaatggtgtgaagggggagttcattgatagagctattgaagagttaatgaatgataaaaatctaacattatctgcgacaccctatctcattagacatcgtcttaccgaatgttgctatgcattggaatatgcagacgcccctcttgggttttatcgggagctggtaagtcttggtattatctcatgtggaaaatattctctaaatattgacacgtatgcgaaaaacgctgagtcaggggggtcgttgttgtttctcagagcatgtttgcttttcgagtttaagatactgcaacgagcggtagcggtaatattaccgctaaaaaacagcaatacgattgctttaccatctcctgacccaagaatgtctcccttagatcaaaaaaatatttctgattactataaaaggttagtagatgtctggtttatgggagaggctaggcaatcttttgtgagttttcaatgcaaaggcgatatttcgattaagcatgtagaggcttttcttggaaatataaataaatattatcttcacaaacgtatgtttagtggaacccaaggcagttggctgggaacgctgggggcattcgatattgcatgtgaacatgatgatgagcctgcaatggcaatttattcggagggtgggaatagccgctcaatctcagaaagagtaagattgaagtacttggagtacggttttagtgtatcagctcggagcctttatctccgctataaatctgtaaaaaaagaacgttactctcaagtgaagtattatcgctttcttttgctgaatcagaaattcataactccatggcaccttgataaggataattattacgaaatggccctcagttttgatagtgcggagagtgactaa

SEQ ID NO: 205577 - DNA, 216 bp, Klebsiella oxytoca
atgactaataatatccagcccatgaaaatcctacgtatgcccgatgtggtgggcaaactcggtatcgcccgcgcaaccatctacgattggcttaacccaaaatcaccacgctatgacgcaaccttcccgaaacgacgtcgtctcggcgtacagtctgtcggctgggtggagtctgagcttgataaatggctggaggaacactgcccaaaggtttaa

SEQ ID NO: 205578 - DNA, 1440 bp, Klebsiella oxytoca
atgcaactagataataattttcctgttgaccagtttccgcctgtcatcagaaacgcaatttatgaagcacagcagataacaaaagctcctatagcgcttattggcgcgtccgttctgggtgcaatgtctctggcctgtcaaaattatattgacgttattcgcccaggaaattttcatggcccagtatcactttttgtgctgactattgctgaatcaggtgagcgcaaaagcaccgttgataatttgttactaaagccattacacgagaaagaagagcaactcgaaaaaaattataatcgggagtatcaggcttattgtaaagaaaaccaaatagctgtctcagtaagaaaagccttagaaaataaacttaaatctctaattaagcggggcaaagatattgctgaggtaaaatcagaaataatggcccttcagcctccggaactacctatcagacgcaaactgacgttcaacgatgccacgcccgcagccattaaagcattcctctgcggcaactggaacgctgtgggcgttatgtccgatgaggcaggaacaatttttggtggtcacgcgctgggcgacttacctttcatcaacaaaatgtgggatggcagtagatttagcatcgaacgcaaaaatgaacccgatgcgattattagcgacgctcgtatgactttatcattgatggttcagcctgaagccttccgtgattatcttgagcgcaaaggtagcatggccaaaggcgttggcttttttgcccgatgtctgattagtcatccgacgtcaacgcagggttcgcgcctcatcacaaacccagtatcctcaaaggaacatattccagtctttcataaccggttgatgacaattgttaatgaaagcctggaatgcagtgctggcgaacgcctttgtcttaaattttcacatgaagctgaaaaacgttggatcgattattataataagaccgaaagtgatatcggttttaagggtaattacaaactgggtgacttcaaggatttcgcctcaaaagcagctgaaaatatagcacgcattgctgcattaattcattactttgatggcaatacgggagatatttctgaaagtgcaactcaatcagccatcgctattttcaactggtatagcaatgagcatatgcgtctctttgccaaagtagatactgctgaaacaccagagcaggatgcaatggaacttctagcctggattgaggttaagtttcgccagcgccgttcagtccctcttgataaaaactttattcgtcgctatggccctaacagacttagaactggagggaaaattcacatgttactggattggcttgaaagtcagagtagaataattatcttcaagaaagataataaaactttggttcaaccgaattgggcatctacccccacttatacaggtaaaaccttcagccgcttctga

SEQ ID NO: 205579 - DNA, 633 bp, Klebsiella oxytoca
atgaattcgaaatatacatacgatccgcgatacactgatggcgtagaacgaacactggcggcagcgactgatcaataccccaggctttctacatttcgttttgatttgcggtttccgactgacggtactggtcgtcgtgatgagcgtgtgatctcgcgcttctttgattcgcttaaataccatgctaatgctcagatgactacccgaaggcatgcaggacttacctgtaagaatctgacgtccattcgctatatctggtgcagagaatacggcctggtggatggcaaccgccattaccatgtgatgctgttggtaaacaaggacaccttccatacgctgggagattaccagcctcaatgcaacgatggtatagattcactggcgaatgttatccagaaagcttggtgtagtgcgctgaaattaccctgggaggcctatgcaggcctggttcattttccggaacaaccctgtggctggatagagcgtaaacgtcctgagcatgaagaccagtatgctacggcacgtcagagagcaatgtacctggcaaaagagtacacaaagcactatggagatggacgttcttttggatgcagccaacggaatccgtcagtgattggatctagccatatgtaa

SEQ ID NO: 205580 - DNA, 579 bp, Klebsiella oxytoca
atgtataccctggccgttgaaggcacggctgtcaccgattctgccactgagctggcagaaaattatctgatatcagctgaaagcaggctcgaagccgcagaggctctcgtggcctttgaatcgcttaaagcctgtggctccggttttgcctgtggtcttgccggtgatgtgttgctccccctgacggtcaccgctgatatctgctcgtcgttgtttattcagatgcggatgtgtgccgctgtcgccgtgaccggcggccatgaagtcggagatccgatggtccgcctactgtgctggggcgcaatagccggtgatgcctgcctggatgcggttaaccgggtgatcacccgtctgatggcaaaggcgctcagcctgccggaagccgagaaggcagtgttgtcagtgctgcgtcaggtgctgctcagtaaaaacagtggactgctgctaaaaactggcctgctcatccctttgttcggcggtgcgctgaacggtacggcagcctggctggtcacccgtctgacagggcagatcgccattcgcctgtttattccaccaccagcaccgccctgcgcagcataa

SEQ ID NO: 205581 - DNA, 738 bp, Klebsiella oxytoca
atggccgtttatcgcgaagatactgacctgcggttcctggggcgttgcgagaatgaggacctggatttactggtcagcctcattacccatgacccacgggataaaaccctgcgctggacggaaacgctgtccggcagtgacaactacaaacgcttttacccggcccaccgtaattactggcaagagatagtggctgaaatccagaccttcggtgccagcagtatcgccagtgtgttcagaggcggaaaaggtgtgctgtatcgggaagttttatgtgatgtctgtgaccatacaggcgtcaaatacaggaaggaggaggcaaccgaaaccattgagctctccctgctgatgaagatgctcgaaaaaagcctcagcgaaatgtcccgggctgagctgcgagagtttgctgacagcatgggcacggaactgaccgcgccaacggtaccgctggtactgatggcgatacagactgctgtccggtcttctggttttgcagcctatcgtctgtcggtcgtgatgctcagtacgcttgcgaaggtggtactggggcgcacgctacccatcgtgacttatctgaccctgacccgctctatcagtgtactggccgggccggttggtatcgccctgagcaccggttggctgattgccgatatggcaggtccggcacggcggattacggttcccgcctgtctgctggttgcttgtctgcgtcagcagtatcaatacaaatcaatgtaa

SEQ ID NO: 205582 - DNA, 687 bp, Klebsiella oxytoca
atgtctgcggaagaaaaacagcacgatcgcatggcatcacggctggcgatcatcatcagtcgcctgctgatgggtgaacggttgtcagttacggggttgtctcaggagtttcgtatctcggagcgcaccctgcgccgggattttcgtgaacgcttgagctgcctggaactgacataccggcagggttgctggtcattgacccaccagcacgaaggcctgcgcaccaaccgggatattctgcactttgcacgagtaacccgcacagagcagctattcccggcgatggataaccggctgatatcggtgctgactgacagctccgtagagccaccttttatcgtctggcagtctcctccggagcgcaagcccggtcccttcggcagtttctggcgaatcacgcaggccattctggaacgaactctgctggatctgaccgcagaggggcagcagtaccgctggttcgcaccttatcgcctgatttatttcgagaacggctggtatctggtcggtgagcatgcccggcagttacaagtctttctgctggaaagcattaccgatgtttgccttactccaaggcagtttctgtgcagaagacaggtgagcgaactgaccggtgacccacatttcattcaatctttgccgcacttccggtttgtccggagagtgctggctgaaaccgataattaa

SEQ ID NO: 205583 - DNA, 441 bp, Klebsiella oxytoca
atgaaaaaaaccgtacttgtgctgatgctactggcgtctgctcaggccagtgcagccgctaatacgtggacccgctccagtgtgcagggtgtgacggaataccggatacaaaacaaaaatggcgctgagctgttgctgacctgttcaccggaggacaatgtgttcgttctgtacacatcacccgatggcaaaactctcgccagcgatggagatgatggacgcagcgttcaggcgcagaccgacaacagcgacacgtttctgataaacgatacagtttctgatgccgggggcagtaacttcgaagccttctgggatgcagccagaaaatcccaccgtatccatataacggcgaccggactgacctcagctaccttcaccttcagcaattccgcaaagattttgcctgagtttgataaatcaggatgtctgactcgcatgtga

SEQ ID NO: 205584 - DNA, 363 bp, Klebsiella oxytoca
atgaaaacagcaatgagtatcctcgccgtggcactggtggtctcacctctgctgcacgccgcagaggctcccgtcaggattggtcttgagcaggttaagaatccgtattatccgaatttgcatcagcagcgtgttcatgttcagtcattgactgacagcgtcaccattaacgatgttgtcgttaaccggggtaattgcccgattcagaagatgcccacggtctactcaggtagtaagcctgtagcactggtaccttcaacgttgccttacgggaaagagattgccgtctacattaaaggcccatgcagtgtggcagagattaacgtcatcaccagtcagggggactggctgatgaagtactga

SEQ ID NO: 205585 - DNA, 1596 bp, Klebsiella oxytoca
atgaaaatccaaagattatctgaagctgacatactattatcagcattgtatttaaagatttccgatgacaaacaacaattaagaaaaatatcatataaaaagctatttgatttaatttttatagatgattttcgggagcaggaggacaggttattagcattgctccctgaaaatgatatttataaaatacaaggaatcatcaacacaagaaaacaacaaagatatattgatgatcgggcggcattaagattaatcaatatcataaaactcggtgcgcttgaccactatgttaattatcatattattagatcggaaagattcaaagaagacatttacttagctttaggaaaaatcaatgaatctgtgttgaataaaaataataaacgccatagcaaatcagatgatgtgtataacttcataatagagagtattttaaagaaaagagaatcatttctttccagacatgaggtggaagttctcgctgaagaagtaaaagaaacatttgataagcgtagaccatcagtgggtgactttgaaatagtaaaaaactcaacgtacagcaacattgaaataacaagtaattctattttaacagatgaaaaaacaaagctaaaaaatggatatacacctttaagcattttctggggaactaacagaaaaaattcatattataccgaagggttgtattttacaaatgaacgaaacaatagtgttgagagaagcgagcaactcagggtcggtcgctctctggtcaccgtacctgatttacataaaaaaggagaaatagaaaggccagagaaatggtggaaattctggaaaaatacaacagaaaatatcaatcagcatatagttattcactccattgacttgatggataaagatcaatggaagttatctttacagcaagaaagtactgaaaaggaaggccttttatttattcatggttataactgtagttttgatgatgccatctacagagcggctcaattaaaatttgacctaaaattttccgggttaacattctgttttagttgggcttctaaagctcaagttgaatcctatacagttgatgaagcaacaattgactggagcaccacacatctggaagagtttattgatttaattacagatgaattaaaattatcaaaattgcatattattgctcacagcatgggaaaccgagcacttgtagatgtaattaagcagtggaatggccgacaagacaaagttcatactgttgtgttcgcagccccggatgttgattctgataaaatgaaaaacacatcaaattactttaatgcatttgaaaatgtgactttatattcctctataaatgacattccagtaaatatatctacggcagtacataaataccagagagcaggtaattcaaccccaccattagttatggataacgcagatacgatagatgtcagtaaaataacaaaacccttattctctcttggccacagctactacgccgaagcttgtgaagtgtttaatgatttatattatctaattaatgaaaaaatccctgcattaaatcgaaatggtataacttataaagatgattggaaatgttttgttctttcttga

SEQ ID NO: 205586 - DNA, 471 bp, Klebsiella oxytoca
atgtcagagataaatctacctcctgatcttccggtaactgaagcacgcactattcgtcgtgctctccgcttactggaaaaatatcagcgccagcctggcgaacaatttaattccactaccttcaccaaaacctggctacaactgcggcttgccctgcaggagcgcgaagtttttcttgttttatatctcgataatcagaaccgtcttctggaatgcgagacgctctttacgggcacgattagccatactgaagtccatccacgcgaagtggtgaaactggcactgcgccataacgctgccgctgtgattctggcccataaccatccatccggagaggtagaaccgagtaagcaggatcgaaatatcactcaacatctagtgaaagcgctggcaatggtagaggtgcgggtgctggaccatcttattgttggcatcgatgtgctttcttttgctgaacgtggctggctatga

SEQ ID NO: 205587 - DNA, 222 bp, Klebsiella oxytoca
atgaaaatcatcgataaaaaagccgcgatggcgattcagcgacagcatccgaattcccggatctttcgctactgcacgggcaaataccaatggtacggcagcgccagtcattacaccggtcaggatgtcgcggaaatttccggtgtgctggcggtttatgcagaacgccgtcgtgacaaccacggtccgtatacacgcctgatgtgcattaccaccaactga

SEQ ID NO: 205588 - DNA, 324 bp, Klebsiella oxytoca
atgcaaaattcatggggactgaagcgcgacatctcgccctgcttcagtgcaaggcttgtgcaggaaggctgtcgcctgcattttctggcggaccgtgcaggtattagtggtacgtttaacgaggaggaggcactgcgtctggatcaggcatttcagctagtgatgaaacagcttgaattgatgctgacaaccggtgaactgaatccgcgccgtcagcattgcgtcacgttgtatcataacggactaacttgtgaagctgacactctcggctctcatggctatgtttacatcgttatttatcctcagacatctgcaacccagtaa

SEQ ID NO: 205589 - DNA, 324 bp, Klebsiella oxytoca
atgcacatttcatctgtaccggccacggtgccggtttcgtcacgcctgtcgcccgtaatggtgtggcagcagctgttaacgtatctgctggagcaccactacggcctgacactcaacgacacaccatttcatgacgacacggccattgaggagcatatcgatgcgggaataacgcttgccgatgctgttaatttcctggtcgaaaagtacgaactggctcgtatcgaccgcaagggatttacatggcgagagcaaccccccttcattactgcaacggatattctgcgtgccaaaaagaacatcgggctgttgcccagatcttaa

SEQ ID NO: 205590 - DNA, 1704 bp, Klebsiella oxytoca
atgccatcaaacagcatcccccattacctctacaagcgtaaccacgtatggtggttcaggaagcgtttcgtcgctcagggcaatgcaatcgaatacagactgagcctgcaaacagcaagctttcagcgtgctcgtcttcttgccctgcgtttacaaacgctttgccaacagatggttgcttctttgggggcccccaagaaactgaagaatggtgtgatggaaaaaacagcacaagagcaaatcagagcaaaacttcgagcaaaaattgccgaatggaccgccgaggaaacagaacattggttctgcggctctacacgtaatgaaggcgatctgaacgattatcttgagacattagatatggttgtctctgatttgaaagaacgcatcgcttacgatgataaaccatctctgcaccgggccgaagcaagtaccgttctggacgaactgccacacctcaaagctactctcagtgagtacgattaccaagtcattgctcgcatggtggcacaagccaaggtcaaatccttgcaggataccagagcaattattcttggtggggatgctgactggcttacaactagcccagtttcctcacaagagatgtcccactctgatgttcattttctttcagatatgatcagcaagtaccaagccgagaacgcaagcaaagagcactcacagaagagtcaggacaaatatgctcactcgctcgcactgaccttcagcttcttcggcaatgtgcccatttcggagatctcattatccagcggtagagagtttcgtgagttacttgcctcattacctgagaaactcaaagccaaagaaatgctcgaaactccactgctcgagcttatttctaagaaaaaggcgtccaaaactatcgcaacggctactgctaacgatcaccttgaaaaggtacgccgcttctttcaatggatgctagatacagggtacctgcctgaagacaatcccatacctaaagaaccactacccgagccaaagcagagcaataaagcagcgagacatgcgatttctgacgaagatgcagtaaaagtgtttaaccatcacatctttactgagcatcgaggccttgtgaccaccaaaattcaacatccacatcacttctggcttcctttgctctgcctctttacaggcattcgcccgaacgaggcatgcttactgtatgttgatgacatcgaactggtgggtaaggtgtggtgtatacgcattgataagcgttttgatgaacaaaggttaaaaacgcccaatgccttacgctatatccctctgcataagtgtctactggaaattggcttcttgagatatgtacatgatttccgcactttggtaggtggaaacagccgactattcccagagattaaggcgatcaaaggctaccactcacataaacccggagagtggtttaaccgtaacattcgcggtaagcagggcctagatccgatttcaactctttacaccttcaggcacgcttttcgcgacaagttagtaatgctgaacgcaactgatgaatacttaaaccgtttaatgggacatcaaggtagcccctacggaagctccctgttaaccgatgttacttgcatgaaggaactcattgataagattgactttgcaagcattgttcacggcattaaaccatatgcaaacttacaagacttccgtaacgtagcagggaggacgaaatga

SEQ ID NO: 205591 - DNA, 1053 bp, Klebsiella oxytoca
atgataagtctaaatcgtcattgtatgcccctagacagttcacttcggcgtcatggtatgttccgtcagacggaggacgataaatggcaagtcaatctctatatgctcttcaaaaatctgccaaaaccacggggttcgagggccatttggtataaaaccagtcaaaatatggttcaaaagctacctagagacatttttagaagagaaattcgtgagattgttgctgttctccatgacgaaattgataagaacacatggatatcggcccgttcagcacttgttttacttacttatggttccctgaatcacaaacatctacaagtaactcaatgggttgaacgatacacaggtattatccttcctcggtacaagggtctcagtcgaagagaagtagtttttgctcgcaagctccatgaattcattacccaagaactcgtcgacatcacctatggtgactatgagctggaaacgcagcatcgaatgtgcaatgggaagtactacgtcgattttgcagttaagcattactggaacggtaacgaagatagctcaaaatattacctttatctcattgaatttgacgaagaagagcacgcattggctccaaataaggtagcggattcaatcagggactttgagatcaaaaagcaagagccagaagctacgatcatcagggttaaacacgatgagagtgatgactggtttgaactagtacgtaacaacaacgggctaattagctttgaagaagctcttttatcaggtatttccgctgcaagctgtggtgttgttggcgacagaattatcattgattcaaagtccgccagaaatgcttatgacgacctaaaaaaccagagtgcttggttgctaaactatgagaaacagcctttgagagggatcgaagaagcgttaaaacgatgtggtattcactatgaaaaagcacgttcaaaaacaagcagacagctgagagtatcgctggagtcgttaagctcttcgctataccgttggtcgcctgatagcgccgccgaatacgtccttcaaaacctcaaaccagactga

SEQ ID NO: 205592 - DNA, 339 bp, Klebsiella oxytoca
atgaaatttatcccaaaaattacagtatgtgcatttctactcacagcaaccaactatgcgaacgcatcctctttcgaggataatgttgtcgagctcagttgcccaaatttgatgaatggcaccctccatctaaaccacacttgggatgacggttatctcacagctgatggtgttggcacactggccctgcaatcatatgaacagatcgacagcgaaggcgctatcctcacattcagtaatggcaatgtcagagccaaaattcttcctaaagtgcagaacaacttaatccagttcttcctgtgggataagggcaactggcatccttgtagctataagtag

SEQ ID NO: 205593 - DNA, 192 bp, Klebsiella oxytoca
atgggtcgaaagacacgtaaaaaatgccaggctagtgttcagcaaacgttttgtgtgagtgaagagttaaagaaaaaccttaaaggcttaggtatgtttttcttgagctgtgttgccaacgaggctttcacagcgattattcactctgatactgttgccttcatcttagcttccatcaagggattcctgtaa

SEQ ID NO: 205594 - DNA, 960 bp, Klebsiella oxytoca
atgaaaaacacaaaacgtacccctagtcttcacaaatccctcaaactctaccccctgaaccaatctccttttttcaagctcaaaaacaagaaaaaacttctagaaatcattggattatcaaaaaaacaagctgataagttgatgcttgactcagcatacaaagaattcgaaaacgacgcaggaaggaagattcaggagcccattgctcagctcaaggcggttcacaggaagatcggcgttttgttaagcagaattgaattgcctccatatcttcactccggtcggaagaagcattccacactaactaatgcagaatcacataagcaagcaactgaacttctgaagctcgacattcacaaatttttcccctcaactcgggctgcaaaggtctataaggcttttgttgaaaaatttgagatgtcacctgatgtggcttatgtaatgaccaatctcgcaacctttgcaggaaaagtgcccacaggcagtccgataagcatggctatagcattttgggcgaataaagatatgtttgacgagcttagcaaccttgcggcctcaaacagcttggtatttacagcatatgttgacgatgtagcgttctcaggttcgaaaatcccaaaaggatttgccgcccaagctaaagaatgtattcgctctcatggcctcacctctaaagacaaaaaagagcgattttatccgtcatcagaaggaaagctacttacagggatagtaattcaggatggtgaacttaaggtgcgttgggcacacaatgattcaatcggaaaagaattcgctactttggctgaagcaaaagacaacgctgcaaaaataattcatctagaaaagctagcaggcaagctgcatgcagctggtcaagttgacttcagacagaaagacagagctcgcttcttcactcaacaactcaaagcagccaaaaagcaatcaactcagagcggttag

SEQ ID NO: 205595 - DNA, 375 bp, Klebsiella oxytoca
atgcagggtaaggtatgtgtatttggttcgttcaacgttgacattgtggcgaaggtggaacgcttcccgcgaggcggtgaatcgctaatggcgctgggtagcagcctgggaccgggagggaaaggtgcaaaccaggcaacggccgccagtaaagccggtgctcaggtgcattttgttgccaaggtgggtaaagatcagttcagtcatttagcagcagatcatttaactcgctctgcaattcactcttacacgctttatcagtcagagagtgaaccaaccggtaatgcgattatttatgtttctcaggaaaacggcgaatctatggtcactcccgtttttgcaacaccgattttgacgacaagttggcttgcttga

SEQ ID NO: 205596 - DNA, 819 bp, Klebsiella oxytoca
atgccgacagcgattcggattccgacagcgactcggattctgacagtgactcggattcagacagcgattccgactctgacagcgactcggattcggacagtgactcggattcggacagcgattcggactccgacagtgactcggactccgacagcgactcggattctgacagcgattctgactccgacagcgactcagactctgacagcgattcagactccgacagtgactcggactctgacagcgactccgattccgacagcgactcggactctgacagcgattctgactccgacagcgattctgactctgacagcgactcggattcggacagtgactcggattcggacagtgactcggattcggacagcgattcggattccgacagcgactcagactctgacagcgactcggatagcgacagcgactcggactctgacagcgactcggactctgacagcgactcggattctgacagcgactcggattctgacagcgactcggattccgacagcgactcggattccgacagcgactccgattctgacagcgactctgactccgacagcgattccgatagcgatagcgacagcgactccgattccgatagtgactcggatagcgacagcgactccgattctgacagcgattctgactccgacagcgactccgattcggacagcgattcggactccgacagcgattccgattcggacagcgactcggattcagacagcgattccgattccgacagcgattccgactctgacagcgactcggatattccgcaggccaacgcggataccaatactgcgctga

SEQ ID NO: 205597 - DNA, 252 bp, Klebsiella oxytoca; identical to SEQ ID NO: 109895

SEQ ID NO: 205598 - DNA, 627 bp, Klebsiella oxytoca; identical to SEQ ID NO: 109896

SEQ ID NO: 205599 - DNA, 786 bp, Klebsiella oxytoca; identical to SEQ ID NO: 162827

SEQ ID NO: 205600 - DNA, 1128 bp, Klebsiella oxytoca; identical to SEQ ID NO: 162828

SEQ ID NO: 205601 - DNA, 570 bp, Klebsiella oxytoca; identical to SEQ ID NO: 162829

SEQ ID NO: 205602 - DNA, 396 bp, Klebsiella oxytoca; identical to SEQ ID NO: 162830

SEQ ID NO: 205603 - DNA, 633 bp, Klebsiella oxytoca; identical to SEQ ID NO: 162831

SEQ ID NO: 205604 - DNA, 1548 bp, Klebsiella oxytoca; identical to SEQ ID NO: 162832

SEQ ID NO: 205605 - DNA, 804 bp, Klebsiella oxytoca; identical to SEQ ID NO: 162833

SEQ ID NO: 205606 - DNA, 486 bp, Klebsiella oxytoca; identical to SEQ ID NO: 162834

SEQ ID NO: 205607 - DNA, 507 bp, Klebsiella oxytoca; identical to SEQ ID NO: 162835

SEQ ID NO: 205608 - DNA, 870 bp, Klebsiella oxytoca; identical to SEQ ID NO: 162836

SEQ ID NO: 205609 - DNA, 1161 bp, Klebsiella oxytoca
atgaagagaaaatcactgtttctggccgtggccactctgctggccgccagttatgtcaatgctggccagctgaccaccgagcagcaaattgctgagaagtctgcacagatatttcatgacactaatcctccggctatggtcatggccattattcagaatggtcaggtgacgtatcacgcctatggtgaaacggctaaaggcaaccataccagccctacgcccgactcgctgcttagggtcggctctatgtcaaaaattctggcctcagagctgctggttaagcttgccgataagggagcgctcgggctgaccgacccgcttcagaaatatgctcccccggggatgacggtccctgaggtgagccatggaaatcccgttaccctgctttcgcttgccacacataccagcgggctgccgcggcttatcccgggccaggctcctgccggcgcagctccgttcacttggccggacaggcctgcccgctggcgctggctgaatcagaagccgaccctgaccgcgccgtgggaacaggcgcagtactctaatgtcggatacgatctgctggccgatgctatggaagctgccggtaaaaaaccctacctgcagcttatgcgggaaaatgtgacgggcccgctgggtatgaaagacaccaccacccagcctgacggggctcagtgtcagcggctcatggaaggctctggcatcgatcctgccggtccctgcacggacacgacggcagccgccggcaacggcgggatgtattccaccgcaagggacatggcgagctggatgcagcatctgttgaatatccgtcattctgataagccagcgctcagggccgttcagcaggccatgtatgtacagagacagcaacttaaatccattacgggtctggatttagccgggaaagcgcaggggctgggaatgggctgggtctttatccggccttcggttgactccccggtaatgatccaaaaaaccggcggcggcggcggttttatgagttatatggttctggtgcccggcgagaaaacggggatctttgtctctgtgacaaaagtggatctggatatgttctcaaccttaacgcgtgaaacgaacagccttatcccgctcctgttaaaagcagctcacggggaacgcgtcagtccggcttcataa

SEQ ID NO: 205610 - DNA, 1749 bp, Klebsiella oxytoca
atgataaaaaactccgcgatgaaaaataaacaaagtattcgcccgtcatcacctgagaagggattcagcaacgtcagatataatattcttcttgccggtatcgcattaatctttatcgtgctggttgccaggctcaccggacttcagctttttgaccacgctgtcctggaaaatgcggctgaccgtcgatccgtacggacacttgcactgccagcacagcgcggaaccctgaccgatcgttacggcgttgttctcgccatgagcgtgccggcacgtgacatcattgctgatccaaaacgcatcgctgccgctcatccggacttcgcggaagccagatgggcttttctggccgacttgctggatatcacgcctgaggaacttcgcagaactattcaagataattcggacaaggaattcctgtttctgaagaaaaagtcgcccctgtcattgtccagggccgtgtcacagctgcatctgccgggcataagtcagaaatacaatgaaaatcgctactatccgctgggtgaggcatcagcctcgctcattggtgtgaccggtgccgaaaatagagggctgagtggtattgagcagagctttaacaccgttctgagaaaggacttcggggtgaaaaaaatacgcaaaaacgccagggggggcgtcatcagcgtgatccagtatgacgctccggaaactgcaccggcgatcaggctgagtattgacagtgtgcttcagtatattgtttacagccggttaagggagggggtcgagcaacatcacgcccagtcaggcgctgcggtgcttgtcagcgtaaacaccggcgaaattctggctatggcatcctatccgtcgtttaatcccaaccgtttttccggtgccacttccgctgaaatgcgtaacgtggcgattaatgacagctttgagccgggttcaacggttaaacccttcgtcattcttgaaggcctgcgccgccatattatcagcagcagcacgcttcttgacacaaggccgttcagggttgacggccatcttatccgggacgtgggatactggccggcgctgacgccgaccggcatacttcagaaatccagtgataccggagtttcacatattgccctggcgatgccttcggatgcgctggtaaaaacgtattcatccttcgggctgggaaaaccgacagggctgggccttcccggtgaaagtactggttactttccgttcagtcgccatcgatgggctgatattgagcgcgccaccttcgcttttggctacggcctccgggtaaccccgctccagttagccagagcctatgccactctcggggcctgtggcgtttatcatccgttatccgttacacggttatccgcgccggtgtacggtgagcaggtggcggacccgaagcttgccgatgctgtaatcagaatgatggaaagtgatgtgttacccggcggaagtggcgtaagggcagctgtaccgggctaccgtctggcaataaaaaccggaaccgcagagaagttaggtgccggtggaaaatatgacggggggcatattacctatacggcaggcgtcgcgccggcgagccgtcctgaagtggcactggttgtggttattaacaatcccaaagcgggacagcattttggtggctcagtggcggcgcctgtcttcggccagattatcggtccggtgcttacccggctgaagattgcaccggatgctttacgtgctccggtggtacaccgacagtccggctga

SEQ ID NO: 205611 - DNA, 858 bp, Klebsiella oxytoca; identical to SEQ ID NO: 21685

SEQ ID NO: 205612 - DNA, 657 bp, Klebsiella oxytoca; identical to SEQ ID NO: 21684

SEQ ID NO: 205613 - DNA, 168 bp, Klebsiella oxytoca; identical to SEQ ID NO: 110172

SEQ ID NO: 205614 - DNA, 657 bp, Klebsiella oxytoca; identical to SEQ ID NO: 21682

SEQ ID NO: 205615 - DNA, 1392 bp, Klebsiella oxytoca; identical to SEQ ID NO: 21680

SEQ ID NO: 205616 - DNA, 573 bp, Klebsiella oxytoca; identical to SEQ ID NO: 21679

SEQ ID NO: 205617 - DNA, 546 bp, Klebsiella oxytoca; identical to SEQ ID NO: 109948

SEQ ID NO: 205618 - DNA, 627 bp, Klebsiella oxytoca
atgctctcctatttcaaagcgaggccgcttattgaagcgcataacgtggccgtattcagttcaaactacaccctgtatgcctccatgtcagcgcgttttgcggcggtagtggaatcgctgtcttcccgtgtggagcagtattcaattgacgaactctttgtggactgtcgtgggatggaaacggcaatgaacctggaggcattcgggcatcagctgcggcgtgaagtgcaacgtcatacgacgctgacctgtggagtgggcgtcagttttaccaaaacgctggcaaaactgtgtaatcacgccgccaagacctggccagccaccaggggcgtggttgccctgactgacgagcgcagactgcataaactgatggccattctgcctgcggccgaagtctggggagtgggaaggcgcatatcagcgcggcttgaaacgatggggatcagaacggcgctggatctgatgcgggctgatacccggtttatccggagtaatttcagtgtgacgctggaaagaacggtgcgggagttacgtggcgaaatctgctttggcctcgatgaaaacccggcaaccaaacagcaaattgggggaaccgcagaattcggaaaaaatcgtacgctaagctaa

SEQ ID NO: 205619 - DNA, 537 bp, Klebsiella oxytoca; identical to SEQ ID NO: 110427

SEQ ID NO: 205620 - DNA, 477 bp, Klebsiella oxytoca; identical to SEQ ID NO: 109853

SEQ ID NO: 205621 - DNA, 642 bp, Klebsiella oxytoca; identical to SEQ ID NO: 109854

SEQ ID NO: 205622 - DNA, 285 bp, Klebsiella oxytoca; identical to SEQ ID NO: 109855

SEQ ID NO: 205623 - DNA, 126 bp, Klebsiella oxytoca; identical to SEQ ID NO: 109857

SEQ ID NO: 205624 - DNA, 234 bp, Klebsiella oxytoca; identical to SEQ ID NO: 109860

SEQ ID NO: 205625 - DNA, 1317 bp, Klebsiella oxytoca
atgataaagaaacttttcctgccgcttttcactggcggtctgattggcaaatttgcaggtgtttttagagagttactaatggcatggtgttttggcacaagtgcagaaacttcatcatttagaattacacaaactgtcttattatcacctattaatttattctcatcggatattatttctgggggtttaattcctaagtatcgtgctttattggataataataataatgctgaagccagaagtctatttggggctgtgctgatcattaatttggcattggcgcttctactaactttattttttttgatattttctaagaacatcacttccttctttttagagtcgggggaaggatattttgatattctccattcgtttatatatggcgccgcattctctatcattccttatgtatattcgaatatatgttcatcgattcttgttgtacataaagaattatctccattttctcacagggcgagtattcaggctgtaattttatcaattggtattattttaagtttctacttgaaaaactatatctatttcgtctatgcttttccattagcttatgtatttatgtctatatggatcagtataatacttattagaataaaagtcatcccgctttttgaagacgttttatttaccatagttaatttctttaagaacgtaaaatatttactattagttcctgctttataccaaatttattgggtaattgaaaaacatgtaggtagtcaaatttcattgactatgatttctacatacgagtatgcaaaattctatactgaaactttcattagcctcattagcgttccgcttgggtatgcaatacttgcatcaagtcatgaggaaactataaaggcaaaaaaaacaatactttattataatttatttgttttatttgtttcttatattttattcttttttggttggttttttatcaaattagtttatcaacatggttctttcacggctaatgatactatcgaggtgtatgaacaattaaaaatactttctataagccttttctttcaagctaacttttatttaaatttaaaaatccttgcagttaaaagtcgctatgccataatattattttctgttttttgttcagtggtgagtggaatattatcattgtttttccttcgtgatacattaggtgtttatacggtggcagtaagttttttgatttttaattttgtagggtctcttatattgattgtaattgagcgcgctcttgaattatatatgtttttagtgcttttaagtgtattggttttagcaggtctttttttttgtaaatatgtttga

SEQ ID NO: 205626 - DNA, 1824 bp, Klebsiella oxytoca
atgagtggaacacagattactgccagcactctggtaaataaaatagtttaccgaacagatttaaatagtctgaaaaaggttagaaatgatatgaaaaaactccaacaggaattttctaaatcaaacaaccaggtagccaaggtcaaacagcaggcagataaacaaattcatcaagcacagattaagcagcagcgtgatattgataaacagcagaaacaagctgcaaaacaacaagccgcagacgctaaatcaaaggccaacgaacagaagaaattggcggcagcgcatgcgcgagctttgaagttacaacaacaacaatctaagaaaatcgcaactcagcaggaaaatgctgacctagcaagaaaacgcgccgcattccagcttggacgcctccagaatatgagcggagccgatcgctacgctgcgatcaaacaggctaacgccctcgtggatgcatatgcgcggggaaataccagtttaaaatcgatgaatcaagctctgagccagcatctgactacgcaacgtagtattgccagaaataatgccaaacaggccaaacaatcaggtaaggcgaaaaaatctggttcatctggttggctgagccgccaggcgagcgctttcattcctggggagatacttgggccaacagcagccgcttatgctgcccaacaggcctatcagattatggcgggaacactacagggagcgattgaacgaaaccagggcaggaagatgatttcctctatgggtgggaacccattggaagctgacgccgccagaatggaaaccttaaaaagaactggtttctcaatgagttatgagaaatatagtgatatctccaaagatacacaagataaaataggacagctgagtttaggacaatggaccaaagataaacaaggaaaggcatcattcagcggtggtggtgaaatgtcggactggctgcaaataatggttaaccgtgggggttattctcaagagggcgcattaaaaacgcttcagaatataaaggggcctgtggagttagcggtattattaaaatcccttcagaagagcgcgaaactaactgaatcagaattcactgcgcttgcggaagtaataaacgacttctcatatttagctaaatctgtcgatgcttctggtaaaaatgtaattgatactatgaatatgatgattaatagtggtcttgcactcaatagccaacagcagaaatccatcgataacctctcgcagatgtcgattgtattcgataacgccagaaatgcattaggtgatcagtttgcggcatcttttagcaaaggtttagaggatttaggaatcaatacacaaaatctatcttctgaaatgggttcattggtgcctctggtgaaggatttaggaatgggaaccgctcagactgttaaaggttttaaagaccttctggatgtattgtccattatcacagaatggaagaataaacttcttggaactgataagccagaagagcagaatgtttttcaacaaggtgctaattttgttggggagtctctattgcctccgggcgtcctcgatatggcaagtcggattaaaaatatagttagtcctggttctgattcatctgttgcatcacaggtgcaaagtggtggttggtataatcaaatgatgccagcaacgccagcgatgcaatatcaacctgttatcccggatttaaaagcggattttaatcttaccgttaaccccagtccagagtttggaatgatggtggaggcagtcgccgataagcgtatcgagtgggcatttgatgatcagaacttccaaattaatcagagtatattaggtcaataa

SEQ ID NO: 205627 - DNA, 204 bp, Klebsiella oxytoca
atggttactatcacaaaaggcgtcaaaacgtttgacgggaaaatccccgttacactgttggttgatgacgtcgaaacggcaaatgagttaattaaactcgctaaagctgcaaatgttcctgtcagagaacaggaagatgaattaaataaatctacaatcaatccagtattcaaacatctggataagattgcatctaataaataa

SEQ ID NO: 205628 - DNA, 300 bp, Klebsiella oxytoca
atgatggataaccttattgatgatatcgaccgacaaattttagcctgtctggtggaggatgcgcgcgtctcgctgaaggtgctgagcggtcatattggcctgacctcgcccagcacggcggagcgtctgaaaaggcttgaggagcgcggggtgattcagggttacggcgcgcgggtgaatcttgcggcgttaggcatacgctgcaggcgctggtgcgggttcgcccattgcctgggttgttacataaagtggataagtacattcaggcgatgccggagtgcattgaaagcgacaaagtga

SEQ ID NO: 205629 - DNA, 189 bp, Klebsiella oxytoca
atgattatacaagacagccatccggaatggcaccttctctatcgaataatcgcttttatcttctcaacttttgaggatagcaaaacttgctcccaaatccacggacaatccaatctcttggcaactaacgcgccacaaattggaagtgccagcgcatggcaaaaaaatatatattacacagtaagttaa

SEQ ID NO: 205630 - DNA, 1368 bp, Klebsiella oxytoca
gtgcagagttcaatcgccagatactatactttagaagccaaaaaagcgccagattttgaatcgaatctaaatgtcttccatgcgtggggtggtaggcagaaaccgggactgtattcacatatttgccaacagtatggattaactccactaacattaggagatgtgcgtggagcaagtgatgctttagctgtcatatatgcagaacttctcaaaaaaatcggtagtgatataaagcctgaatatgatcttattttaatagatgaagcccaagattttcctaaagagttgtttgaagtggtctttaaactagcaaagggcaaacctcacgagaaaaggatcgtgtgggcatatgatgaattccagtcattgaaggacactcagattaaaggtccatctgagctatttggtctggccaaagatggcaccccaaatatgagcgatgatgttttagacggattctatcctggtgacataaaaaaagatattgttttatccaattgctataggactcctcgtcctgctcttatgactgcacacggagtagcattaggactttatactaataagccgaatgaaatgttttataaccatgatgaatggaaagctattggctataaagttttaaatcctcagacaaaaatcattgcaaaaggcaatgatgttcaaatagagagacctaatgaaaatagtctaaatctgttggaaggaattatgacagagcagggtaagagggcccttaatctcatccagactaaggtggaaaatgatagggaaagtcaatatgaatacattgcaagtaacatcaaacgcttaattgatgaagaaaatgtctcgcctgaagaaatagtcataattaatttgaagtcctctagtaacaaagatgagatgctacgtattcaattcatcttaaataattacggtattcactctgtaattcccggttacgttgaaagctcagatgtctttaaacccaaggggttcgttacaatcacaacccctttcagggctaaagggaatgaagctaatattgtatttattttaaatagccagttagttgttaatgatttttcattaaggatgcgtaatgcattttttgtagcagtaactcgaacaagaggatggtgttatattgttggttatggagaaaaaatgcaaatgcttgtggacgaaatttcaggaatcaaaagagatttccctatatttaatttcatttgtccagacccagatgatgtcaaagcacgaaaaagttatctccacaaatcagactctgagatcaatgagatgcaaagagtactggatttagttaataataacgaagagttaagacgactgctacaggagcagctcattgataagaaaggagattaa

SEQ ID NO: 205631 - DNA, 672 bp, Klebsiella oxytoca
ttgaatttctcattagtgcagcaaagcttaaaccatgtcgaagcacttttaaaacctgtaactcaacaaaaattaatagagcttaaagaaagagagaaggtcataagttggacaaataggaaaccaggaatttacaatgaagtctactatcctattgaatatcaatgtgtaattgatgcaaggcagtactcattattgcttagagatggcgatttttttcaatttttttatgagtttgatgcgaaaactggcaatctgaaaaaagctaagttggctttctatccctcaccaattgattgtagaaattcgttggatgatctcaatgaagccgctgaatttgcttttgaccataatgaagaactatataatcatcttgataattggattgcgctattggaaataaaaaactattttccagcaaatacatctcaagttagatttgattatgatagtacggttactacacatgagaaagcacatctgcagtttagtagtgtaaataaacttagacttccggctgacttttttcctttgccatatgcatttgtattaatggtttctgatcttattaatggatgctcaaaggtagacgctagacatataagctttactaagagaaacagcctaaaatcgaacgtttctaatagaattataaccttgaaatcacagtga

SEQ ID NO: 205632 - DNA, 684 bp, Klebsiella oxytoca
ttgtttaatattggtagctcatatttggcttttagatatatgataggtaaccatccccaagcatttcaaaatgagcatgatgaaaaagcggcctttatcgctttcaatgaaccgtttgtaaatagtgtgattttaaatttttgtatactacaagagcttatagaattcaagatgaaagttttatcaacatcaccagaatttaaaccacaccttacctatatcaacaaactatacaaacgtataaaaaaatccggagcaatttcaatcagaaatggatggacagctcatccatttaaggatgaaaataaaggacatgtattcaaaccccaagaaatacataaagaaacgtttaaggtatttgaaaatctttgccttgaagatgacaaagttgaatacaataactgtactaatgatagattagcttggttttgtcaaaaatatatagttcattgtaccgagaattatccaagcgttatggaggcggtacatagtgttttaacaaacacacaaccaccagtatctagaattgctgctaagccccgtgagatattaatagaaatgaataagttttcatcaatgcttagagatgcaaaattatttggaattgaacctttctttcatccgtcagaaaaggatattcaaaatatcaaagaaaatggcttatccagtgaagttaatatataa

SEQ ID NO: 205633 - DNA, 195 bp, Klebsiella oxytoca
atgataactaaaaaatttattgaactggaggtcggggatattatcgtccccgttccgggagtggaaataaccgtggcgtctgcgcccgtcctgaccaaaacagatgatggtgaaaatcacacactgaaaggggtgcgggatggcaatgaagtgggagttgctggattttatgactcggtaatgcaagttaaatga

SEQ ID NO: 205634 - DNA, 753 bp, Klebsiella oxytoca
ttgaataaaaagaaaacttttgaggtcagcattaacaacttaccagcagcattaaaacgtttagatttaccagccgaacaagtaaaagttattgaagattataaaaagcaatttccattcttgattgaagatgaagaaaatgttcttgtaagcttagatcaactttgggaagcactggatacaccttattatacgcggcccggaacgatacccgaaagttcgggtagcgtaaaatctcggtcaatacagcaggaaaaacaatataaacgcaataagtttaatcagtgggttgagtcagtattaaaagaaattgatggtgaaccttttagtagaatggtgccaactggaaagacaaagagaaaagaaactttcgttactatcgaagatgccaagatcattgcaatgatggctccaggtgagcagggtagaaaaattagacgctattttgtgactgtagaaaaggtctgcaaaatcctctggcaatataattttcaacggaaccagattgaaaataaatctaacgaggtttacaaactcaggttagcacaaactggttataagggttttgatgttgctgcgaaggataaagttaggtttaactctctcgtgaagaaaattgcaggtgcgaggaatgttaaagaaactgaccttgacgagtattatcacgttcaatttatcgtttttgatggaatgaaacgtggcagaacagacagcgagatcctcgcatttcatcttggtgatgaggcagcataa

SEQ ID NO: 205635 - DNA, 201 bp, Klebsiella oxytoca
atgaatgatagttatattgacccagaggcctattattcaaactaccaaatgttgctggaggcgatgaataaattgcctgaacatcctgagtactttttagagtggctcttagaagatgaccccacgatttatattaatttgatggaacttatcgtcatcgccagaactatccataacgtgtttgaacaagtaacggcataa

SEQ ID NO: 205636 - DNA, 648 bp, Klebsiella oxytoca
gtgaccgccggcacgtccaggcgcccgggcgggaatggtcacgctctgggtattgtcgaggcagagctggcgccgttcctggctggcaatggcggcagcgagtaccaggctaaaccgcgcccgatcgataagcccgcccacacaatcctgaaagagtcgcgcgcctgtgtcgtcgctccggttatcgccaggcagttcggcgccagcatcggacaccgtgccgacgaaccaagcgcaacaatcaccgcgggcggtggcggtaaatcgcagcgggttgtaccgacgctcattcaaataggatacggagaacggccaggccaggcacctcgcgtgccaggactggataagccgctgggaaccgttgtggctggtggcgggaaacatgccgtagttggtgcgttcctggcaaaacactacggaggaaattatcagggcgccggcgtgaggctggatgagcctgcgcattcagtaacgactgtcgatcaccacgcattagtcgcttctcatctggttaaactgcgcggtacttgccgtgacggccagcctactgacgtgctgatgccgactatcactgccggcggccagcacgtaggggaggttaaaacgactctggcggtcgaggactacgacgaagagcgcgcgcagtag

SEQ ID NO: 205637 - DNA, 213 bp, Klebsiella oxytoca
atgaatatcgaccagaccctggtcggcagctgtagtcactatcaaaaatccttcagcttcatcgccgcgttcaaaaggtacgctgccgagcgccgccataaaaatgggcttgccgtctttccggtagatgaagtagggctgcttcttgttgccttcctttttccattcaaaccaaccatcagcgaaacagatagcccggccatgttgccatag

SEQ ID NO: 205638 - DNA, 1338 bp, Klebsiella oxytoca
atgggtactgtgatttctcttgaagtgtcaggaatggagctagattcgactaagaactcgctgggtatagatcatggagggctgtttcaaagtgccgatcatcacgtcaagccactaaatgaagatcaaatagaggaaggagaagactacgacactcctgatggcatactctgtcgtactatgttgcgtaaacctttggggcaagtagcttaccgattggagttgttgggtttcacccttgaaaatatacgctatgagtatgaactcatggctaaagattcaattgaataccaagaggaatttaacgaatcctgtccggaatatgcaaagccaattagtaacatgatggtatttgatgaattcgttaacttcatcaagagcgtaaacattagcgaactaaacgataattatattagcgtaaaagacaggaaaaaagaacgcgagcttatcatgggcagatttgataatgatgagttattaaacagaatacctcaatacgacaatacctttaataatgcatggtctgaaaaatctgcttttgggactttagttagcatactgcatccatattctgtaatgcgacttttggccgaaaatccagataattataatgaattcgttacttgggattacggagatctagtttctgctggttatgcgaatataaaagatattcaggtaaatgctcgcagacgtgacaagttcctgattgccaccgagggaagcaccgactccaacgtaatcaaatatgcattgcatctcttacggcctgatatagaagattttttccactttatcgacatgagtgaagggtacccgttcactggttcaggaaatctggttaagttcgcagctggactcgtaaaaatcgacattcaaaacttgattgttttcgttttagataatgattgcgaagggattgaagcatatgaaaaaatccgaaaactcgcattgcctcacaatattaactgtattcatctgcctgatcttcctgattttaatcaatttccagctattggtcctcacggcgttacctatgaaaacatcaatggccgggctgtagcgattgaatgctatctggatctaagattttctgattatgatgaagctcaaattcgatggtcaaattacaaaaaggaaagcgatgcttatcaaggcgcgctggaaaataaagactattacacgaaaaaattcatgaaactaaaaccagggagtaaggattttagcaaatatgattttgccaaactcgctattgtcttggatgaattaataaaagcgtgttcaaaaatctcatcagaaattcgaaaaaatgaagtagatgttcaatatccagattaa

SEQ ID NO: 205639 - DNA, 180 bp, Klebsiella oxytoca
atgaacgtgaatactgagattttgaaactctggcaatccaggggcgaaaacgagcgcaccggatccgatgcggagagggtggcagatattgcctgggagcaggggttacaacttcaccgcaaccggcaggaacattaccaacgagtgatgtacctaattggccatcgcaatatcggctaa

SEQ ID NO: 205640 - DNA, 1044 bp, Klebsiella oxytoca
gtgattcggactctgacagtgattcggactctgacagcgactccgattccgacagtgattctgattcggacagcgactcggatagcgacagcgactccgactctgacagcgactcggactccgacagcgattctgactctgacagcgattccgattctgacagtgactccgattccgacagtgattctgactctgacagcgattcggactccgacagtgactccgattctgacagcgactctgactcggacagcgattccgactctgacagcgactcggattcggacagcgattccgactccgacagtgattcggattcagacagtgactcggattctgacagcgactcggattccgatagtgactcggattccgatagtgactcggactctgacagcgactcggatgctgacagcgattccgattctgacagtgattctgactctgacagcgattccgattctgacagcgattcggactctgacagtgactcggactccgacagcgactcggactctgacagcgactcggactctgacagtgattcggactctgacagtgactccgattccgacagcgactccgattctgacagcgactctgactcggacagcgattccgactccgacagtgattcggattcagacagtgactcggattctgacagcgactcggattccgatagtgactcggattccgatagtgactcggactctgacagtgactcggattcggacagcgacagcgactctgactccgacagtgattctgactccgacagtgattctgactccgacagcgattccgactccgacagtgactctgattccgacagtgactccgattctgacagcgactccgattctgacagtgactcggattccgacagcgattccgattccgacagtgattctgactctgacagcgattcggactctgacagtgactcggactccgacagcgactcggattccgatagcgactcggactctgacagcgactcggatattccgcaggccaacgcggataccaataccgcactga

SEQ ID NO: 205641 - DNA, 1704 bp, Klebsiella oxytoca
atgtttcaaatatcagccggtggtttttttgattctcataaaattgaaaagcatgaaggaacttttgttttctactctaatgttgatgtatttttccctgtggaaaatgagttgcctttttttaaagtaaaacaagttagtcatgatggggttaattgttatgtggttaattacatccttctgactgaaaagccagataaaattgaggctggagtggtaatcagagccggggatcaagattatatacaacagttcatattgatttgggagttttactttgattgtgtggctaggctggaaaaagaatctgtaaaaaaaatatgcgctcaatcaaatttcaataagactcattctaaaattgttcttgagattgctccgtatttagttgaaattaatagaactatttcatctgagaacgttaatggctttttaggttttgtacaagatgttgttagtattaagcgctcaacatttaaatcggtaatggctgctctaaaaataataagtgactcgaaggagtcgttatcaacaaattttgatttaacttattccatgctggtttatgctttagagtcactatctcagagaaatgataactatcaatcacattgggatgattatgatcaaaaaatgaaggcggaattagaacttgtatttgaaaacattccttatgaagactcggtaaaaataaagagcattcttattggcggtaaacaatttaaactacaaaaaagatttaagaattttattactagtaatataggggatgagtatttttatgaaacaggtaagtacccgattcgtagtagctttcttaatagagctttagataatttatataaaatacgctcatcatttgttcatgaactaaagcctctggataaaatgatgtctaatgctggcaaatcaactggagattgtcttgttctttttggtgaaccgtattttagctactcagggttgcttagacttctagggcatgtgatcaagtctttttgcaaaaataatcacagtaatgaaaatgaatctgttaattgggtaatggaaacttctggcatgatggttgcagaaatatctgcaatgcattggttgtggaatcctgaagcatttacctctaagagtattgcaagatggtttagtgaataccttaatatgttaaattcaaatagtgtaactgatttgcaggctataatgtgtaaaattgaagaaatttacgaccaatctaaaagagagcacaaaagtgggcttcttagtttttattttttgtataattacgttcataataaggacaagcgtgagtggcttgattttgcagaaaaaagatattcttttttagagcatgatatgtattggtatgtgtgttgtgcatatatgtattcttcattaacaagtattgccaatgcagctgtagacgcaagtgcattgaaagagtttaatctctgttttaatgagtatgaaaggagtaaatttaagcccggtcgtttaaatcttccagcaatgactgaggcagtagtcttaatttgtgcggctaattcatattttagaattgggatgtatcaagattatgtaattatggttaagaggagccttagggaaatttctgcagtgcaagaggtgtttaactatattcgcgattgtttatctaattcacaatctattgatttgctaagatgttttgacttatatagggggggggcaggttga

SEQ ID NO: 205642 - DNA, 801 bp, Klebsiella oxytoca
ttgaaagcaaatgcaaacactatcgccgattatctccacgcaacgctcgagaatgctcaagatcacatcgccgcccctccccaattgatgtatatggtttaccatatggatgaaatattccagaaagagatcctggccaagggattagaaatgcacccaactgctggttttcttgctttaaactcctatgtaatgttgttagccgcggtacgacaagcattatctggccatatagtccctgttttccctatattacgcacagcgcttgaatcttcttgttacgcttacctaatagctactgataatagtaaggctctgatttggttgaataggcataagtctcaatcagagttagataaatgccgtaagacttttactgtaaacaagacagtgaatggattaaaagagatctcctccgagatggctgaatatgttaaggcacactatgatgcctgtatcgatttcggtgcccacccaaacgagaaatccatatttaaccatttaacaaaaattgattctcccaatgatagattcgatgcatgggaacttactggtgtttatggccccaatagttggtatgtaaactacaccttacttgcttgcgttgaggtagggcaggcaattgcatttcttatcgctgcatcttccgagaaccatcctttgatcaatgaacgacaagctgtttttcaaaattggatggatgaaaaaaacagaatggctgaagaaataaatggcgaacccattgactacactggccctatgtactcatcggttatgccaccaacctcccaagatcaatag

SEQ ID NO: 205643 - DNA, 468 bp, Klebsiella oxytoca
atgtgctcgcgcttggccttcatccgttcggctggaattgtccagagctttgcatcgagatcgatctcggcccaccgagcaccagaagcctcagaagggcgcactagggtcaggagctgccactcaataagacagcgagtcggaacagatagatttgacatgactagcgaacgcatcagctttggtaattcctctggccgcagcgtcggcatgttttgttttttgggcttctcaaaagccatgccaacacctgaagccggattcgcatcaatcagacctgtgtttacggcaaaaatcattatctcgttaatgcgctgcaccagtcgacgtacagtttcaagcgctccccgagatttgattggctctagtgcttcaacaatcgttctggctttaatctcctggacaggtatcgccccaatggtagggaaaacatctttatccaaggagcgccaaatgtcttttgcataa

SEQ ID NO: 205644 - DNA, 300 bp, Klebsiella oxytoca
atgatgcgttttcgctttttaataccgttgcttctactactggctaccagcgcgcggtccatcgccgacagcctggtttatatctggcagcgcgtctggcagggcgggcacgcagcggcgctgcgcgagagccacgatctgttttccaccctgcgtgtgttggggctgcagattcatcccagggagggcgcgcgcattgcccgggtaaatacttccttattacagcgggatggtcgtccggtatggctggtggtccgcctggatggtagctggacgcggcagctattcttccgcaaataa

SEQ ID NO: 205645 - DNA, 480 bp, Klebsiella oxytoca
atggggtacagaactcttccatacacgtttcagcgaaacggtaactactatctacaaatccggctttcaaatggcaggatgtataagaaatccctcctcacagacagctatcgcgaagcatccgctttgatgatcagcatcattccgcatatctcttttcttaaatcattaactattccgctccctgtgttcgaagcgttcttatcaaatctgattgcttcagagcgcaaagctgcgagaaatccacttttatcccaacagcagataatagttcctgctgaaatcgtggaaccacaaccgccagtgaaacgcgaaaaagtgataaccattgctgatgcgtgggctatgtacaaagatgaaaaggggcgcaactggacgaaatcgatctcaatggcgaatgaacgctatatggaggtattgcttgtggttttgggggaagaaacagacgtaacgacgatcacaaaacaggacattaagtag

SEQ ID NO: 205646 - DNA, 1050 bp, Klebsiella oxytoca
atgaatttcacagcaattgacctattttgcggtgcgggtgggttgacatgcggtttgaaagaagctggcttcaaagtcctcgctggtgtcgagcttgaagctgttgcagcaaaaacttacaaaactaaccatgccgatcatattctctatgaagctgatattcgctcgttaaaccctctaaaaattatggaggaattgcagcttaaaccaggagagttggatttattagcgggttgccctccatgccaaggtttctcatctcatcgcactcgaaataaatgtacttcagttgaagatattagaaatgaccttatttttgatctgatgagatttgttagagcgtttgaacctaaaacagtcatgatcgagaacgtacctgcgctggctaaagatgagagaattactaaggtcattgtcgagttacatgaacgtgggtatatgattggcgaaaaaacattacaagtgaaagataccgcttgttatggcgttcctcaacgcaggaaaaggatgatccttatcgcatctaagtttggtgatatcgatgagcctttaaaagtagcttcaccgaagactgtaaaagatgcaatcgcagattttcctgttccaggtgaaggtaatgacattcttcatgactttattccaaacagaaccgataaaattaaagccatgataagaaatattcctaagaatggtggttcaagatcagatttaccgaaacggttatggctgccttgtcatttgaaaaatccagatggatataaggatgtctatggaagaatgtcatgggacaaagtttctccaacgattactggtggatgtaccaatccttcaaagggacgttttttacatcctgaacaggataggtctatcacattgcgtgaagctgccgcgcttcaaacttttccaaaaaactatgccttctcgctggatagaggtagagagttcgctgcgctaatgataggcaatgccttaccacctgcctttatttgtgcacatgcaaccaagatcattgagcatttgaataagttaggaaaacagaatagggaataa

SEQ ID NO: 205647 - DNA, 1608 bp, Klebsiella oxytoca
atgtctgattacgaaatgaagtttgatcctcatacgatagaacatctcggcgtaaaaatgtattctacgctcccaccagcccttgctgaactaatttcaaatgcctatgatgctgactcaggaaatgtgactctcgattttttggaagttggaagcaacaaatttattagcatcaaagatgatggtacaggtatgagtgccacagatattcaacaacgatttttagttatcggaagaaatagacgtcgacatgacggtgataagccaacgccacggtttggacgttacgctacaggtaaaaaaggtttaggtaaattagctctttttggtcttgccagggaaataactattgatacagtcaaggatgggaaaagaaataggtttgtacttgattggaatgcactacttgatgcggatggtgtctataatccaactgttgaattatctgatgaacctacagatgccgcaaatggcacgacgataaaattatccaaactcaaacgacaatcaccgtttgatcttgaagcgattgctaacagtttatctaaaatattcattgttgatgataactttaatataagccttaaagaccaacatggtcatgttgtaacggtaaataacgctcgtcgatatagtgggtttgagcagcagttcgaatgggatgttgaatctttggtaaaagatgacagcccttataaagataaattgaaaggaacattgtatacttcacgaacgcctataagacccaattctgggttaagaggaatttcgttattttctcgagggaagctcgttaataatcccgagtttttttcaaacagcacatcaagccatttctttcaatatttgactggatggatatctgttgactttattgatgaccttgatgatgatgttatctcaaccaaccggcagtctattgattgggataatgacgaaatggctcttcttcgtgaatatctctcaacaatcattaatcaggtaaataatgattggagaaataaacgaaaagagaagaaagaaaaagatctcgaggttacaactggtatagatactaatcaatggatgagtactatgcctgaagatattagacagcaagcatcaaaaattatagattttcttggtgaagaggacgcacttgagaagtacagtcctgttattgaagcgctgcataccatagtgccagaatatcctttactacactggcgatatttgaatgagaaaattaaagatagaataaaaacattctacacaaacaaacaatatggaatggcagctgatcagggaacgaaaatatactgtgaggttatacgtgaactcactggttcatcacttgatggtacagaacttgttaatttggttttttcacctaagaatcctgtcattaaattatgtgatacttcaactcaaacaggaatgagtattcagagtggacagcgttcactatcccaaggggttattgagtcctttagaaacccggctgctcatatgccactggataaattagttcctgagcaatattcagaattggattgtttaaacgttttaagtttgatttcttatctttttgaaaggatggaaggtgccgaagttattacggagaaatga

SEQ ID NO: 205648 - DNA, 351 bp, Klebsiella oxytoca; identical to SEQ ID NO: 97620

SEQ ID NO: 205649 - DNA, 195 bp, Klebsiella oxytoca; identical to SEQ ID NO: 97621

SEQ ID NO: 205650 - DNA, 1461 bp, Klebsiella oxytoca
atgaccgaaaagaaaccagtagtaaactttgttaatgcgatttgcggctcaggaaaaagccaccgactgaaagagtacattctcagcttcaagcgcgaagctgtcccagaaaagttcttaatcgtagtaccaacccacgctttagccgagcagttcaagcaagatctgaatctcttgagaatcccaaaccatcacattttcgttgaaggggcgactctcaacctgaaaagcaccctggctgataacttccagacaaatgtggtgataaccacccatgaatgtttcaccaactactgccacctcgctacgttcaatcctgagatgcgttctctactggcagaacacaatgtggtggtagatgagattcctgatggttggtttggagcagaagcgacgatccgccatgctgacaggacggcagaaaacttcccattcctggaatggctggaagagcgaaacgggctgctgtacctgcgcgaagagcactacgacaatctgtacaagtattaccacgagaagcacgctaacagtgacaacttgaagaaggttctttacgtggcgctcgacggtggtggtgtgatgcacaccgaatgtgactcgtcatacagcttctttgcctacacctataatccgatactgaaggccgcaaaatgggccaagagcttcactgtgctcggcgctggcgtgagtcgcagtgggtttgtctggatggcagagaacgtcgctcagatggcggttcaggaagcgggtgaacaccttcagcctgatcccgacagatgcaaacataaaaacgtacctatcaagatcgtggtggttctctcggaggaaatcagaagagcggggcagtcggaactcgcccatgtcttcagcaatcacctgaacgagataaagcgggttcttgggaaggattttatcttcgctactaacaacgataaacccatctgcgacttccagaccattggactcactgaacttggggatcgcatgggaggtgaagcagtatcgatgtccagctacggaatgaacagctaccagggcattcattgcgctgtgttcctcgggtgtgcaaatctgggcgacaaagaccgtaagcgatgggctgactattgcgaacgtatcggttgggattttgaaacggtaatggagaagaagcgccaggcaatgtattttgaacggtgctaccagtttcttagccgaacatccattcgcaacactgacaccgatcaccctctcgtgtttgtcgttcccgacatggcggcagcggaatacctcaagacccattacttccctggctcaaccatcgaatgccttggaatcaagaaagctggaaagcagcatgaaacgcgtttgaaggttctggaacataaggctcaagggctaacaccgaagaaaacggttgaagcgatgggtgtgtctctgagaaccgttcgaagctattggaaccaagaggtttgcgtatga

SEQ ID NO: 205651 - DNA, 492 bp, Klebsiella oxytoca
atgagtgatgactctaatactattacatcaagtgacagttacattaagtctactggggtaagatgtgtaaatgctatgtgtgctctttctttctggcgagagtttattgcatattttatcttgggaagtatgggactatggcttcctccttttttaggggcttctggcgcgaatgcagtttttgatccaatgaatgttttaacatttggtcttgtgacattgtttataatattagaagcaaggctttttatggataaaaatgatgatgctaaatctcctggagtaactaaattaatagttttgctaggtgtgatattattgtgcatcggatatgttaaaggtgttgttacaaatgggactccattattctgggggatgggttgggtacatatctctttgttttttacaatgttagtttggctgcttaaccatgttaatacatcaagatatgatccaaaaggtattaatgagatgcttggggggagcgtatga

SEQ ID NO: 205652 - DNA, 1212 bp, Klebsiella oxytoca
atgagtaatgaaatcagacttccggcaattaaaatagagcaaccaattggatcattttatgcagtttctatgcgttcggatctattatcaaaagttgcttttagttctagagctgaatataaaaaatccgatcttcaagaaggtatcttttcgcttttaaaaggtaaccaacgtgagttggatttaaaacgtagcaaacaaataggccaatatattgacagtgtcgagtcaacattcccaaattctataattcttggcgccaattttgataaggacgggaatttgatcgaggattatgatattagatggcgagtggaaaaaaatggggatttatataccttagttataccttcggaaaacaatgttgtagcaacaataattgatgggcagcatcgattatcagggtttgggtattcagaacgtgaaaatatggaacttttatgttctgtatttattgatcttcctgcgccatatcaggcatatattttcgctaccatcaattttaatcaaaaaaatgttaataaaagccttgcatatgatttatatggatttagagttgaagaagaagataagaaagaatggtcaccagagaaattagctgtatttatagctagaagattaaataaatattgtgaacctttgaaagataaaataaagctaggggcgccttccgacattgatgatactagttcctctatgaaattaatttctctatcaactattgttgatggtgtgatgaaattgataactaataatcccaagaaggatagagatgaacttcttaacttcaaaaataaaaatggccgaagtgctctatcaagaaaaatgatttcccagccgttaagagatttatatattgaatataaagacgatgaaattgaaggtataataagaaaatattttactaaaatcaatgaaatattatgggttcatcaatcggataacagctatttattaaaaacaattggttttcaaacgcagtttgaaattcttaggcaatatttactgtcgacatctgattatgagctcaatggtattgatgaaaaattagaactgcttgtggatattgatttttctgatattttctttactgcatcaggaattggtgcaacacgaatgaagaacatatcattgattagattaaaattgaaacctcttactgatctagttgaacacaaagattataacgactatgtgaggttactcaaatag

SEQ ID NO: 205653 - DNA, 2226 bp, Klebsiella oxytoca
atgtatgtggaaacgtgttgcatagaaaatgagattagttcgaatagtaacgcaggcaaatggaccgaaactttatattgtattttcattatggaaagcagtttgcgctatttgagtgattggctatttatcgataaaaatttcttgctgtattttttgtatgttatatattatttatctatcattagttttggtggggtgttaattatggacgctaatgctttcattgatatgtgtaataagggttttaagtttgctgaagttgatggcgaaaataaatttaatggatgtgaagaggtatacaaacaggctgggatgttaatgagtgagcctcgtaaagtacttggcattattgagtatttgcgacaaaaattaataatttttcatcacaagaataacttagattatttaaaatacacaccagttttgtatgttatacaagaagtggcaaggcgaagggaaaatgatattgacactacatcagtctatacggattgggagaggttggtctctcttataataaaaaacaaaaagcatttccatcaattttctgaagtgaaaaattatagggttgaggataagtatcataactttgcattatcttacattcgattgcgaagtctcggagttgaatttacggagaaagattttcatttttacatagctgaaaatagtcattctttaataacaaataaaatagatgaaatttgtaaagcatatggtggggagagacttttaaacacactagctgagtggttaggaaggacgtataatccaattgcaggccgatttatggaatatcgccatgtttcgttcggtggagatagcattaaacctgcaattccttttggttatcttttggcaattgcttcaaaatataatggagttaatgggtatgctaactcaaatttatttaatcagctattgctattggtttctgatataattgttgtatatgaaattcaaccttacagcatatttgaggctatgtatctcagagacgatgcatttataagttttattagaaataatttgctttatgatagctttgttggaattcctcaaataaattcttctcatgctgcttcattaattaaatatctcaaattaacatttaaggaaccatgttatatttcacataatattaaggtgaaggatttaattcgcatctcattggcattgatttcttgcgcatcaaataaaaagttttgtgatataaatgccaaggaaattgctaggaaggcaaatattccggagtataaagtaactttaatcctagataaggtattgagctttccatctgagcatgttaatgcctatttacgattccctcctataagtacagatattaatcatttttttaaaccagtaataaaaacttcaaaggcgtataaagtttatcccaaaagtattgcctctttagggtgtctcaataccatatgtaatttcatatcattccctaatggcaagtggtcaaataaaattgatagtgaacttggttatgctgttgaaaattttcttcgagaagcttttgttggaaagggtatagaaatagcatatggtgaccgcttaaatggggatgtcaaacttgaagtggatttgttgtgtgagacagatgattgcatctacatatttgaaatgaagaagaaaggtttgactcggcaagcccaatctgggaacgaaagtcacatattatcagatctcgctgatagcgttcttagatcgcattatcaggcaatgcgtattgaaaatgttttaaataattgtgagtttttacatttaaaacataatgatgttgaaagttcgataactttaaaaggtagaagggttatacgtatttcagttagtcttctagactttggagccttacaggataagactgtcttacaacgactcctgactatcgcgattaataataaatttagcagtgaagatgagaatgaaaataaaaaattagaaaaatggagggaatactctgaaaagttaggtgttcttgcttttgaaaataaggaattaggtgatgggagagtgccatttcataattctcttttcatgagtataccgcaaattctctttttgcttgataagtcaaatgatacgggtgaattttttaagtatttacggttttttatttcaacgactacaggtagtcgagatgtgtatactgattttttaagctatataaatatattgggtcagagtgaagttgatggaggacataaatga

SEQ ID NO: 205654 - DNA, 207 bp, Klebsiella oxytoca
atgaatcagcacaacacccgtcttattcgcctccctgaagttctcaatcgaaccggttatggtaaagcctggatctatcatctaatcagcaaaggatgtttcccatcaccagtgaaaattggatctcgtgcagttgctttcattgaaagtgaagtggaagagtggattcaattaactatcgaaaattcaagaaagcatgtcgcctga

SEQ ID NO: 205655 - DNA, 855 bp, Klebsiella oxytoca
atgatgaaaaactggtcaacggaacacaccaaagaagttaaaaaatggctggatgttgataactatcgcaagtttgaagagcttccgctcatacagctttatcatgagctactggcaagaacactgttctttaagccgtatcatgaggaatttgaagcagaagcggtcaggctttacatcgacaggatcttcactggaaaaccgtttctcatcacagaaaagcatctcggctatctcacaagagaggataccctttaccagccaccgcacttctttctgacaaccaccgagcgactggcacagttgagcatcaacggtctgcgaaattcactgttcttttgggatgggagtgatgagtattcggttagccgtgaattcctcgatagccctgtatcagaagctctccccaagttgttcagggatacggtcatggtcgaaattgacctagcgaatggaactgatgaggaaatagctgaatctctcaaggcagcgctacctcaatggcgtaaagtcagaggtatcgaggcagatacaacggacgctatccgcttcggttatggaacgattaagaaactcatcaactacagactgatacccatgatcgacattcttgtatggtcaacgttgcataaggttcgcatatcagaagatcgactttcacgcctcctttacaccgacgatgatgatgaagaacagacccgacttaatcaccaaattcgggacacagacagaccactggcgataaaagcagccagtatacctttcatccgacagtttcatctgttcatcaacaaaaacagccatctcaaaaacatcagagtttcagacgtgatgaaaatcgctgattctgactaa

SEQ ID NO: 205656 - DNA, 618 bp, Klebsiella oxytoca
atgttaaaacctgttgagctgattgaagacgacgagtcgctggccgaggcggatatttccccctcgaccgccagcgcgcatcttagccgcctgatcaacagcgatttattgatttgccttgcccagggccgccatcgctactaccgtctcgccggtagcgatgtcgccggtttgctggagaatatgatggccatggccggcaagcgcgcggtgacgctctcaaccagcacgccggtaaatttgcgcgttgcgcgtacctgttacgatcatctggccggagaagtggcggtatcgctatatgattttatgctgcgcgaagcgtggatagcgcctgacggcgcggccctgacgcccgccggggaagcgcactttacccgcctgggggtgacggtgaaacgcacctcgcggcgtaaagcgtgctgcggttgtctggactggagcgaacgccgccttcaccttggcggggcggctggggcggcgctgctgcagcacggtctgcagaaaggctggtttaccaccaccgcgggatttcgcgaagtgacgattacgccggcaggatggcgcgcgttgcatctgcattttcagctggcggaaagatcgtcgtggatgattaattaa

SEQ ID NO: 205657 - DNA, 234 bp, Klebsiella oxytoca
gtgaagatcgcccttaacggacagttgcagattctgcgcggactgaatcatgccgctgttgctgagcgcgccatcagcgctgattgctacgtcccccgtcgccgcaccgatattgccggcattgtgaacgcctacgccgcgctcggtaccgacaagacgaattttatgggcgtacatcccgcccagcgcgctgacgtctatcgccaccgctggcgccgcactgccgtcggttga

SEQ ID NO: 205658 - DNA, 927 bp, Klebsiella oxytoca
atggcgcacgctgtgtggggagcgatagcggcggcatcgggaaataacagcgcgctggcgggggcggcaggcgcggtgagcggcgagctgctgggccgctggatagcggcggaatattatccggatgttaagacagaagagctgtcggatgagcagaagtcgacgataagcgcgctgagtacgctggcggcgggactgatgggggggctgagcggaggcagcagcgcggatgcagtggcgggggcgcaggccgggaagaatgcggttgagaataatacgctgagtctgccgaaagggatgacggaaaccggacaggcagctacatcctgggtgaaatatgcccaggacaacaatctttcgccggagcaggttcaggctggattacaggatattgtgcgtggtgatttgccggaaagcgcagacattatcaaagccatcctgagtaataaccctggttcggatacggtaatggctctgctggcagcggaagaagcgaaggactacgcgctggcgctgttgacgtcgatcccggcagaaaaagcattgtcgctggcaggtaaagctgccggtatcatcgataacaaaattctgataagtgccgcagagaaaatatcgacggcgaaaccgggtaagcaatttacagcgccgagggatttgaatgagcaattattgtggaatcaggtgaaggataatccaacaattggtaggggattggatggtatgaataacgatcctcggttccctatgtcagcaggattccaaaaaatggaagcaaaacagaaactctctgatggttccactataactgtgcattaccagtacaacgcagtaactggtaaggcctatgatatgaaaatcactacaccccagcgagttcaaccagatcatcaagatgtaataaatagcataaaggatagagtaaaatga

SEQ ID NO: 205659 - DNA, 525 bp, Klebsiella oxytoca
atgcttgtgaccttgtcagataaagaactcagccggatcaacgtcattcaatcagttgttgaaaaacgtatgcgccgtcgtgatgctgctcatcagcttgctttgaccgaacgtcagacgcagcatctgatgaaccgctttcgtgaatcaggtgccgctggcctttcaaaccttcgacgtggacgcccaggtaatcacaggcttcctgagtcactgaagctgcgagtactttcgttacttcacgatcattacagcgactttggaccaacgctagccgcagaaaaattacgcgaacgtcacaacatcacagtatctgttgaaacgctcagaaaatggatgatagctgatggactctgggttccttattcacgtcgcaggcctcgcgttcatcaacccagataccggcgtgactgcctcggagaacttgttcagatagatatggttctccgcacgactggtttgaaggccgtgcgccgaaatgctgcctgctcgtctttattgaggtcgacagggacaaaccagtaa

SEQ ID NO: 205660 - DNA, 195 bp, Klebsiella oxytoca
atgcaatatctaacttatgccacgcttttattactgcttgttgccatgaaagccatagctatgcattctgaagatgtaatgaacacaaagtctgaaataggctctattcttacgatagatcacgagctaagcgaggatgcaaatcaatttacattgcattataaagaactaagtggtgttgatagaaagatttaa

SEQ ID NO: 205661 - DNA, 384 bp, Klebsiella oxytoca
atgaagaaaaatttgcgttataactctcaccactttggtattccactactggatcgaaagtatgagggaacttatagtgagagagctggtaagtacacaacagacacccccggtaagtttaaagttcagtggcatcgctttacagaagactctccactgccacagctactgaaaatggtacctcatgttgcatttaaagttgaggacttgtcagtagccatcagtgatgaagaggtcattctgggcccttatgaaccgatggatgattacttcgtggctattattaatgacaatagtgtccctatcgaactgattcaaacaaccctgacagatgatgaactttgggagagagccagaactggaaatggaagcctgtatcgttga

SEQ ID NO: 205662 - DNA, 549 bp, Klebsiella oxytoca
atgagaaggaagtttcttacaggcgctgaagttaaacacttactagatttcatctccaacaataaattctcaaaacgcgattactgcatggtaaagatggcatttttacatggcctaagagtgagtgagttaatatcattaaaactggatgattatgatccgttctcgcgaaaattatatattcatcgacttaaaggcggtctaaacacctcgcacccactatttcctgatgaatatgcttctcttgatttatggcttaaagaacgcgagttaaatacgggtgcttcgctaccctggatatttcttactcaacaaggtaaaaagatgtcaaggcagaggttctatcagattataaaatactatggtgctctagcggacatatctgtttccatctaccctcatatgctcagacatgcatgtgggtatggtcttgcagaaaggggcaatgacacaagaattattcaggattatttaggacaccgtaatatcaggcataccgttatttatacaacaacgaacgccgaccgtttccaaaaaatctgggattaa

SEQ ID NO: 205663 - DNA, 837 bp, Klebsiella oxytoca
atgacgtcgatattgttcagtgtacctccgccgctttcagtctccgcttttggcagggtctggcatcttactgcatggcttgagcctgtctggtggatagatggtcgtctggcagcgctagaagttttgagtcgtctgcgggaccgggacagcggagttcaggtatcgccggaactctttttttctcagttaccgctcccggaacagctccgtgttttgtgctggcaactggagattctggtgctgatgaagccctggtgcgctgcaagggaagttatgatgagtctgaatatcacccgacagctggcaatattgattctgtccaatcctgaagttatggaaaaattactgctgctggctccctgtgtacgtcttgaaatcagtgagaattttttgctaccggactcgcaacctgatcaggattctctgttacccagtctgcaacagttagcgcctctgtggctggatgactttggtactggcagtaccgggctgtcgtggttgatgtctggaatgtttgaggtactaaaaatcgctcgccctctgatggaggtactaaaaatatcccccggaggggaagcttttctagctggactttgcgggctggcacacggtgcacaggtacaggtgatttcagaaggagtggctgacctcagcatgctgacctttgccagaaagaccaaggtgagcggttgtcagggatggctatggcctggattcagaatggagcaactgcaccaaattccggacaggctgccgatgggtaagcatggcgcagcatcaggtgcatcaggtgcatcaggtgcatcaggtgcatcaggtgcatcagcatcctga

SEQ ID NO: 205664 - DNA, 750 bp, Klebsiella oxytoca
atgttactgaataatatacacccgcttgtcggggataatcatatcccccaccgattccgcaaagatgtgaataatcccccgttctggcaggtgacgatcgtggatacctgtaatttcgggagggaggggctcagaattgcaattcatcagcatttcctgtcgtcgggatatgttgaggttacagtggccacgacgctggcgctgcctcgcctggccatcatgatgggagagaagaacagttcaacgggacagcgctgcctggtacttcgtctgcctgtttcctccagcgaggcgttacatctgctgctggagttgggcatgctgcctgtcggatactatgcccgggtggtggtgatgtcggatttttcatcgacgatactccttagggtactgataagcacaggtatgaccggtcagatatgtctgatcggtgaccatctgcccataagcaggctatgccgcaccatcgtgccggtagagtgggaaagtaaagctgtaatgggaggacaaaatgaagttctggtgcaccagcctcatcgacaatttaccccagctgaacggagggtactgatacagacgttgcaaggcgtaccggtcagagagcaggctcgtcaggctgataccaggattaaaaccatatacacgcagcgggccaacggtctagataaattgctggtacgggacatccaaacactgctgaggcagttctgttcagttaagaactttatacccgcaggtaatctgggatga

SEQ ID NO: 205665 - DNA, 135 bp, Klebsiella oxytoca
atgaattatgattggtttcataataaaagaaatgtggaaaaacaagtgatactccacgtccatttttatatgacatttaagcatttaatttttaaccttaccagaaaatatagcattacagacgttattagctga

SEQ ID NO: 205666 - DNA, 957 bp, Klebsiella oxytoca
atgacactggtttcaaaactaaagaaagagttgaagagaaaagaagttgctgccctcgtggcttctatattcctgatggcatattcatccggagctaatgcttacacatgtcaggaccgttttgggaatgaaacatcaaatcccgaaaatgcatttttaaatgtctatgcggacttaacaccaaccctaacgcctgggcaagtattggtagttaacttcgagtcttccatacgttgtaaaaatgatacacccagttatcgtaacgattacgtttcactacttactggctcatcgttttccggagcattggaaaattttaatggcactgtacgttattacgggtcagattatccgttacctacacaaacagaaacaaaaagccataattttgataatggaagttatcagggctggcaaacaactcttttccttacaccagtctcaacggcgagcggagtcttgataaaaagtaacgataaaatagcaacactagtgatgagacaagtggggacagataaggatggggggaatgtgaatcaacacctgtttacatggaatatacttgctgcaaataatgttttcttgccaactggtggttgtgatttatcatctagaaatattacaatcactctacctgactatcccggtacggcagcagtccctcttactgtatattgcggaaaaaatcaacaactcgcttattatcttactggcgtgacggaagatacggccaataccatatttaccaacacgtcatcatctaaccctgcaaccggcgtaggtgtacaactgtctaaccgcaatggcattatcgcaaccaataaaagtgtgtctctcgggatagtcggcaccagtcctgtaagcctgggtctgacggcctcctatgcgcgaacaacaggtaaggttgtggcaggtaatgtccagtcaattatcggagtaacattcgtatacgaatag

SEQ ID NO: 205667 - DNA, 504 bp, Klebsiella oxytoca
atgattattaccaagaacattatgctggcgggggcgttgctttttactacaacattctccgcgcatgcagctgaagtgaccattacggtcaacggacgcgtagtggccaagccctgcaccgtatcaacgccatcggcaacggtagacctgggcgacttgtttacatttaattatatacaggccggctcgggctcagcctggcatccggtaacgctgagtttgaccaattgtccaataggcacctcgagagtcacggcaacattcacggggacaacggacagcacgggatattataaaaatcaaggtggggcaacaaatcttcaattggagctgcaggacaccagtggcaataacctaaacaacggaaaaaccaaggcggttcaggtcgatgagtccacacagtcggcgagtctgccattacaggttcgagcgttatcagttaatggcaacgccaagcaaggcagtattcaggccgtaattaatgtcacgtacacttacgcctaa

SEQ ID NO: 205668 - DNA, 525 bp, Klebsiella oxytoca
atgagaaaataccttccaatcctgtgtttgttgccgttggttgcgggatatgcccatgcggcggacagtactatcaccatcacaggttatctaaaagacaatgcttgctcggtctctgttgactctcaggattttacggtggatttgttgagcaatgcggccaagcaattcaaacaggtaggggcggtcacatctgctatccctttcaagattgtcttcgacaagtgcggcagttccgcgacggcagttcgcgtggggtatgtcggaacctctgacagcgacaacactaccctgttaaagattgatgctggaacaaacgccgcaagcggtattggggtgcaaatactggatcgcgacaagactccgattccattaaatgctgctcaggactccctgaagtggacgacattgacggcgggccaatccaatacgttgggcttttatgcacgcttaatggcaacgcgcgctcctgtgatggcaggaacagtgacagcgacggctaatttcaccttagagtttcagtaa

SEQ ID NO: 205669 - DNA, 2592 bp, Klebsiella oxytoca
atgaaaaaataccacatccgggaacgggcgctaaacaaagcaatgcttaccccgctggcattgctcttggtggcttcaacattttctgcgcgtgcagaaaattatttcaatccccgatttctggctgacgacccggcatcggttgccgatctctccagtttcgaaaaggggcttgatgcgccgccgggtacctatcgtgtcgacatttacatgaacgagggttacgtgacgacgcgagacatcacctttgataagagtgatgacggtaccaagctggaaccgtgcctcactcgctctcagctggcttcacttggcgtcaataccttgactattccagatattgccgtaatgaagagcacggcctgcgtgcctttcacacgtcttattgctgatgctgcaagctcattcgatgtcggtcgccagcgtctttccatcagcattcctcaggctttcatgggaaatcaggcgagagggtacatagctcccgagctttgggataatggtattatggccggtttactcaattacaactataccggcagtgaagtgcgcagccacaatggcggcacccgcaattactcctatctcaatctgcaaacgggtctcaacctgggggcatggcgcctgcgggataactcaacctggagttacagcagcggcacgggatataacgaaaatcgctggcaacatgtcaatacctggcttgaacgtgacattgcatcctggcgcagccggctgacgatgggtgatggctatactgcgggtgatatctttgaaggtatcaacttccgcggccttcaggttgccacagacgataatatgctacccgacagtcaacgcggctttgctcccgttatacatggaatagcacgtggtaccgcacgtgtatcggtcaagcagaacggatatgaaatatatcagaccacggtacccgccggcgcattcactatcggtgatctgtatgcggcaggaaacagtggcgatctgcaggtgacggtgaaagaggcggatggctccgttcaggtctttaccgttcccttctcatccgttccgatgttgcagcgtgaaggacaggtgaagtacgcggtgactgcagggcagttccgcagtggtaatgaacaacaagacaagccgaagtttttccagggaacggcgctttggggattacccgacggctggacggtctatggcggcacacgtgcctcaaacgactatcgtgcctttaacctcggggtggggaaaaacctgggctacctcggggcggtatcttcagatattacgcaggcgaatgccaccttgcctgacggaagcaagcatcagggacaatctctgcgttttctctataacaaatcgctcaatgagttagggaccaatttccaactggtcggataccgttattctacccggggcttctattctctgggcgacaccgcgtggcgacgcatgagcggttactccgtgatgagtgaagacgggatcgtgaatatcaaaccaaagctgacgaattattacaatttgaactacagcaagcgcggtcgtctgcaggcgacggtgacacaacaggttggacggacatcgacgatatacctgactggcagtcatcaaaactactggaataccagccgttcagatgaacagttgcagattggttataacagcaccattcaggatatcagctggagcctgagttatagtctgtccaaaaatgcctggtccgacgataaagaccaactgcttgctttcaacatcaatattccgttcagccactggatgcgctcggatacccggtcagtattccgaaatgccaatgccagttacaacacgtcgacagacttcaagggacgtacgacaaatacggccggcctttacgggacgctgctggaagataacaacctgagttatagcgtgcaatcgggctataacagtggtgggaatggtaacagcggcgcaacaggtaacgccgcgctgaattaccgcggcgcttacggcaacgccaacgtcggttatagccacagcggtgactataagcagatttactatggtgccagtggtggcgtacttgcccacgaaaatggcatcaccttcagccagccactcaatgacaccatggtgcttatcaaggccccgggggcgaaacacgtttctgtcgagaatcaaacaggggtgcgtacagattggcgcggttatgccgtgctcccttatgcgatggactaccacgagaatcggatatcgttgaacacgaacacactggcgaacaacgtcgagctggaagagcctgtattaagcgtcgtccctacacggggtgcagtcgtgcgtgcggacttcaaggccaaagtcgggctgaaggttcttatgactttgataaacaaaggcaatccagtcccattcggctctgtagtctcttacggagaaggtcagtcaggcagcatcgtggcagatggcgggcaagtttaccttaccggtcttgcaccaaaaggtaccgtcaacgtgaagtggggcaatagcgaaaatgagcgctgcacggcgacgtacagtttaccggctgacagtcaaaaccaggctttgagctatgcctctgccatttgccggtga

SEQ ID NO: 205670 - DNA, 702 bp, Klebsiella oxytoca
gtgattaaaatgaaaacgaccggaaacgtcatgggttcactgctagctttggcagtcgtattttgtactccgcatgctgaagcgggcgtggctcttggggcaacacgcgttatttatccggcagaacagaaacaggtcactctgggtgtgagcaacaataatgataaagatacctttcttattcaatcctgggtcgagaacgatgatggtcaaaaagaaggccgattcgttattaccccgccgttgttcctcatgcaggggaaaaaagaaaatacgctgcgtattattgatgcaaccaataacgccttgcctaaagaccgcgaaagtcttttctggatcaacgtcaaagccattccttctctggacaaggaaaaacagaaagaaaatacgcttcaactggcgataacgagccgaatcaaatttttgtatcgcccacaaaatctcagtatggcgcctgatcaggcccccggaaaactgacgtttaaacgcgatgcgaacacactgaaactgaataatccaacgccctattttctgaccgtcacggaattgaatgccggcacacgttctttagccaatgtcatggtcccgcctatgggggcagcaacggtgaaactgccgggcgatgccggcagtgcaattacatatcgcacgattaatgattacggtgcgctcacgtctgtgatgaaaggcaccttgcagtaa

SEQ ID NO: 205671 - DNA, 540 bp, Klebsiella oxytoca
atgcttaaaaccagactgggactctgcctgcttttcattgctcctctgtctatcgctggcaacaagtggaacgtcacgcttcctggaggacagatgcgctttcagggggagctcatcgctgaagcctgtacggttgaggcgggtgacaggcaattggttgttcgcatgggacaggttagcagtaaccgtttcaaggatgcaggggatgatgccgatccggtgccgttcagtttgcatctccaagattgtaatcccaatgtcagcgatcgggtcggtatcgtctttcatggcgtagccgatggcaaaaaccctaatgttctgtcggttggcgaaggcgagggtattgcgtctggcgtcggcattgccctgttcgatgaacaggggcaactcatacccattaattcagaacctcagtcctggaaaccgctgactaaaggaacgcgtatcttgcaatttgttgccaaatatcgggcaaccggcaatacggttatcggtggtgctgcaaatgcccaggcctggttctctttgacataccaataa

SEQ ID NO: 205672 - DNA, 549 bp, Klebsiella oxytoca
atgcgtaagatttgtcttatcaacaccttgatggcagcctcgttgttgactacgggtctggctcacgcagcgacgactactgttaacggcggtaccgttcactttaaaggtgaagtagttaacgcagcctgcgccgttgatgccggttctgtagaccaaaccgtccagctgggccaggtcaaaactgccacactgagtgaggcgggcaaaaccagctcttccgtaggcttcaacattcagctgaacgattgcgatactacagtagcgaccaaagcggccgttgcattctctggtgttgctgtcaatgctgctaatccaactgctctggcactggaaagttcttctgcgggcggtgctaccaacgtgggtgtgcaggtgctggacagtgcaggtaaagcgctggcattcgacggtgcaaccttcagtactgctgccactctgattgacggcactaacactctgccattccaggcgcgttacatcgccaccggtgctgccactcctggtactgccaacgcgaacgccaactttaaagttcagtaccagtaa

SEQ ID NO: 205673 - DNA, 597 bp, Klebsiella oxytoca
atgaaagagagaaaatatttgacccagtcagagatagcgcgaattttacgcatcactcagggaaagagaaataattccgaacgggactattgtctaatttatatgagctttatccatggttttcgggtcagcgaggtttgtagattaaaggtttctgatatggatttggcggagggaagcatacttataaaccggatgaaaaatggtttcagtacccgtcatcctttgttagctaatgagattcgtgcaatacgtgcctggctaagggtccgtttaatgatgcctggtgctgaaactgactcgctatttttgtccaagcctggtaaacccttaacaaggcaaagggtttaccagattatacgtcaagctggtgaacaagcaaaaattagagtggtatcacatcctcatatgcttcgccatgcttgcggttttgcactggcagatcggggggcagatacacgattgatacaggactatcttggtcacataaacataagacataccgtcagatatacggcaagtaatgcagagcgctttaaggggatatggagtacagaaaaaaaaagaaagactaaacaattaggaccaaattgttaa

SEQ ID NO: 205674 - DNA, 1149 bp, Klebsiella oxytoca
atgatacttccggcaacgcttgccaccatcagacttactttcattaataacaaggaacgagctattgcactgggaatatggtcaacaattggaactgccggggcagcactcggaccgttagtaagtggtgttttactggagtatttttcgtggcaatcagtttttctaattaatatacctatttgcatactcgttaccgcattgagtacatgtatgaatataagaaaggtagagagagtagcaaaaaaagttaatgtaatggatcctctattgcttataagttcaatgcttatgattgttttctctataaagtctatattcagtcaacatgaagaaccaatgcttgttcctttgttgcttttcggaatgatcttggtttttttgtttctcaggaaacaattaagatcttctgatgctatgattgatatcagccttttcagtgatagacatatcttggctggattaattatggctctatttagtatgatttctcttgtcgggttcgagtttttcattacacaagaacttcagctggctattggcatgagcgcattgaatgcaagcctctttttgcttccatttataatgtctagttgtctttctggaccttttgtaggatgggctctgggtaaagttggattacgctctatagcatttatggggatttttctcagttcagtaagttttgccggcttatctttaacagatattagtaatcataacttacaggcatggggaatgatggtactccttggattcagtattgaagcggctatgctcgcatccacaacagcaatcatgaatgcgacacctgtcggtaaaggtggagaggcaggagctatagaaggtatggcttatgaatttggaacgggaattggtatagtaatatttgggcttatgacatcctcgttttatacaaaaaatattaaatcatacttaggtgaaagtaatgttcctgatatccatttagcatcattatcggaaactataaaatatgctgaaattttatcggacgtcgataaagaaaaactgttcagcatagcaaaacaatctctcctggattcacatttttatatcatgttcatagctagcatttttcttttaattatttccattgtgatatatttctttctaaagcccagagtgtaa

SEQ ID NO: 205675 - DNA, 237 bp, Klebsiella oxytoca
gtgcaagttacgcgaattctggacagaatcgtgctgtttagcgactgtacggcgtcgataagaactgcccagatgccgatgtttatctgcaaggcgcttgaccagtgggcttgtgaaaatgacgtgatgctgcgacttatccagaccgatgcggaacatatttattttactattatgctctcacatatatgtaattttttaaaattaaaaactcagaacagccgaataaaattatga

SEQ ID NO: 205676 - DNA, 930 bp, Klebsiella oxytoca
ttggtagaagcacaaactcagcttaaatttgacaaaaaaatatttgacagtttacaaaagtcagaaagcatattcgaaaaaataaaaaaaataaatgaaagactttcacaaatcggaatatcttacccgcagacctttacagatttaccagaagaaatagaatcaaggaaacaatcattagtattgttgatacgtcaacaaaagaaaaatgagctgatttcacttcctgaaggatgggaatcagtcttgaatgaatcattcgctacaccagatgatgttttcaacatagacttagaacagatcaatcgaaaagataaatatttcttatacaaaaagaatgaagcgaataatcttagacttaaagctttaaaaaaagagcttaacgatttgttagatatggataaagccttaacaaatgctagacagaaaattaccacattaaaggaacaactcactatattaaacaaagattattctaaaaaaaccatcgctgatatagagttaacgttccatatttatagcggtagacttatccaaaactaccaacgtggcttaggactatttatagatgaagggaatggggatagactgaggttctgcacagcagaaaaatcagaacatgacgcaaccatgtcaatgagttctggacagctatcggcattaagcttggcctttttcctatcactcaataaagtgtatgcaaagtcccctctggttctgatagatgatccagctcaatctcttgacgagatcaatatagcttctttaagcgacttgctacgctgtgagttaagtaataggcagttgatactctcatcacatgaagataatatttcttcatatctcaggtttagatttatgcgtgcaggcttgacgcaaaaacctttcaacatgcaatcacatactggcaagaaatatgatatcaactag

SEQ ID NO: 205677 - DNA, 1020 bp, Klebsiella oxytoca
atggcagaaaaaaaagagaaattagatgggaaagcattcccaattctaacattcggtttagctttaggcgtttttttaattttactaatcgtatacactgtaatgaattgggaaacctttaaaaataacatcattactgttataaatactaataacattgttctttttgggattttttttacattagcattccttattacagacattattagaatggttttagtgtctaaatacccagaaataaagaaaacattgagggttatttcaacgatattttttatattattgattatcgttttttctgttttatcttcagaaaatggtacaagttatcaaacatcattaactgttcttataagctcaatagtgctaggaacaggatggtggattcaggcgacaataaatgcagcttctgcacgtaagtcccatacaatcaatacaataatgaaccaaagacatagcgttcattatttcaacaagttagataatgtctaccgccacttcggattaactaaaacaatcccactgaatattgcaaaacagtacagatgtggttttgctggagaagacaggcaagtcaaaaaggaattaatttcagcttgtcgtgatgcatcatatatccttaattattacgaattcatatcagcaggtgttttaagaggggattttgatgaaaagttaataatggaatgtttttttgacccaatgcaaaattttgagcatagagcattttatattatcgagattttccaaaaagaagctgggtctaatgcgggtattttttccaattacattgagcttttagacagatggatctcggacaattcattaaccacccgcaaaaaaaatggtgaagttataaaattatatgacatgtctcacaacgaagatgattcttatgaggatgatataatagaaaacaatgaaaataacaataacaccgaaaatgtatcttcaccagaaatgaaacccaaccatttaaatgttgtcggggaatcggaagaaaaagcatcttcttaa

SEQ ID NO: 205678 - DNA, 384 bp, Klebsiella oxytoca
atgaaagaaactataggattaccattctgtaagaaaaacaacaaagtcccagctaaatcattgcgcactcattgtgtcagcgcccgattcaaccatgaagaactacagcttctcaacacgaaacgcggtgataaaagcaagggagagtggcttcgcttagcgtccctggataagcttcctttgtccgttcctgccatcaacatagaagcctggaaatctctgagcgaaatttcacagaagctgaacaagcttgtcgctcatctggataacaaaagccagggtagctctctaacgcaaacagaactattcgcagtgaagcgccagatctctgagcttcgcataaatcttgtcggtgcagatctatggggagaaagaaatgaatga

SEQ ID NO: 205679 - DNA, 1272 bp, Klebsiella oxytoca
atgaaagggatgcaaaaaatcaaaagaggaaaaacctttaatgggctaatttcttatttattaaaacctgcttcgcaccacaagtcagatccgtatgtagtcggtggcaatgtcatagaaagcttcgcagaagcactaagtgcagagttcaacgctacgaagttcctacgctccgatgtcagtaaacctgtttggcacaattctctgcgtctgcctgctggtgagagtctacctatacaacgatggaagctgttagccgatgactatatgaagcgtatgggcttctctgagacgcatttacgcgcttatgtcctgcatgatgataaagatggccaacatatccatatagttgcaagtcgcatagattcaacttcggggaagctctacctcggcaggaatgagaacctggcaagcacgagaataattcagcaacttgaaagagattacaatctgacaagaaccaaaggatcgaaagcatctccagtagcgctctcacctaaaccgaagctcaaaaaatcccgtaatgaactgatgatggagaaaaggactggtgagctatgcccgaaaaccatcatccaaaacgctctggaagtactccttgccgataaaccgtcaaccactgagtttgtgcatcagcttgtcgcacaaaacatcagagcaatcccgaacatcgcctctaccggacgcatgaacggcttctcattcgaatacgatgggattgctttcaaagcatctcagcttggcaaaggctattcctggacggctttacaggacaaactcgattatcagccggaacgcgataatgctttcctgtttaaactgaaatcctctgtcagagaaacatctgttagtgcaactcatgatatggccataactacagatgctcctgaaatcatgacagaatacgttaaccgccccatagaagcacttatcctcgataaccgagctgcttgtcaggacgaattcactaacgcttcagtcaaacagcttcactcagaaccaggcgctggttctcaaggagcgtttgcaaccaaagcggtaaaagaagcctctaagcgaagctatatggtttcaatgttcagatggttagaaaccatcccctatctcaataccattattaccatcttcaaaaacctcaaaatcccaacccttaaacgccctctaaattacaaaaccatcactgacgtgagagtgatagagataacgcctctccccaaaaaaaatcttattgtatcagcacctcaatccagaagagcttcgctttcaatgtag

SEQ ID NO: 205680 - DNA, 405 bp, Klebsiella oxytoca; identical to SEQ ID NO: 134329

SEQ ID NO: 205681 - DNA, 342 bp, Klebsiella oxytoca
gtggcggtagccgagcagattctggccgcggagcagcatctgcagcggggtcttcggcatggcctttttcagttcgcgcaggcggacccaggggtcttcgccgaggaagcggatgcaggcgtcaaaggtggcgccgccccagcattcgagggagccgtagcccacgtcgtcgagccgcgcggcgacggggagcatatcgtcgaggcgcaggcgggtggcaaaaagggactggtgggcgtcgcgcaggacgacatcggtaatggcaacggtcatggattcctccgtgaattaagggttaaggcggcgatggtggtgaatagcggcgacaattaccggctttaa

SEQ ID NO: 205682 - DNA, 126 bp, Klebsiella oxytoca
atgttttgcgtttattttgcctttgataataagcggcaaatacaattctttaaatttttctgtgagcatagtaacggaatttatgtgctgttttttatatgcgtcaaggcgggtttgttagaataa

SEQ ID NO: 205683 - DNA, 471 bp, Klebsiella oxytoca
gtggggacgattcacggcggcgcggcgctgaatatcgttccgcaatcctgctggttcgactttgaaattcgctatttacccggcacgcgcccgcaggccgtgaccgacgccctgggcgattatgcccgcgagcagctgcttccggcgatgcgcaaggtggcgcagcgcagcgatattcatttccagacgctgagccactatccggggctgctgagcgacccgcagtcagaattcgcccgctggctggcgcagtggtgcggcagcgatgatttcaccaccgtcgcctacggtaccgaaggcggcctgtttgacgaggcgggcgttgcgacgctgatctgcgggccgggcagcatggctcagggccacaaggcggacgaatatatcagcatcccccagaccgaacgctgtatggcgatgctggaaaacctttgcgcctggatgcgcgccgatccctccgattctcttcgctga

SEQ ID NO: 205684 - DNA, 1092 bp, Klebsiella oxytoca
atgagcttttacattaagaaaagcattcgagtcggaccgatgagatttaacctatccaaatcaggagtcggtgcatctattggtataaaaggactgaggtttggtactggcccaagaggaaattacatccacatcggtgctggcggagtctattatcgtgcttcgctttcaccaagcctggtcccacagaacagaaagaaagttcaacatgtaccagaccactccccaatagaacatgacactacacatgcacctctcgaggaaatcgagtcatcccatatctcggaaatcgttgattcaagttcccgagaactgcttgaagagttgaacaacaaacgtaagaagtcacaaatatggcccctggtcatgtgcctttcgattgcgctgttactttacggtttttcacagacatggcctgattggtgcctcgctataggctttatcgtaggggtagcaatctctgtttttgcttacatgtacgatcagctaagaaagactactgttcttttttatgactttgatgatcaaatgatggcatgttaccagcaacttcatgaaagtggagccaagctcgcaagctgctcaaaagtatggcatatagaagcttctggagccgtttatgaccccaagtatcatgccggagctggtaacttactacgtagaaaagtcacctcaatcagcaaatcaaagcctccctttgttaaaacaaatattgagacgattgctatcaatgtcggtcgccaaacattgcatttttttccagatagagtactggtttatgaccgtgaaggtgtaggcgctgttggttataaccagctattcgttaatgtagatgatagtcgattcattgagagcgaaggtgtacctggagatggcatagtcgttggcaggacatggaagtatgtgaacaagtctggaggcccagacagaagatttaaagacaattcagaacttcctatatgtctttatgaaaacctttcgtttacaagtcattctgggctaaatgagttattacaactgtctaaaactggctatggagaaagcttttcacattcaattgaaacacttagcaaaaaagtcatttctgcttag

SEQ ID NO: 205685 - DNA, 255 bp, Klebsiella oxytoca
atggaatgccgaatcgactgtggggcctgttgcattgctccttctatatcaagccctattcccgggatgccacaaggcaagccagcaaatgtaagatgtgtgcagttatcggaagataatttatgcaacatctttgggtcaatccaccgccccaaggtgtgtagcaatctgcgcccttcactcgatatgtgccatacaaatcgtgatgaggctatgggttacttgattcatcttgaaaagctgacctcatcatga

SEQ ID NO: 205686 - DNA, 690 bp, Klebsiella oxytoca
atgtccgtagatctgctttttcctgtcgttcaaaaaataaccaaccatcgtgatgatggccgttactcacttatccatagctctgaatatgtgcttgatgggcttatataccgtttgaactatgattcgatgaagaaaggttatcatccgatcagaaaagaaatcattgatgcattcattaagcagttacaggctatgcaatcgcactacagtaagatttttgctttccgatttgacttatcagtgccggaagggatgcacgttacggaaagtaatgtcttagtgagtaatctttttgagcggctgagaggtcgtttcaaaaagaaggcgtggaatgaacagccgatcaaaaaatttgcttatggctgggttcgagaaaaaaaagctgctaatcaggttcattaccactgctggattgcattaccttacttccaggttcaaactgctggctttggtaacacaggcatgattgggttgataagtgagctttgggatgaattaacagacaatatcagtcgcgtgcatttagccgagaatagtcgatactctattgtaaggggtgatcacgatagtcttgtggattttgttgagcgtatatcgtacctcgcgaaaaacagcggtaagttttcatctggggaagggcagaggatcttttcaacgtctaagctcagaatgaaagagagtaattaa

SEQ ID NO: 205687 - DNA, 2298 bp, Klebsiella oxytoca
atgaaatataaccacctgttgtcagatatcgcgctgttgtgtttccccctgttggcattaatgttgagctttttcaaccagaacgctcaatgggggatcaattcaacaattgtgttgatcttatccactcttccttcgttattgttaacaagttatgagatggttaaatctttgctcaaacaccaggttggggttgatgtccttgcgattatttcaatgtctggtgcactttggatgggagagtcggcaacggcagcagtgattgccgctatgaccgccacaggcagattgcttgaaagctatgctcagggccgtgccgaacgagaaatgacctctctgctttctaaagcacctcgttcagcgaatagacttcttaaaaacgatattcaggttatccccgtagaatctattcagcccggtgatttgctcttagttaagccgggagaaactattcctgtagacggtccactggtgagtgcgagcgctgtcttgaacgaatcctcaattaccggagaatcattacccgccccccggaaggctggtgcactgatgcttagtggtgcaattaatgcgggagatgccctgaaaatgtatgcagcccgttcagcaaaagacagcacgcttcagggtattatccgtgtggtagagcaggccagtcagtcacgtgcgtcaacagtacgactggcagaccgttatgccgtctggtttatcccctttgcccttggcattgctctactggcatgggccgtgagtaacgaacccgttcgcgcattggctgtgctggttgtcgcaaccccctgtccacttttactggctgtaccggtggcgttggtctccggcatttcccgctctgcacagagaggggtactaattaaaggaagtgccgcactggagcaactggctcgggcagatcacctattttttgacaaaacagggaccctgacaggggggactgcaaaactgacgtcgattcagagccttaatccacattatacgcagcaggatttactcaggctggcagcaagtctggatcagttttcctgtcacattatcgccagcgctattttacaggaggcacatgaacaaggcttaggctctttaccaataccggaatcagtgcaggaagtggccggagcgggtctgacaggaaaaatcaacgatcagcaagtatgtattggtacattggattttgttctgagccacgccagaagtggtagctggtttgagtccgcacgtcagcgcttgttcattgaaaatgtgacggtagttgcgatcgcaattgatgcggagttggtcggctggctattgctctctgatcagttacggctggaaacaccaagagctttgcgcatgttgcgaaaagccggtgtgcgcgagatagttatgctgacaggggacaggcaggaagtggcggacagtattggtacaggccttggtgtcgatcgtgttctggctgaactgaccccggagatgaaactggcgcatatattagatgcctcagactctttttgcacgatgatggttggtgacggggtaaatgatgccccggcacttgcagcagctggggtcggagtcgcaatgggggcaaggggaaccgctgcggcagcagaaagtgctgatatcgtactgctgacagatcagttagaccgattggttgatgccagacaaatagccagactttccatgcgtatcgccacacaaagtgtcttgctcggaatggggttatgttgcatagctatggttattgcagcccttggtatgttaccaccgtttgaaggtgcacttttacaggaattcattgatctcctggctattctctcagctttacgggtgctgacctgtcgggttacacgcccactagacaaggctataagtaaccaacagcttgaaacattgagaaacgagcacaagcatttacaacctgttcttcaatgtttggctgaagttgctgcacgtttccccctagcagatcaggaagagcaacgtatgctccttaaggagctgcatgaacaactggtccagaagatcctgtctcatgagcaacaggatgaacaagatctgtacccttcattatcgacaatgctggtcggcgatgacccccttgctgctttgtatcgtagccacaaggaaatatatcaggaagtaaggaagttaggtcgactcagtgaactcctgcagaacacagatgtttcagctgatattattcgtgatgtacaacgttccttgtatgggcttgaggctattctgcagctacattttgctcaggaagaagagttatacaacagtcttcaggcttaa

SEQ ID NO: 205688 - DNA, 765 bp, Klebsiella oxytoca
atgactatccttataaaaaccttaaaaatcatggcgtcaggtgttgttttcgtttcaggtataaccaccgccaccagtaccgtctatttcttgccagaggcaaaatcagcaggtgtcgcaagcagcgacaaaaacgccctgatgtttctcgggatggacagggatgtaaatctgaaggggatatgcttcgcgatgacaaagcaatcctcatcaatcgttccgctggtagatatcactgctacaactgataacggcagattcacgatgcacggactgcgcccaaagaataacgacgatacgaaggaattggtctgttctcttggttcagaagccggggatttcttgacgggcatttcgaagtcaacagtcgttaacgtgaagctggatttcaacggcgagatccgcagttacagcttcaacactacagagttcggaaagatattgactaccaatgggcaagacgtgtgggaagaagcagctaaaggctacgctcagggagtacgtgcccccgttttctatggaagcggcagcgaggcccccaaaaacaataaagtaacctcaaatgtcgatacacccagttatgaagcaagcgatgagaaacttaatgctgtctggaaaagacttagtcctgaaacacgaaaacgtttactcccttctcaaagagaatggataaagcaaaaatccgcctgcaataatgagcagaaatgtcttatcgacatgacgaacaatcgcattcgtgaactggaatctgaacatggaaaataa

SEQ ID NO: 205689 - DNA, 498 bp, Klebsiella oxytoca
atgctgcgacaacaatccccctcggccgagacggggataaaacagactcagcagcagctggcgcagcttttacagctaaaaccggactgggctttgagttatggcactcatctggcgcagcaggcgctgacactatggccagaacaggcgaaaccgctggcgcaacaatggcaacagcaggtcagcgccgccgcgcttcccgtggagaatctcagcggctggcaccagggaatgacgcagctacagcagttgacgaaccggcttaacgcgctggatgaacagaaggggcggtatatcacggtgagtgagctgaagtcagcggtgtttgccataacgcagtcgctcagccgtaccgttccggcggaagagcagctgcggcaactctccgcacagccgcacaatcagccagggtctgcggcacagcagaaccagacggagcagcatctgcaacaactgattgcccgctatgctgtgctgaaacaaaaaacggcggaataa

SEQ ID NO: 205690 - DNA, 519 bp, Klebsiella oxytoca
atgaactggaccgagttcgtaattaaacctggattaatattactttctggcgctataacaggattgatcgttgctttttttacggcaagatatgctctgacgagattctataaggaaaagtggtgggaaaagaaactaacagcttttcttgaagttactgagtatatatacaaaatcaagagagctgaagattattggttcgctcagacagagagtacgcagtatcaagatgaaacatttcaggccttatctaaagaggaggaagaagatcttcgttcagaatacgtgaaagggatgaaggagttaacaagaatatctcatttatcttcatttaccttgtcaaaaaaagcttctcaattattgggagaatacattgttgagcatgataaaatatatccttcttggtggcaggatgagattgatagttttgaagcatcagaaagaagtcaaatattaattaatacattgcttgagtctattttaattgaagcaaagcgtgagttaaaattaaaagggtaa

SEQ ID NO: 205691 - DNA, 1269 bp, Klebsiella oxytoca
atggcaatgattggcgtgtatgcggactgggatggcctgcatggccccagacgaatcggctttttgcatagtcgccgggcccgtgcgcgggaaatatttgaatttgagtacgatccggatgctttagccgatcccgagcttaacttcctacagcttgaccctgaaatagtcttgtttggaggagcgcagtatccaacaccaccgcgcgataaatttggggtttttggtgactccagtcctgaccgctgggggcgaatgctgatgaaaagacgtctggaacgggatattcgcgaagggcttctgcctgaagggacacaactgcacgaatccgattatcttctgggtgtgcatgatctttatcgagttggtgctctgcgctacaagttggaagatgaaggcgagtttcttgataatcgaatggatgtcgcggcccctccatttaccgaaattggcgcattagaaagagccagccggtcacttgaggatgatccggataacagagcattgatgggccatgaatggctaagaatgctaatagcaccaggcggttctctcgggggcgcacgaccaaaggcaagtgttgcggatgacaatggacatctctatatcgccaaatttccgagtacaagagatgaatacgatgtcggtggttgggagatggttgttaacgctctggctgtcggttgtggccttaatgtggcttctgcacaagcgcgaaaattcgccagcgatcatcattgttttatggtgcgtcgttttgaccgtaccaatgctggtcagcgtcttcattttgcatctgccatgacgttgacccgacaccaggatggggatgattactcaacaggcgtcagctatctggaacttgctgaagttctcatcagaaatggtgcacagaccaatgctgacctacaggaactctggtcacgcatcgtttttaatattctggtctctaactccgatgatcatttgcgaaaccacgggtttattctggttccaggtaagggatggcgactttctgaagcctatgatataaatccggtttccagatctgatggcttgaagctcaatataactgaggcagataacgcgctggatctggaattagccagggaagttgctgaatactttcgcctgaatctggccaaagctgatgagattattgccagcttccgtgggatagtcagccagtggagaactattgcggacagccttactcttccttaccgggagcaggaacaaatggcggaggcgttcagacgtgcaatgtga

SEQ ID NO: 205692 - DNA, 483 bp, Klebsiella oxytoca
atggctaaaaaaacagcgcctttgcttccagagactaatcagttgcttgttgagtttggtgagcgccttaagctggcgcgtctgagacgcaaacttacagcaaagcaggttgctgaacgggctggaatgtcgccaatgacactgcgttctcttgaatcagggggggctggtgtgacaatcggcgcttacttgtcagttatgcagattttggggcttgagaaagatctaatcaaacttgcagccgaggatgagcaaggacgcctgctccaggattccaggttaataaacaaagcgtattcttctcgtccttctgcagtttctcgcacaaacaggcataccgggaatgtggtaaaacgtgacgcgtccggtaagcaatccatggccccatcaaaaaaaacagcaaatgccgaactaaaaacacctgtcgcgacatcggcatccctagctgcactgttaaaaccaataaaaaatcctaaaaggtaa

SEQ ID NO: 205693 - DNA, 1080 bp, Klebsiella oxytoca; identical to SEQ ID NO: 155933

SEQ ID NO: 205694 - DNA, 453 bp, Klebsiella oxytoca
atgataaaaatcagcaagttagtaacatacccccgtcatattaactgcgtggagggcaacacgaccctgtacgctttaccgaaagctgagattgtcagccgctggtatgaacaaacccacgatgattttcgcttctgcttcaagtttccggccaccatttcgcaccaggcatcgctgcgcaactgcgatgacttaagccacgagtttttcacccgcctggcaccgctgtcatcgcgcatcggtcaatactggctgcagctgccggccacgttcggccctcgggatcttaccgcgctctggcagttccttgacagcctgccgcgcgaattcagctacggcgttgaggtaaggcatccggagtttttcgccaaagaggaagcggaacagcagctcaatcgcgggctgcatcagcgaaacgtcaaccgcgtgatcctgaagagacctttctattga

SEQ ID NO: 205695 - DNA, 576 bp, Klebsiella oxytoca
atgaaagatttagcccatgctgtaaaaattgaatcacccgttgcaagtatcagtcatctgttaccgttcgaacagaaacagcacctagagcgtttgtactttccaaaggttcaacacgccactgacaagatgtctaaagctgaatctgaatatcagaatgctgtagaatcgcgttcagttcttattcaacagaaggcggctgaatatttggctaacccgtctgaaagacacggctttaaggttgttcaagtttatccaacgaatcagcaagcagttattcagtcaatggctgaacagggctatatggctcaccgtgtatctgttggaatggttacctttatccgtatgccaaagaacgctaaagataatccttatcaggaaattactgataaggctacagcagaggctgaatcaaccgttgataagatgattgaacgtctgaaagttaaaaccgctgaagccgtccaccagcgaaacaagattgtgattgaagcccgtaaagctctggatgctgtaaaagactttaccgattatctgaacgttattgtaactggctctgaagaggtaaccgaataa

SEQ ID NO: 205696 - DNA, 903 bp, Klebsiella oxytoca
atgactaactcaccagttcttgagcttcaggctttagccaaaaatcgcgatagcgacattatcgaggttcttttaacagctaaaatgatagctgtgaaattaggattgaaagaccttagtgaatggatggaatatgaaattgatggttatccaggtggtgtggatgttcctgattatcgaaaaggacagggcattataaggttctggaatccctatcatggttggcaaaatcttcagtttagaaatgttcccgccgatgtcattactactatacagactttcactattgatgagtctatatcctcgatgcaagggattgaaactgaagacggaatgttacgtttagttatcccccctaatttggtcgaactgctttttacacgccaagaaatccctacggaaatttgctggtttttcagcgcaaacaagctcaaacacattgtaactacagtaagaaataaaattcttaactggtctttagagcttgagtcacaggggatttttggcgatgggttgctttttactcagaaagaaagggatgtcgcgccattaaccgtttataacacaaatatattcaatgaagctgttaataacaatggggcaattggagcgggtaactcaggtaacattcagcagcaaaataccatcaagtcgggtgattttaattctctgggacgtgacctcaaaaagtatggtatcgatggtgaggatttgggggatttaaagcatattattgatgattcacctgcaccagctacccaagacgaggtagagcgatactttagtcactggattggcagtatgacagtcaaagcactgaacggtgggcttaacatcgctggtacggttgctccaaatgttctgactaaagctctgtgtgattactttaaaattcaagcttag

SEQ ID NO: 205697 - DNA, 717 bp, Klebsiella oxytoca
atgtccgaatcaaccataaccagagagcgcttggaacaactcgctgataacaacactatctgcaaagtttcatgggatgagcggatcgaactggcacaaatcgcgctggccgcaatggacagcgagccagttgggttcacagatgaacgaaaccttcatcatattgctatgggccgagaaacctctttgatttggggtaagcagaactcagaggctggagatgttccgctctatcgccacgcgcagcagccggtagtgccggatgatgtgctggaagcattgcagaaggttgctcgtatacgcctcgacctgaatgacttcgacggcgatcgccgtggcatcgctgattgcctgggtgatgccgaagaggcgttaatcgagatagtaaaccgccgcgccgccatgctgcaggaactccaaaaaagtgcaggagcttcgaataactgcaggagtaacgaaaaggtgcaggcggtggaggttcagtcggtgcccggcatcaaaccagcgccagctctgggttctttgccaaaaataggcgaagtgctgcccaccaactctccggtaattccggatggttacgtgatggtgccgaaggagccgacaaaagagatgattaatgccgggtggctgtactacatgggcaccaagaacccttcatcaaaaggcacatacaaagccatgctcgcagccacccagcaggaggtgaaaggtgaataa

SEQ ID NO: 205698 - DNA, 204 bp, Klebsiella oxytoca
gtgaataacagcatccctgaagccgtagccgtagcgatgattaatgccgccagagatatcacagtggcaaaaattaacgccaaaggcgctaggttcgacggttataccggcaatttcaactggtttaatcagtcgatgaaagaggttcgcaatgccgttaaagaggtgatgcctgatgtcgtgaaaggggtcagtgatgcctaa

SEQ ID NO: 205699 - DNA, 561 bp, Klebsiella oxytoca
atgaatagaatgaaaaagccttttattttactagcgtttcccttcttgatttcggcttgcaatgcaagccatgaggatggggtttctgtaactcatattgttacggattcgtttaacaaaccctcacctcaagaggagattaaaaaagaagcagaagaattcaagaataaactcgttgaagaaagattaagaaaaaagcccgtaactaaaggtgatttattttattgtaaagtggcaataaatccttcgactggtctcgttgatagtgggattcgtgcaaaagtaaaggataacataattaaattcggcgtcattttctcagatggcagccaagttatatctcctgatttaagcgttggagacaatgttaccgggttgagagttggggagggttcaggtggttctgtcacatttacggcagattacgatggcgctaactactcaataacaacttatgacaagtatattttaactcagttgttaggcggtaaatacattactaataatgagtattttcaaaataaaaacacattccgcatgtatgattgtaaaaaagtatag

SEQ ID NO: 205700 - DNA, 162 bp, Klebsiella oxytoca; identical to SEQ ID NO: 156016

SEQ ID NO: 205701 - DNA, 1134 bp, Klebsiella oxytoca
atgtgcttaggtttctttggggatcctatgcagacaatttataaacatagcatgcataaagaatcgcatagcttaaagaaattggtgaaaaacattaataggagatcgcatcagaatattgttgagtgcattaataaaattagaggtgataatcaagatgttaaacaaaaaccaataaaaatatacgcagaacaatgctgcccgtcgctgattatcgaaagtgaaaaaaattatacgaataactatttatcttccataattcagaggcataaaagcgaatggagcataaatgaaaattccaaacttgcctgccttgttctcaaaaatgaaatgctgtctcagctccttggatttgaaggtcttttttctactatgctagatatctaccaaactgagcatgcaaaaggatttgagatgattggttcggaatttttatttagagaaataaggtatgccggttccttaccatctattctgcatgatttattgatgccactttatctcttgaaaagaaaagcgaacttttcggtttcagattttttcaatataaagccaatttcaaatcataacttgtcagatgttttagattctataaaaataattgagtcattaaaagttaaacgcttaagtgattttgtacatgaaatatctgaaatatatgttgggcaggaagcggaaattcaaagtctgattagctataactttcatcttgttatcgatggcttagaaagtgcgaaagagaaaattattgataaatgcaggtttaaggatacggaaaagattcctcaattattggatgaattatttaagattgatatggaacagtttttcctatggctggattttatttatcagacttatccagaaaatttagtttcatacttgacttgccatgcctcaaaaggtctggagtttgataatgtcataatttttctttcggattctttcaatagaaaagaagggtatttttctaatctcttaaactctgatataaattccattttggaacctcaacttgagtcagcaagaagattactttatgtttcaagttcaagggctgtaaagaatttaaaaatttatctttttacaaataaagaaattgataaatctaaagttgattatttatttacctga

SEQ ID NO: 205702 - DNA, 456 bp, Klebsiella oxytoca; identical to SEQ ID NO: 91848

SEQ ID NO: 205703 - DNA, 216 bp, Klebsiella oxytoca; identical to SEQ ID NO: 91849

SEQ ID NO: 205704 - DNA, 219 bp, Klebsiella oxytoca; identical to SEQ ID NO: 91850

SEQ ID NO: 205705 - DNA, 711 bp, Klebsiella oxytoca
atgctttccaccactgcttttctggcggtggctatgcagtgtgccgccaccgttcacccttctacatccctcgatgtggcaagagtggagtccggttacaacccctatgccatcgctgagatcgtgcctaagcccgaacgaaaacccggcgataaaggctttattactcacatgccaaaaagtaaggaggatgcagtcagcatcaccaatcagattgaggcgaaaggtcgccgctactctgttggcctgatgcagataaccagcaccaattttaagcgttacggcgtcaccgctactgaccttttcaatccctgcatcaatctttccgtctacgaaaaaatcatcaccgactgctaccagcggggcggcaccctgaaaagggcgttgagctgctactactccggcaatttcagtaccggacaacagcaggaacccgctttttcaaagacgagctatgtacagcggattggctactccccggcggatacccgctatgccgttcccggcacccgcgatgatatcgcaaccccagcggccaccctgaaagctacgcctgtggacgcgccgacgcgcccgcgcgtggtgtggccgggggcgatcgttcgcggcgttccggctcaactccgccagaaaaaggcggccaccgtctattaccccgcgcaggttgtgcgcggaaatcgcgatgtaacaacgaaagaggaagaaaaatga

SEQ ID NO: 205706 - DNA, 306 bp, Klebsiella oxytoca
atgaaacttttcagtaaggtaaaggaattaatcagccgtgcatctgcttatgttctggctccggccatgagcgtttttgctgccagtccggcgttcgctgatggttttagccgggcaaataccatcatggagaaggtatccagcgggctgcatggtctggcggctatcacgatcaccgtggccgtgatctggattggctataagaccctgtggaaaggcgagagcctgtcgcagtgcggctacatcatcattggcggcattttaattggcggaggcagtgaaatcggcgctctgctgatgagctaa

SEQ ID NO: 205707 - DNA, 1074 bp, Klebsiella oxytoca
atgtccggtggtgtttttgttggcgttgaaaaacatctgataggtggaataacggacgccacaaagggattaatgatgtcgtactcttctatgatgatggggctggcggttacgtcagccactatctacatcatgtggcgtggataccagacgttagcgggtaagctatccacgccgatggaagatacgatgtgggacatcatgaggatggcgatcatcctttcctttgtggcaaatattagtggttatctcgatggcgttatcgacgctatcaacgggttaaaagagggcttttctggcagtgataatatatggcagctattagatagcttatggaataatgcaaaagtattaggtaaaacattacatgatatggataactccacatatataaaagatgagggaatgactgctcaattttatgtatggcttggaatattcgttttaatgattatcaccgcgttcgtttccatgatagcggaagtaatgatcttattgctgagtattacagcacctatattcatcttttgccttatgtatggtttccttcgtcccatgtttaataactggctacaaaacatatttgcagccatattaacaattctcctttcttctttatcattaaggattgtggttaattacttaaactcaaggcttgcattagcaactcaaggtgcagcccaggcaaatatcgtagaactaggagcgcaagtctgtcttgcaggtatctgtgcggcaatattgatttatctctccgcaaaactggccgcagcgctggccggggctagtgctaccgtatccatgcaggggctggccgcagtaggtatcggtgcggctgcttttggtgccgggaaactggccgcgagtgccggaaggaataccacacgctccgcccaggacaacattcagggctggaaggatgcgaatgcaggtaagcccggcaagcccggaggtgaattaggctataacgcttctaaagcgcgtaaatacgcgattgagcagatgatagcccggaacgaagcgcggaggctggcacagtcgagagattccgcggttaagaagttcaacagctag

SEQ ID NO: 205708 - DNA, 342 bp, Klebsiella oxytoca
atgatattcgctaaatttcagtcactgacccataagatagacacaatggttattcgtgacattaaacgggagatgccgttgaaatactggtcattcaaagtggcggaatggatcgccagaatcggaatgattggctttgtttgtacctttcttacgtatttcggactcggcctcatcatgcagcactcaggccaaaacctgccggaatcgtttactgagggatgcgctcaagccatcgttgcattgatagctattgccctggtcggtttcctggtcagaggcggattgtacgtcgatctggaaaaaagaatactggataagtggcagagctacgttcagtga

SEQ ID NO: 205709 - DNA, 681 bp, Klebsiella oxytoca
atgtcagtcaggaaagaatttttaaaaaatagcctttttaatcaggttgatgatagcgtttcagcccctatatcgatccgtcttccaacagttttaaacaatgagttagacgaactatctttaagtcttgatcgctccaagagttcacttatcagcgagtttataaaagccggaatagctgctgcaaatgagctgctaaaagagcactcgctgattagcgatgaaatgaaagagcagtttgtagatcagcgtgaggacaacgctgcgagtttcatggatagaaaaaccttcatgctaaacacgaactacaacaacgatgaagaaacacatttcgatatgctgaaaaaccaagaggccgcagccttttgcaaaggctggaaggagtacatcagccagctttctaaaggcgatacggtttatctgtatcagagcggtgttggcatcattgcttctggggttgtggatggtgagctggtgaaaagcgaacataatggcgttgctgatgataagtatgccaagtcacttaaagactttaagactggctttaaagctatctctgcccgtcgttttaaagagttaaccggggggggagctaatttccgtagaactatggttgagcttaattcgatgcagtcttatgcaatagctcaagagatcgagagacttacttccgcaccctaa

SEQ ID NO: 205710 - DNA, 651 bp, Klebsiella oxytoca; identical to SEQ ID NO: 132118

SEQ ID NO: 205711 - DNA, 1278 bp, Klebsiella oxytoca
atgaggaagaaggctttggcgatagcgtcgctttgttgcgttggcactgtgtttgcgcaacctacgccatccagtgatgacgtgctattcatacccagcgaaaagcatccaatagtaagtagccgtttcagtgaactcgcagatttccaaaaaaaactgctgacagccgccataaattgcaagatcaaggttcttaagcctgagacatttgctgatggcaagatggggcgcgaaaccataaataccatcaaacaagtgaccggttgcaatctttacaagtctgagctcagtggtacgctgacggaaaaaggagtggttacagctaaactctggaaactggtcgcacccgacgtgcctgtaccagatgcattgtcgcgcgccttcatcatgtcgctgggttctgaggccacagattatcccgttattgagtttaatacaccgagcgatggaggaattattacctgggggccacagggcgcaacggtaggacaggcacatcaggtgcagcaaatcctctctgccgttgacaaggagttgccagggttgattgataacgcatttggtagcgaggcacagtctgtccggttacttatgaagacgaaaaatgatacgaaagcggcagaactgatctctgaggtcaactcggtcaaagaccggagtgagatatggcatactgggttcaggatgttgggtgaagatgctcgcgtacgtgcaatttacgatcgcgtgatgacgactatgggcacagctggaattccggaagcaatccgcgacttctaccgcacttactggacacatggctggtgccctaccgaagtggatctcggatttttcgttgaccgggccgtacagatgaccgtctatcaaagctataccaaccaggctgcaaaggacgttatcgaggtagagaaaataagtggccgccaattcacccctgcacaacggcggcgcgccatatcagcgaatttttggccgggcaaacctgtatatgcaggtgatagactggcacgcgatgtggcttactacattgactatattcccagaaccgagttaaccaacgagactttactactcttggtcgccagacaccgtcaaataccggaacgactgaacgatgaggtaacacggtggaacaatcgattgggggtctcagccaacgcttatggtttaactgagaggccagcgactgttccattcggactcatcggggaaccgccaacctgtgcggcgcttcacactggaatgaaacaaaatataatacctagaggcaaaatatag

SEQ ID NO: 205712 - DNA, 633 bp, Klebsiella oxytoca
atgagcgaacaacgggccccaccttcgcctccaccacaaggaccgattggctggctattgtcactggccggacggattattgggctggttatcggtgcgttggtgctgcgagtggtgctggaactagtggggctatatttctggtggccgcaggagggaagcaggcatgtttttcaggtgatgagacaagagcgggcggaactggttattgcgttgcaatcgcatccgctggggaatgaaattctggtgctgttggaaaaagggacaactcgtgtacttatggccaacaggctcctgcaaaaaccgttcaccgccgtggcttatacgctggtgagttttatgcagcgcctggtatggctcgtctccatactccccctggtctgtctgtgcgtattaatcggactgacagacggactggtcctgcgggatttgaggcggtttggctccgggctggaatcgttttttttccaccgctacgtcatcaggtccggcagttcagtcgccaccacgctgtgggtggtttatctgactcagccactgtttctgactgtgacgctggttttgctgcctgcggccttatgcgctgggattacggtatcgatggtggcagggagttttaagcgttggttataa

SEQ ID NO: 205713 - DNA, 1074 bp, Klebsiella oxytoca
atgaggataacagcatcgaatctggttcaggcgatttcgagcttacccaaaaatacgctgtttaattatgtaaacgataggaatagcgggaagattgaaatcgtacgaatccaacatcccgaaggtcctatcgaaataaaaaggtttgatcctaagaaaggtcaaactcaagcaacagccaaaacagagagtatttcgactcaaatgctttggcgacttgcaaacgcgctcgaagaaaacagacctgtcaacgtcgaaagggttttcggtgccagttacaacactcgctcggtattggagagcttgcttgcacatactccagagttctattggtgtaggccagccagactggaaatcatgaatgcgcaaaagtctataaagccaggacataagcatctgatttttctgcccgatatgccacatactaatggtttgttaattgagcaccagactaatattgtcgtctctgaaatgagcttcgatgttgtacaccaaagcgtcgatattgagacaattaagccgactaaaggcatgactattgaagaaaaaagacgtcatgctcagatacaaattgctttagtaaaaataggttattgtttaggtttagatacttgggttgcagccaatgatcgtagtttgcaatataatggtaaatctatagcccaaatggacggagtaataagttcattatcagatgaacaagtactgcaatcatataatgatgcaattaaagatgcccgtctaatagactgtatttggtttagggatggtcgcatgatgccagctgtaatggagattgaacacagtactggtataaaaagtggacttactcgcatgaaacaattttatgatcatgctccgaggttacaagatatccgttggactatcgttgctcctgatgaatatagggcaaaagtaatcgagtttgctaacatgccacaattccgtgacttagatgcccgatttttcccatactcaagtgtagaagaactttattctttatgcgagcgaaggaaactaaagggggttttagatagtttcttagattcttttatggaaaaatgtctggtataa

SEQ ID NO: 205714 - DNA, 138 bp, Klebsiella oxytoca
atgggtgaagatgaacttcattattaccatatgctgctgtcggagagtatctccagcgatgaagccttttatatgattttttactatcatcgccttcttctactgactggaatcttgctaaaccggctcgggccgtaa

SEQ ID NO: 205715 - DNA, 333 bp, Klebsiella oxytoca
atgtatttcccaaaatacaatgctgtcatttttatccacggctgtttttggcatgggcatgataactgctgccctatttctcacattcctaaaaataacgaatcctactggcaaaataaaatcaataaaaatcatgagagagatgttaaaaatcaagatattcttgcatctaaaaacatccgcgttctgattatatgggagtgtgcaataaaacttaaaactattgattttgtcgattttattgattacatcgatgaatggcttagaggtggggcgaattcaacacagatgagcgcaaaggaaccaatgccgacttttgagtttccgaagtga

SEQ ID NO: 205716 - DNA, 3819 bp, Klebsiella oxytoca
atgatgtcaattgctacagttggcccagccaaatacgatttccaggatttagtttgcataaaatttgcattacaattttacaaaaaagagatggcatcgctagttgtggaaggcattggcgcagaagatgcagaaatttccattcaagaaaacggaaaaaaatccatatttgaaattcaagttaaaggttctctccagcactatggaatgcctttgatagccgaatgccttggtcattttccagcacatcaaaaaactgattttttccttcaacgtataatcgaggatcctgataggtatgcggtgttggtgatgtccgggcgcggagatgatactttgcaaaaattcataccgcgaggagaatggcaaggaggtgagcataccaccgttatttttactcaatcggacgttaatgctttaattagtgccatactatcttatgcagaaaccttatcaggcacaactttgcaaactgaccgtaatgattatattaaaaaatatattcaaaataccaattggagaactatccgagatgcacttaagcgagtcatcgttttggactgtgtcactgaaaaaagtatcaatgaagattgtcgatatgttcttcggaaagacttctacattccggatgactactttgaaataaagatagatattttgagaacagaaataaaagccgggcgtcagtcaaaaaacgatattatgccagacatcgttcgtaaattacgtgaaaaccccatacaatccgtaagacccttatcttatgcattgcgtggagatgaggatgaattatcagtaattattcaacaaaaaaatgtcttgatgctttcaggaaagccccgggttggtaaaagtaatacggcaagatggatcgcagctaagtatcaagatcaaggctatagggtactcaatacgcaagatgtggataccgctgagcgtttcattcttgatcctgatagaagccatcgtcttgtacttatcgatgatcctttgggtggcgcacatacagtgaataatcagaatgataaatggcaagttttgaatcgcataataaataatacaaaccaagaccgaaaaattatcattgctcaaggtcaagaacgccttttcgaattttgtcatgtacagcacctttcgaatgcttcattatcaggaaatcactggattgatttaagtaaagtgccaagtgaattcctactaagatgttgggatttatataaagaccaactaccagtagaattttatcaaactgtcagaaatttcattcaggaagatagacttgatatcgaacccggatgtctgacttttctcgcacttacatataaagacttaggtacaaaaaatagtccagaagatattattcgctttgcacgaaaagatgccgcagatcttggtagaggcttggaaggagaaggttataaagatttacttcttggactagcagtagcaactagtcatttagaaaatgttcacgatacagatcttgcgtatatccttacaaatgaagagcatgaccgttatggcttatcaaagtcagtcggtggaagtacatcctattgtttaccagctaaagttcaggaaattaactttcctaattacactccttatccggagttaggaaaagatgtcgaagacaaacttgagcgtctcgaatctagacagattgtatattctgacgatagcgaaaagaacaacttcactcacccgttttatcgctctgccgcagaatcattattcgaatacactggacgtcgcggattcaaaattattgaaaaagcattgcgaaatagtattttttgtctgtcaccaaatacagcaagagctgctgcaggaaacttgcgctggatctataatagaaccgacaatacggcaaacaaagaccagcttatcaagattgcagttgatgggctagattcaagctacccatccgtccgcgacgtatgcttcgaatttctaattgaattgacaccagaattaaatattgaatatcaaaaagacattccttcatggatatataaagtcgctagtgatcgctcttccgcattacgttgggaaaaagggcaaccttggtaccccatgaatacaggactcattttcaacactgccttttatcatgaatatgacaaaccgcatgttgaggaaatgcttaaccaaatagctctgggccaaaatatcgtacttacacctaaagatgcttacgatattcttagtcactgcaagcaagatccgacaaggctaaaccattcgctcatgacaaagatactgagtataaacgaaggttttatccgagcgttggctgcgaagttatggatgataaagcatcgtgataatgataaagatatatttgagcgtatttttagggataaacatcctgcagttgctgaagaggtattccagtccgcagtccgtgcatggaactattacccagaagaaagacagcaacatgtacttgatgcattggctagcatagccacaaaaccggtgctagcgaatgccattatcgatattttagttattttcgaacgcgattatgctacaggtgacaatccgccttggaatgttttttctagactattcccgatagcactatcttcactcccagcagcggcgcatgttaatttcgcacgcttatcgaatgtagttgatgaagctcgtaataaattattagttgatgaaatgctcagaattttatctagttggataaatttccttgaaaaacaaaaaggctatatagatagctttgggctcaatgttacagaaacacttctgacgatagatttaccagaaaacttagagacacaacgatttattttaataaagcgtctattatccttaaaagctactggtgataagatgagagtattgcaagatcttagttatcactggtcagttttatcagaagatgaacaagatttcgttatcgcgcaaattattgaaaacagacctgataagtattggctatgggcttccgtcattctaactaaaaattgccctatagaactaaaaaaccacattcttcctaataatggcatggatagtttagttgtcgatacagtaacttctcttgagacgaatctatttgaagctatttttctatgcgctacagcaaatacacatgctaatctatatcatttaaattctgaacttcaatatgaacttgtaaaaaagatagcaatggatctcagccatcccctatccccattagctattgagtttgctatcattttctttacagaaaaagaattgtttatgtgtgatcttgttcaatcattaccgcaagagcagatacaatttctttttgatattgttttttatttctacgctgattccaatccagagtatatgcctgagttttggaaatcattatttgagcgtgcctcaccagagaaaataagtaatgaatggctaccaaaatttgtagagttttcaaacaaaatttttgatagtcttagctctaatgaggtccaagagtttattcctaatgaatggatgaatgaattctatcagtcactacctgacagtaaattttatacatacattacaagtatattcaaaagcgcactctgtgagcgggcaggtgaaaaaatttcacttaacagcggtatcagagattcattttataagtatctctgtcagttaaatgatgaaaacccaccgtcacacagaagcacatatagatacattattggagaacttcgaaaggcagatttttctcccgaacagttagcgatatttgagaaggcacaacaaagtcttttcgaacgtaaaaaatgtgatattccatttaaaagagttgaattgaaaaactggcaatattag

SEQ ID NO: 205717 - DNA, 309 bp, Klebsiella oxytoca
atgtgcaggaacttattatttctattactggttttccctataggatcgcaggcctactcctctccggaatccacccagctcgcccttgcgctgaagcaactcgacggcgtaaaaacctcgctggaacgcgcccggaccagcgccagtaccactccacagtcacgctatttcttcgactacttacaggcgcagcaggacatctctgccgttgaacaaggcatccgccgctaccttaccccggcaagggcacaacctcgcgcagtccaacccttgagcgccagttaccagcgggagaccccctatgactga

SEQ ID NO: 205718 - DNA, 171 bp, Klebsiella oxytoca; identical to SEQ ID NO: 168663

SEQ ID NO: 205719 - DNA, 435 bp, Klebsiella oxytoca; identical to SEQ ID NO: 168664

SEQ ID NO: 205720 - DNA, 981 bp, Klebsiella oxytoca
atgaacacggtactgattcctcccggccccggcggatacggtaaaggactgtggctgcccgttggcagcggtaaaaaggtgctgtcgctgaccggacgcgagattcatccggtggcgatagaaattggcgcactcaccgaatcggaagtggtgaacggcttcgccgatatcccgcctgataacgacatcctgtgcgtggtgattaactgtgccgggtccctgcgctgcggcctgtatccgcagaaaggcatcccgaccatcaacgtgctccccacctggcgggccggaccgctggcgcactttattaccgaagagaactatgtctccggcgtgacgatggagcaactggttctggtggatagcgctgaagcgccggactgcgggcctgagcctgttccggcccgggggccagtcattaccaccactcctccaccaccgcgtggcgtggagaaactggtgcgcatggtggagcagacaggtaccgccgtcggccacgttatcgccctgctgtttgccgccagccgggaagcggtggatgtctccctgcgcaacgttatcccgtttatggcctttgtctcgctgctgattgccctggtgcaggagaccgctctcggcagcctgattgcccacgccctgacgccgctggcgaactcgctgtgggggctggtgctgctgtcgctcatctgtggcattccgtttctctccccggtgctcgggccgggtgcggctatctcgcaggtcatcggcgtaatgattggcacccagattggcgcgggcgccatctccccggctttcgccctgcccgcgttgtttgccatcaacgtacaggtcggctgcgacttcgtgccggtgggactttccatgcaggaggcgaagccggagaccatcgcgaagggcgtccccgccttcctgctgtcgagacaactgaccgggccgctggcggtaatagtcggctggctgttttccctgggcttattctga

SEQ ID NO: 205721 - DNA, 375 bp, Klebsiella oxytoca
atgatgatttactgcgcacgtatcgtcgctatcgggctgtttgtcgccgacggcctcaccgacaaaatgctcatcaccttcgacagcaacgggccgaaagactgcctcgattactccctgtcgctggagccgtcgttccgggaagagagtctgatgatactccccggcgaccgcctgatgctggcagggcatgattatctggtgactgccgtcggcaagggtgcacagcaggcactgtttgaactcggccacctgacgctggtgtttaatggcgacctgaatccctgccatgtcggggcggttcatctctccggcccggtgccgaaactccatgacctgcacggcaatctggtgattgaggaggggcggccatga

SEQ ID NO: 205722 - DNA, 321 bp, Klebsiella oxytoca
gtgctgccggtgctcggctggttctttatgagcagccccggcgcactcactttaggtaagctcctgcccgaaaagagcaaacccggctatgaggatgccctcggcaccaccgcccatcccctcaccagcctgtttccccacgtagtgccatcagagctgtttgtctggctcggcgtggctgcgggggttaaggcactcggcctgcccgtcacctcactggcgctgcgctatatcgccgctgccatgctaattggcctgattcgcgggattatcaccgagtacctgttcctgcggctcagcaaacgggggaatgcgccatga

SEQ ID NO: 205723 - DNA, 1155 bp, Klebsiella oxytoca
atgactccaacgttatcgttaatttttgacagggttgagttcaaagatattgagttacaaccagatttccaaaggaaggaccgtatatggaaggctgataagaagtcaaagcttgtcgaatccatattaatgcgcttgccattgcctgttttttattatggcgaaaaatcagatggttcatggattgttgttgatggtttgcaaagaactacctctatctatgatttcatgagtaataagttcccattggctaatcttgaaattttatccaatctaaacggaaagtattttaaggatttatcgaggacagaacaacgggacataagagaatatgcaataactgcatatcttattgatgtcgatgagcgaaattcaaatttggttgttgagcttttccatagaattaatacctatggagttaaattgagtgaccaagaaattcgttcagctttaaatcaaggttccagcgttaagttccttcgtttccttgcttcattgaattcctttaaagaagcaacaagatataaggttaaacctgacagacaaaaagatatggagctttgcctctcagctctttcctttatggttcgtggatataaagattatgggcagggttcgtatgatagtttcttatccggaacgatgtcatatttaaatgcctttgaattgcatttagaaaatgaagatgatattgataacggtaattcaataattcgtactgactgtaaggaatatatagaaatatatgaaaaatatgactctgcattaaaattagcgaaagagatatttggggattttgcatttgtaaaagagccttttagcaacagttctccaattagtaagcagttatttgagttggtgatttattatttctcaaaaatgtctcctgctcaaagagaaatattgcgtaaaaatgcatctgaatttatcgatcatttgtatacagcaatagaagaaaattccaaggagtatgccgactggcattcaaaaacatacaatgagacagatagagggtttaaggatgctttatcaacatctacaggtaaaagaataactgtgttgtatcgctttgaagcgtttgcagaaatccttaaaaccactactggtattgtttttgactattatgatggagagaataatcatgttaatgattga

SEQ ID NO: 205724 - DNA, 705 bp, Klebsiella oxytoca
atgtctttgtctaatcataactatcatcaaaattggttagggaagcaaggtgaatatactattgaagtattagaggggctttttaataagcggcttaagttattgaatgaaaatagcacaaatcaagaagatcctcgaaggcatgttaattcgtctagcgctaatgttttccaaaatattgagttatggatgcaggaaatttctccggggcataaaatactgcccagagtagaaaattctgccaacgttgctttcaattctataattaccgaagatggtcagcatacgaaacctataaacataggttttggttacacatattctttaagtatcgtgtctgcgttgcttttggctgagccaaatgatttagttgtaatagaaaatcctgaggctcatcttcaccccagaggccaaagttatttgggtcgattaatcgctttggccgcccaggctggaatacaggttataattgagactcatagtgaccatcttctgaatggcattaggattatttcaaagatcagagaaggatttagtccagagcttttcacgctttattatatctctaaagatcgagatgatacaaaagttgtaaaaattgatataaataatgaaggtaagttatcagaatggcctgaaggattttttgatcagcagtctttagatatgtataccctgatgactggaatgtctcctaaaaattaa

SEQ ID NO: 205725 - DNA, 1518 bp, Klebsiella oxytoca
atgacactggcattcagttacgtaaggttcagtaccaagcaccaagcgtcaggtacttcgttagaacggcaggtaaatgcttctaagctgttctgttcacaaaatggactaactctgtccaatcagtcttatcatgacctaggcatctcagggttcaaaaacgtcagacgcccagagctagagcaaatgcttgaagccattcaaactggtgatatcccatcaggcagttatatcttgattgaggcgattgaccgattaagtcgtaaaggaatcagccatacacaagacatcctgaagaaaatccttcagtacgacgttaaggtcgcgttcgttggtgaagatgccaaaacacttcaaggacatattctcaataaagactctttgaacgatttaagctcagtgatattagttgcactagcagctgatttagcgcacaaggagtcattaagaaaatcaaaacttgttaaagcttcaaaggctattgcccgtgaaaaagctgctgatggtgaaatccttcccggtaagtcagtgttctatcttgattatgacaggaagaacaaaaagtacgtgttcaacaaacgtgttgatttagcgagaaaaattattcaaatgcgtgttgaaggaaaaggcgttagaaagattgcccgcatactaaatgaagaaaatattcctggtccaactggaaaacaatggtaccagatgtcagtaaagaggttgttaaaaagcccagttctttacggagcttatcagacacaccagattattgaagaaaaatacattcctgtttcattgattgaaaactactaccctgccctgattgattatcaaacattttcacaaattcaatttgatgataaacgagtatcaaaaggaagaccgtcaagacacaaattcagtggtgttctttactgtgaatgtggtgctgttctatgcaggaaagttaatacatcagtaaccaaaaaaggaattaaagagtatcagtactttaattgcttcggtgcatttgaaagcaggtgtaagaacaacaaagctattagagaccttcatataccacttgaaaaggctattgataaactacagattaaaactcgttcagttaagaatattaagaatgaacagataatagctaagcgtgaaaagatagaccaactgaacaaaatgcttcttgaattggaaatgcctccagtttctgtacttaaaacgataagtacgctggagaaagaactacaagaacttcttgagcaaccagatgttcaaccaccaaaatcagctgatatcaagacattggttgaaataaaagacgctgaacagtataatctatacctaaaacggctggttaaaaggataactatcttccagttgaatggtcctaagaatatcaggattaagattgaaaaaactgacgggcattatcagagctttatagtcaataacggcaagataatgttcaatgcagatactaaagctctacaagagcatttacgtaaactaaaagaaggaacttctgatgaagtatga

SEQ ID NO: 205726 - DNA, 399 bp, Klebsiella oxytoca
atgaagtatgataaagagtattttcttggtgaacatgagtgtgaagaaggctgcccttgtgagtgttatagacacccagagctttatatagatgataaaggcaactggagatcatcattattttctatgtatgaggcgaataaaaatgaaattgtccctcatcgacttttcttagatgaaaatggaaaatacaacattgaacttgctgagaatgaaacgaacccgatgactaaggcatttagtattagcaaagaaaaggccgtggaatggaatagtaaagatattacagagaagaaatattttgatgggaataacgttaagccaatgacagaatatatctacatcaaacgctcaactatatcagatgaagatatagagaaattattaaaagaattataa

SEQ ID NO: 205727 - DNA, 315 bp, Klebsiella oxytoca
atgaacttccctacatattctcaagacgaacttaaaaatattactatcaatggaatttgcccagaaagtatgacacttctgtatgattgcgctgatatcaaaattgaacggtttaaaaagaacttgctgaacgataaagacgtatttgttgtaagtacacaaaagaaaaaacctgtgcatcgctttaaagagtaccaagaagtcacggtcaatagccagtatctctttggcgatgttgaggcttattgttttggcaagacagaatttatccataaaggatttaggatgattgcttattactttcaactaaaataa

SEQ ID NO: 205728 - DNA, 540 bp, Klebsiella oxytoca
atggctaaattaaaatcagttaaaaatgacttatcaaaatggaaaataaaggaaacagatgtattcagtaagaaagtaactaaagcatctaaactggcatctgtagaacttcaacgtaaaatcaacaggcgtgttaaaggtccggttaattttactaagaatgcagtagggtttagctttagatatgataagtacggttcaaagaataggatatacttcaaggatactcaggctgattatcttagtcatttgattgataatccacgtcccattaataagtttgttccaacaggtgtccaaggttctaagaaccagtttggtaatattcctgggttgaaaactaaacgtaatatgaaagtggttaaacagaaaaaggacgggcaacaacgaactattctgatcaagacaaatgcaagacgaaataaacgattaatcgctgtgttcaaacgaaatcagtcaagacgtaaaactataggtagttgggataagattagccaagatattttcaagacagtcaatagagttgcgggactgcgttaa

SEQ ID NO: 205729 - DNA, 483 bp, Klebsiella oxytoca
atgattaaaagaaaagacattcctgattacaaacaagagttatataaaagacagaacaaacgatgtgctctaactggtgttctaattgaagacgttaataaagcacatcttgaccatgaccataaacttgatggacccggtgcaggaagatgcagggggcttctgttaggtcaagcgaatgttcttgaagggcgtattaagcatcagtttgagcgctctggtcttgccgggaaaatcggctatatagattttcttaaaaatcttgtttgttatctggaggctgattatacagctaatcctagacaccctcagttaatcccagacctcattaaacggttcagccgtatgaaccttaatacaatgagacaaaagctcttagagtgtcatcaggaagcttctgggacaaagcaagaactaactcataggtataagaaatacctaaggtcaaaatatgaaactaaacctcaaggagtgtgcgtctaa

SEQ ID NO: 205730 - DNA, 450 bp, Klebsiella oxytoca
atgacgcaagatcgcgagttccccgctttcatggccggccagttcctgcaccaccacacgctcagctttccagcgacgcgggcgctcgctgtcttgtccgttatcaaggttgccaccactggcgctcagcagcggcaatgcggcaaccacctcaacagcctcagagccgtttgcggcatacaaatcacagaccggcggaatattatccgccagatccgtatcaaccatcgtgccatcctggaaacgtacgaccagacggatggcattcaggcgcgcgagcgccagtgcagcatcatcaaattctgccgcaaccacgccccagggatgagaaaaccccatccgggcgaccatgtcggcaacgtattcactccagcgggcctgctgctggaattgttgcggggccagagcggccccatcctcccaaagtgggcggtaaattttcatccctga

SEQ ID NO: 205731 - DNA, 561 bp, Klebsiella oxytoca
atgttatctaacactaacgttaaaatatctgacgttaaactaacgtctaatgctccgttcttcggtaacagagcagtatcaggaaaatatcaacgaagatacacgggtgttcagtactatagcttagactttagtgctaactatatgtcaaatgacacttctattgttcagaactttattgccaagcatatgtatggacgtccttttgaatttaatatcagctatgcaggtcaatatacaggtacagctcgtggttctgttaatacaacacagaccattcaacccggcgctcgacaggttgtagttaatggtttctctggtacattggaagcagggacaatcatacagtttgaaaatcataaaaaactttatactgtaactgaagatgttgtttcagggaaaccaatgaagttattccctgctttaataaagaatgttcagaatggcgagactgttaaatatcagaaccctcgtggtgagtttattctgacgaatgactctataccttacgatttaaaaagcattagtaaaatatcattcacagcaacggagaacatctaa

SEQ ID NO: 205732 - DNA, 660 bp, Klebsiella oxytoca
atgtctgagattaataatatcaaacaaagatttgaagagttatgcaagaaccctgattttatcagtgcatataacgatttcaatggcacaagtcttgcctcactaagtcttagccagttattttctgttggtactttgttccacttcgtaagtatcaaaactcatgataatcaagaactactcattacagatgcttactttgatgttcaatatcaaggaaagacttatcttgctactggtgattttacggacattagtactattcaagaaagtaaagagattaataacattggtatgacagttcgtctatcaaacgtgcggactgagtatatcagtcttattcgttccaaagctcttgataactctgaagtaaaaattgatatcggctttattaacccaaacaacggttcagttcagacgagttttaacatctttactggtgtcattgataagttaagtattcaacttgattataatgatgcagaatgtaagaacgaaacagaagcaactttagatagtatctgggctgtacttgaaaaatcagctcgtaatcatgcatcagatggtgtccatcgtgcttatccaggtaatgaaaatgacagtttctttgctcgaattggtaagtggaatagtgaagcacgttggacgtcagtcaaataa

SEQ ID NO: 205733 - DNA, 720 bp, Klebsiella oxytoca
atgttgaacaatatagaaagaatgaaatatgcattaaccgaatgggctattaaagagggcgtatttgatgatgcaactttctatactcaaagtgagtggaaagaacgtggagaggattttcacaatgatgcggtaatggtgcttgtgatcgatggtagtggattattccatctgcttaattatggctgtgacacaactgaatttgaggatttggtcgaatcctttgggttcttctatgaacaaggttatagctggagcgttggattttatcctgtagatgactatgactacagaagacagaccggaagttaccgttctaaattacgtgatcctcggtggttaaggaaatccgagttagttaaaaaacaagcggggaatcactgccaagattgtggagcagtgggacgtctcgaagctcatcattgttattatacgacgatgagcaaaggttatgaaccatgggagtatcctctgagcgcatttagagcactttgccctacatgtcatgataagcgtccaatacctgaaatcagagcacgtgctttcttggctagattaactcattcccaactaactggattgcttgagggattagacaatggttttaatcgatttgaagcagattcttttattgagtttatgaagaaggccacttttgacaagaagcgcatggaagaagcgttattacttctaaagaaaaatggtgaaatctatgattaa

SEQ ID NO: 205734 - DNA, 387 bp, Klebsiella oxytoca
atggaccagaagttcaaagacgagttcttgaaagtaggcatcactgaacatctactgccagtgattgagcggttgtttagtcatactgcgggaaggttctgtgagaattttgttgagcaagaatgggcttcattggattttccgggattaatctatcacccgctgcatgacactgcatattacgtaatcaatccaggtaatcaatcagatgctattctgaacaacagagagtttggagcattcgtctcaatgatgacgattaataacctctgttggaagttcgagaacacagactattgctcaagcatatgtgatttgtactatcaaacgagggagtcattctatgataactttaagaatcgatccttatttagacttattgattaa

SEQ ID NO: 205735 - DNA, 171 bp, Klebsiella oxytoca
atggaaagccgctttgaagatattttatttgatactgtgaactcgatcgttgagtacacaaggatagggcgtactaaagctgttactaagttgtacagaaacgggaagttggcagcggtgagaaccatcactgcggaaggtactacatatgcttttaaaggagataactga

SEQ ID NO: 205736 - DNA, 2709 bp, Klebsiella oxytoca
atggataccagaattattaatagtatttcaggtcgcttgagcttacgtgctccgcagcgggaatcattagaggcattggccaaagccattgacacaacgaatgacaaactgctggatccaaaacatgatgtgccatcattactaaaaaccttaaaagctgaattccctacactcgaagacttcgagcgcgacttcccatcgctctgttttgcgttagcaaccggcgtggggaaaacccgactgatgggtgcttttatcagctatttgcatttagcacacggcatcaaaaacttttttgtgttagcgcccaacctgaccatctatgaaaagctgattgccgattttagccccggtacaccaaagtatgtatttaagggcattgccgaattcgcagcgtatccgcctgaggtgattactggtgataactacgagcaacgtggcgctcaggtgatgagtgatcttttcagtaatgtaaggattaacgtattcaatatttccaaaattaattcagaggttcgtggtggcaaagcaccgcgcatcaagcgtttgtcagagtacctaggtgatagttatttcagccatctggcaggcctgccagacttggttctgctaatggatgaatcgcatcgctaccgtgcaagcgctggtgtcagagccttgaacgagctcaacccaattctgggactggaactaaccgcaacacctcaggttgaaataggtagcaccacaattccttttaagaacgtggtagtggactatcccttagctcgcgctatggaagacggctttgttaaagagccagccgtagttacacaacgcaacttcgaccctaaccaatacagcagggaagacctagaggagatcaaactcaaggatggtatccgcttacacgaagccaccaaagttgagttgattacctacgcccatgagaatgacacccgtatcgttaagccttttatgctggtgattgcccgcgacaccactcatgcgaaggttctgaaagagaaactggaaatagtatttgacggtaaatacgctggcaaagtgattcaggtagatagcagcagtaaagaagaagaaaccgtgcaggcattgctgaatgttgaaagtagcgatgagccgacagaaattgttatccacgtgaacatgttgaaggagggttgggatgtaaccaacctctacaccatcgttcctttgcgtgcggcaaatgccaaaaccctagtagagcaaaccattggtcgaggcttgcgtttgccttacgggaagcgaacaggtgttgagatggtcgatcggttaagcattgtcgcccatgatcgattccaagaaatcgtcgatgaggccaacaaagacgatagtgtgttaagaaaacttaaattcatcgaattggactatgaagaagagcaaggcaaagagaattttcagatcggctcgaatatagacgcacagatttttggtggtgacacccaaggtagtgcaggaaccacctacaaacctacagcacaagagaaaccgctctttgcctcagaacctgaaaaaaaggcagccagcgctgcgttgacggttatcaagcaatatcagtccaaacctgagcaggcaccaactagtcaggcccttcagtctgaagcgttgcagcagcagattattgcagcagtaaaagaacacctcacccaagggcaacaatcactgttagaagatgaagagcaaattgatattgccgatgtggtcgccaaaacaacagcgttggtcgttgataacactatcgacattccacgcattatcgttacccctaaaggcacagtaactagtggctaccatgcctttacactagatatttcaggaatcaaaggcctcaagcctcaagagcgttcactagtaagccagagcctacaaaccaatgagcaaacggagattggtgaaggagactctggtaattacgaaccaatcaaagagaactacattcttaaaaagctatttgactatgacgacatcccctacgacgagcatgccgagctgatgtatgacttagctaagcaagccgttgaatgcttgagtgctgtcaacgatgaaaagaatgtggaaaacattcttcaaaatcaaagcgacgctatcgcaaggcttattcatgctcaaatggacaagcacttctatgaagaagccaccgagtatgaagtggaagtacgtagcggcttcaccacactgaaagtgtgctcatacacggcggcacaggggcaggatgttaaaaactatcgagacaccgtgaccgaagtgagtaagatcaagcaaatactgttcggcggtttcaaaaaatgtctttatccgatacagaagttcgattctgacaccgaacgacgcttcgctatcatccttgagcgtgatgccattaaatggttcaaacctgccaagggccagttcaaaatgtactacaagaaaggcaccgaacacccggagtatgtgccagactttatcgttgaaaccaacgatagtattctcatggtggaaacgaaaagcgcgcagcataaaaacgctgatggcaactggaacgaagaagtaacagaaaaagctaagtcgggtgtaaaatggtgtgctaatgcctctacttatctaaaagacaacggcggtaaggagtggaaatatttacttatcccccatgacgaagttaaagaagcaaatatcttaggtagttatatttctaaatttcagcagtcataa

SEQ ID NO: 205737 - DNA, 1704 bp, Klebsiella oxytoca
atgagcaaaacaaaactcgaactgacttggataggcaaagacaaacgtcctaagctggagccccgcattcttctggaagatccagatctttcctatcatgctagtcataaagtgtctgaaagcgattgttttgataataaacttatttttggtgataacttgctggcgctgaaggcgttggagcaagagtttactggtaaggtaaaatgcgtctacattgatccacctttcaatactggtgaggcctttgaaaattatgatgatggtttagagcattctatttggctgaacttaatgtatgaacgcgctaagtatatatacaagttgatgtctgatgatgggacgctttttgtacatattgatgacaatgaaattgcatatctcacggttattcttgacgagatttttggaagggaaaatcgtgtttcaattgtaaccttcaagcaaggtgcagttactggccataaagccattaatccaggattagtaaccacaacaaatttcattcttgtttatgcaaaaaataagaagagttgggtgccaaatagattgtttactgcaaagggaagagatagtagatattctcagttcatagaaaactacgaggaaagctacgaaaactggagatatataccactaagtcaagccgttggaaacgagcttggaatacagtctcgacagttgaagaaggcacttggtgaaaactatgagagagagattgaaagttttgtgatgcgttaccctgaaagggtgatacgtacggcaagaccagattataaatctgttggccagaatgttcgtgatgcaattgatgcatccaaaaaagatccggaaaaggtctttcttttgaaaagagaaaaccattcagatatgtactttacgaatggcgagcgaatcctattctataaagacaagttaaaagaaatcgacggtatgctcgttgcaggtgagccattaagtaatctttgggatgaccttctctcgaataacttacataaagaaggcgggataaagtttccaaagggtaaaaaacctgagtttttgattaaacgtgttctggaattgtgcactcaagaaggagatcttgtgcttgactcttttgcaggttctggcaccacggctgctgtcgctcacaaacttaaccgccgttggataactattgaacttggcgatcattgccactcacatattttgcctcgattgcagcaagtaatagacggtaaagatcaggatggagtatcgaaatccgtaaattggcaaggtggtggtggtttccgctattacaaattggcgccatcactgatcgaatacgaccgcttcggccagccggtaatcaacaaagagtttaatgcagaaatgctcgcagaagccgtatgtaaattggagggctttacttatgcaccttctgatacgctttggtggcaacatgggtattccacggaaactgactttatctacgtgaccacacaaaacctttcgatcgagcaattagagcagatcagcgaagaagtaggcagtgacaaaaccctgctggtgatgtgtggtgctttccgttgcaaggccgatcgttttacaaatttgactattaaaaagctgccaaaggccgtcctgaagcattgcgaatgggcgcacgacgattacagcctgaatgtgcgaaatctgccgatgacagcacgcgatccagcacaagatgacctgttttaa

SEQ ID NO: 205738 - DNA, 1797 bp, Klebsiella oxytoca
atgcctgccctgcaagccccaatgttagaagcgctaaaaaagctgcttaagaacagattcgtcccccacttgccactgcttttaggagacgcaaatccgttaaatcgtgataacaaacagatttcccgtgcatttagtgcttttgtactacaaaagttgttcggtctggacacaataactgcagccaaagcggtggtagatgactacaacgataaaggcatagatgctatttattatgatgaaaacgagaaagctctctatcttgtccaaagcaagctcaaggcaagtgagcaatttcaattggatgaagcacaatcattcctcagcggcatcaaatttattcttgataaggactttgatcagttcaatcagaatgtgaaaaatatccaacataagatagaagacgcgctggacgaatgcgataaaatccacctcctcatagcgtactcaggtgatggcatatcgattcaggccagaaatgaaattcagcaaaaagttcagtcactgattgatgacggtgaagaacagctggtgcttgatcccgtcatcttcgggccggaagccattgagaaagctctaagggaggaaaatgcaactaagcctattaatgaaaagatacaagtgcacaagtttcgtacaacaaatagtcatccccggtattcggtatttggccttgtaaaagttgaggacctcattgcgctccataatcgacatggccgcgcattgtatgaaaagaatattcgcttttttattggcgccgggcgccgaggcgttaactccgcaatccgggagactctactgaatgcaccacagaatttcatgcatttaaacaacggcatcacgcttgtcggaaaccatgtggaagccaagtcaaatgtcaaaggctcaaagcttaccaaaaatattcaggtgctcggattatccgtcgtcaatggagcgcaaaccatctcttcggcagcgcagtttatagagcaaaaccccgaagccgatatatcaagtgctcaggtaatggttaccatcatcaataccggcaatgacgactttcataaacaggtgacaaaggcgcgaaacctacagaatccggttgatctatccaatttcgcagcattggacgacaaccaagaaaagttaaggcaggaaatggccctatttggtattgactatcaataccgcccacagcgtcaaaccacaaccggcattccggttatcaccattgaaaatttggcaaaggcgttagcttgcttgcacaacgatgttagcttcccggcacgtctcaaatctgaacccagccagtttgttgactcgtcaagcgaatcctatcaagctttgttcacggctgaactaacaggccataaagcacttaatgcttatactgcatttggagttatccacgaacttgtgactcaagcagagcgcggttccccaagcccagagaagttggtgtatcgccattgtggctatgccattgccagcattttgatgaagcaactgagacgcaaaattgaagggaacgaattgctggttgcggataatgtcagagagagtttaagcataccctttgatgagattcgacagcagtttgccgatcaatacactgaggtcgctttgggctcaacacaccacgcatttttcaagcgtattgcagatacagccaatctcatcaataaggtttggattgaacatcaaggtctacaacaagatgctgcggtagttgcacttcaggggaggctctcagcggaagatccctacaaccagagcctgtttaatgtgttgaaagatcgagccgcacaactctag

SEQ ID NO: 205739 - DNA, 2880 bp, Klebsiella oxytoca
atgcagatcactaaccatcaagcaaaatactacgctcacgagctcaccattcgccatgtaactggcggtgtcgatagcctctcgcaatcattgtttgatgccagtgtcgatcttaatccccaccagatcaacgcagcactgttcgcactcagaaaccccttaagtcagggcgttgtactggctgatgaagtgggcttgggtaaaaccatcgaagcgggtctggtggtttcccaatactgggcagaacatagaagaaagctcctgattatctgcccggcttcattgcgcaggcagtgggcacaggagctggcggataaattcaatctgccatcacagatactggattcaaatacttggaagaatctacataaagaaggcgtttataacccgctggctgaaaagcgggtcatcattatgtcttaccattacgcagctcggcttgaagagcaattgcttattgagccttgggatctggtggtaattgatgaagcccataagcttcgcaatgctcatcgcaccagtaatcgcatgggacagtttctcagaagagcactggcaggtcgcaaaaagctgcttttgaccgcaacccctctgcaaaactcactgatggagttgtacggcctctcaaccttgattgatgagcagctctttggtgatgaacgttcttatcgtcaaagttatattcagggacatagctccgttgcagagctgaaaggccggcttaaaggtttcattcaccgcaccctgcggcgcgatgtgttggaatatgtgcgttacacccagcgccaaacattaacggtgcctttcaccccgacagcacaagaagaagatctctacaacggtatatcagacttattagagcgtgacgagagctatgcactgcctagtaatcaacgccatcttacggggcttattcttcgcaagctattggcttccagctcacatgcggtacttaacacactggaaactatcttaaagcgccttgaggcactgaaagaaaatacccaaagcgatattgatgttgtctccaccttggtggatgacgacgaccttgagcaggagtatctggaagaaatcgacgagcttgaagctagcgatgcggaaatcgatcttgagttgctagaagacgaaatcaacgaaatcagactctacattggcaaagccaaaaccattgaaaccgacagtaaagcaacggcacttcttacagcattgaatcaaggctttgagaaaatggaggccatggatgcgccaagaaaggttattatcttcaccgaatccaagcgcacgcaagaatacttaacccgttttctgtctgctaatggctatcaggataaaatcgtcaccttcagtggttccaacaataatccacaagctacgaaggtgtatcaaagctggttagcggaaaatcaaaacagcaataaaatcagcggctcgcctcaagttgacaggcgctccgccttaattgatcacttcaggcatcatgcagaagtcatgattgccacagaagccgccgcagagggtgtcaatctccagttctgttcattgttgataaattacgacttaccctggaatcctcaaagggttgaacagagaattggccgttgccatcgttacggccagaagttcgatgtagttgttataaacttcctgaataactccaatttggccgatcagcgcgtgctagatttactaaccgagaagtttcatctgtttgatggggtctttggagcttcagatgaagtgctgggtagcattgaatctggcatcgattttgaaaagcgtatccaagccatttacgaaacctgccgtaagccagaagaaattgatgctgcttttaaacagttgcaacaagagctggaaacagatattaacgaaaagttgaaagaaacccggcagcttttgctggaaaacttcgatgaagatattcatgacctactcaaactacggctggatgccgccgaacagcgcctcgacaaggtcggtcgttggttctgggcgctgactcagcacgaattgcagagtcttgcggccttcaatgaaaccaatcacagctttgttttaaaagcgtcgattccgcagatcccatctggtttgtatcaactgcagaagcgtagctcaggtcaaaaatcaggcaatgaattatcccttgcgcaccgctaccgtttgtctgctcctctgggcgaatgggtgctacagcaggcgatacgccgtgagttacccgctgcagagctggtattcgactattcatctcatacctcgaaagtgtctatgattgagagtttgataggtaagactggtactctacgcttacagaaatttagcattgaatcattggagcgaactgaagactacctgttgtttgcagctatggaccaacaaggaaataccctgcccggggaagttgcacaaaagctgatgcagcttccggcctttgagcattcattcaggcagaagaatcagctcgcagaatcaatggcctcagagacagcacttgaaggaattctggcgtcagaacgtaatctggttgaaaaatcagtcaatgaccggaatctaagcttcttcgagcaagaagtaaataaactagatgcctgggctgatgacctgaaagaaggcctcgaggcttctatcaaggaactcgacaaacatattaaagaggttcgccgcgaagccaagattgcagtcacgctggaagaaaagttggccctgcaaaagcagcagaagaatttggaaagccagcgcaataagagccgccgcgagttatttgataagcaagatgaagttgatgaacgccgcgaagagatgattgagtcccttgaaggcaaactgaataagaaaacaacggtagaaaccttgtttaccgtgcaatggagtgtgaagtaa

SEQ ID NO: 205740 - DNA, 246 bp, Klebsiella oxytoca
atgatccgctgccaccttgcccgaatcatgggtgaacacaaactgcgtattgccgacgttgccagagagacgggactcagccgtgctacggtaacgttgctctataaagagacggctcaaaaagtggatttgggcacgatagaaaaaatctgtctgttattcggctgtggtattggcgatctgctggagcttcaggttcagggaattaaaaccgaaggaaaggaattcccagatgcagatcactaa

SEQ ID NO: 205741 - DNA, 357 bp, Klebsiella oxytoca
atgaacaatcattcagaatccgataccaggccggagaatcccgcctgccagcagtggggactacagagtacgatcactccctgttttgacgctcgtctggtgcaggaaggcaaccgcctgcattttcttgctgaccgggccgggtttaacggtgctttcagcgacgagcatgcgttgcgcctcgaccaggcttttcccctgatactcaaacaactggaactaatgctgaccagcggcgagctcaatccccagtatcagcattgcgtcacgctatatcacaatgggctcacttgcgaagctgacacacttggtagttgcggctacgtatacatcgccgtttacccaactcaacgctaa

SEQ ID NO: 205742 - DNA, 342 bp, Klebsiella oxytoca
atgaaatttctacctgcaagaaacatgcgggcggcggagccatgtctgtcgcccgttgcagtctggcaaatgctacttaaacacctgctggagcaacactatggtctgaccctgaacgatacgccgttctgtgatgaaaccgttatacaggaacatatcgatgccggtatatctttggccgatgccgtgaattttctggtggaaaagtacgaactggttcgtattgatcgcaggggattcgactggcaagaacagtccccatatctgcgggtagtcgatattctgcgggcgcgacaggcaactggtttattgaaaagaaatcgtattagcgcggcacggtga

SEQ ID NO: 205743 - DNA, 324 bp, Klebsiella oxytoca
gtgctggacctgccacagcaagaaaacagcaacagagagaacccgatgaagagtttcaaaattgaatacgttgatggtgttttgaccgttctggagacggatggtcagtcacgaatgaatgaagccgtacatggcatccattttgagcatgtccagggcggccgcccactgctgaaactgacgattgcacatgatattgctccggcccctgtttcatcacctgcactggatcaggatcctttagagggggagctggtgcaggaacaacagacaatggttcccggtggtcgtcgttcccgccatcgtaggggaggtaagcaatga

SEQ ID NO: 205744 - DNA, 165 bp, Klebsiella oxytoca
atgaagaacttaaaaattgcatacgtagacgagaagctggtggcgattgagtgtgagggattgtcatgctcatcgctgcccgtttcagagtttcccatcgacagtaccgctttaactcttctccctcaactcatgctcgaggatgtttatgccgccacgagctaa

SEQ ID NO: 205745 - DNA, 963 bp, Klebsiella oxytoca
atgtttggtaaaattaatcttacgtcgaaagcaatatcatcattattactagatacaaataatccgcgccttattggttatagaaaacaaggaaagctcaaaaatgaaaaggatataataaatgttatgctttctaattactcaatcaaagacttaattgcatctattttaactaatgggtatcacccagatgaggtacttttttcaatcccttgtgaaaatggtagtaaaaaaagggttattgttgaaggtaatagaagattaaccgcatgtaaaatattaaagaaacctgacattcttaagggaactaatcattcatacttaatatccagaattaaaaatcacaaaaattatagcattgctattgatacgattaagaagattaatattgtcgaactagaaaatcgagccgcggcacgcgcatacatagcgtcaaaacacactaaagaatcaatcaaaagatggagtgtttatactcaaggtgcctattacattgacctcctgaatgaattcaaaacaattaatgaagtacgcgcatccattaataacatagtatccagctcgagagttaaaagtgttatacttttctccagaataactgacaaaatactcgagcttgaaacacttactgctgaagaaaaggacttaattctttctgacattgataatgctaaagtagaggctatcctgagattaattcagcgttctgagtttagagaaaaaattgggatcataaccctaaactctcatggggaattaattacaaaaaaaatatcatctacggcctttggttatattttagccaaaatggcaagggatgcacatttcacaaaagaacttacaactcgacaagagaatgatgaaaaaatcaataattatattaatcagctaatgacaatagctggaaagttctcaccgccagaagactgtctcttatacacatctccgagcccacgagactag

SEQ ID NO: 205746 - DNA, 1764 bp, Klebsiella oxytoca
atgttgaccgatctcagcagagatgaaagtaaaagacttgcggcaatcgacttgttgaaaaatcctgacaagggccgggatgatgcgttaaaaaaatatactcatctaatatgccaattgctgaacatgccgatgggctttgtttctgttctcgatgaagaaaagcaatacatcaaatcagcccaaaatgttgccgtcacggaaatcagcctgagcgaggcattttgcgtacagacccaggaacagagtaagacattcatttgtcatgacactcatcagcaccctacctttcgtgactatcacgcggtgaaagaggctccattcattcgcttttatgcaggctgcccacttaaaacccaggatggagtacccataggtaccttgtgtatcctcgatactcagcccagggaactttcagacgagcagctcgatctttttgaaaagattgcaggacttatatcggattttctggcctcgtggcactccgtcggctacctcgatatagtcacgctattaccaaaccggcagcgactgctgaaggatatagaggtttcaactgaaggcgcattcaggctcgtcattattgattgtattgatatgccattagcctacgaaatggctcgctccctcggtatgacagccgtagaaaatctacttcgtaatatggtcgcagagctgcagatccgcctgcctttagaagggccgctctacgccgtggcagttggacgatttgccttttttacccataaggaaaaaattcggacattagaagatatctctcaaagccttcaggggatccaggccaggtttacccctgaagttccccttgatctggatattcacatgggtgactccgggctttgcgataaatccctgacatcgaatgaaatactgcgccgtgcagtcagcgcattgcatgaagggataagtcaggggcgccggtttacagtttatgatgacgcactggatagccgtaagaagactgatttcagccttcttactgaagttaggcaagcgctacaagaaaaccagggcttatatctggtttatcagccgaaaatctcactggtgacagggcgtgtgacgggagccgaagctttgcttagatggcaacatcctaaaaacggcgaagtgttgccgggtgtgtttattcctctggtcgaaaagaccagcctgatgcgtgaactcacagcatgggttatcgatcacacgattgtgcaactgagtgcctggcaaagccgtggagtttctttacctgtgtcgattaatctggctgccagtgatttttcaagaccagatttctgcgatgagctggaacagaaaatgctggacgcgcgtctggatcccgccctgctgggggtggagtgtctggaaaccgagaagatgctggaaagccccgctgcacttatcggcctggacatgctcaaacaacgcggatttaaaatatctctggatgattttggttccggatacagcaacattaattacctgcgacaaatcccgatggacatcatcaagcttgaccgctctattgtgagtaaggttgctggcgacaatgccagccgcatcattgttcgcaacgttatcacactcctcaagcagctcgactatatcgttctggccgaaggagtcgaggacgccaggaccgttgatattttaagaaggctgggctgcgatgaagttcagggctatttttttgccaaaccgatgacccctgatgcttttgaaacctggtatcacggcagagacgaagccttaaagtga

SEQ ID NO: 205747 - DNA, 966 bp, Klebsiella oxytoca
atgcggacttatgaattagaagacataaaaaaacttaaaaaacaatctgttatgaagacgcttggcttaactgccatgccttcagacgtatcacctttccgttaccccggtggcaaagctaagctatctaattttattgccctatttgtcgtaacaaatggactggaaggttgtactcttgttgagcctttttgcggaggtgcaggtggcacacttccattattgtgtgcagggctagttgataaactagtcctcaatgatttgaatcctggtgtatacagtttttggatgtctctcacgaggaatactgatgctctaataaaaatgattgaaaatgaacctgttacccttgacgcctggaagcattggagggaaatatataattctgatgggaatgcaaaatatactactttagaaaaaggatttgcgacctttttcctaaatagaacaaatcgttcaggaatgctgcatgcgggccctattggtggtcagaaacaatctaactcagattataaacttgattgtcgttttacccggaatacattaataaagcgagttgaaaaaatagctctactctctagtaaaatcgttgtaaatcagtatgatgcttgtcattcgattagcaatttatcttcagatagtcttatatatgcagatccgccatatgtaaaagaagggcgtaacatatatagtaacttctgtttttccgaggatgatcatcgtagattttcatcgaaattaaagagaagtaaagcacactggttattatcttacgatgatcatcctttagtacatgaactatatgaaaaatcaggaattaatattattgaactgagctatgcaataaataaagccagagtaggcagagaattactaattgcatcagtaaattcaagacaaccttctttagagtttatgcaaaccaatcctattatcactacagataatatttcactagccaactaa

SEQ ID NO: 205748 - DNA, 132 bp, Klebsiella oxytoca
atgccctttgctttcgtaagcttgaacaacttccttataccgatcaatgatttttttactattttttttccattcagagttatcgagtgcttgtacggtttgctgtacaatgttgtcaatctttgcttttga

SEQ ID NO: 205749 - DNA, 522 bp, Klebsiella oxytoca
atgcttatattgaatctttcctctggtttgcccggagcatcttgccactcttcattttcaaatttctttatttcaatattattattttttgtccatataacattaaataaatcatcacgcctctttattcctacgctgatttcggtatcatctctagtaactccatcaataaaagaatctagatctctttttatagattgtaagccgactaactcttcagatctacccatcgcaattcgtagtgattcaacaaatgttgatttaccagcgccacgtccaccaattatagcattgaagagagggtgcagttttatctcaacaggttttcctgggataattccacagtgggtcatttttttaattgttaggttgttaattgacaggtttggtagagaattaggatcgtcaatttcgttacttacgcagaatttattatcgtataatgcaagccttaaaccatcaattgttggttttcccatcttgatccaagaggtattagctcctagtctagacttttcatga

SEQ ID NO: 205750 - DNA, 576 bp, Klebsiella oxytoca; identical to SEQ ID NO: 181839

SEQ ID NO: 205751 - DNA, 270 bp, Klebsiella oxytoca
atgagcctctcttccaagcgcgcccttgtcctcaaaatgttgcaggtcatacgcgccggccgctgggaatatgaccgcagcgagcagggtctggtcagagccttcaacgctgttcgcaaagttgttacgcccggcggtttcatcacttacgaaacggaccgatcgcgcggcgtaagccatggtgatatggcgtgggcaaccatgctttcgattattaatgaaccgttgggccaggaaagtggcggcggtggtttcgcaatgggatggtaa

SEQ ID NO: 205752 - DNA, 408 bp, Klebsiella oxytoca
atgactaatatgccgtcactaggtattaaacgtgcctttgaagaaattatagttaatgaattaaatctgaagtacgtacaagatgcattcactacaggtgttaagaaagaagtacaggtcatgattagcggttggactgaagaatatactcgtccgcagttaaattctcgtggattagctgctgaaatgaacttaacgatcgatgttttttcagaaaataacgaaactggtgttcatgaggccgtttttaacttaattaaagttagtccagtgcatcctaaattactcaagttcaaaattgacagaatgtttcctgctagttcattcacaagctataacacagagtcttctaacggacatatccaagcacaagtttcaataacaatccagtacatcataaggaactaa

SEQ ID NO: 205753 - DNA, 297 bp, Klebsiella oxytoca
atgttatttccatataccaataagcagaaaaaagaatttttaaaacggttcggacatccagttaaaattaacgacgaaccagaactcgcgatagttgaaagagaaattactaactctgatggggaagtatcagagactttatacgtaactatcgatcagaagtataaacaagacgatattgttgagctcgataataccatctatagaatagcttatattgtcaatgacggttcaggtcttgttgatgcttatctgtctttccaatcagaagaaggaaggatatctaaatatgactaa

SEQ ID NO: 205754 - DNA, 1437 bp, Klebsiella oxytoca
atgaaacgttacgaagaaatgtctgttgaagacatcgttgaaatgactattgaagatttagcagatatgtctgttgaagatattgaagctctaactgatgaagctcgcgctaagcgtgaagaaattcttgaagaagacaaaattgaaactgaacaagctggtgattctgctgttaatgcaactgatgatagtccggctccagttcctgctcaagatgaactttctgaagaagaacgagaagaagaaaccgaagaaattctcgaagtagcagaacgctataaagttcctcagaaagaagttgctaaagctctggctcgtggaatgaccgctcgtcagttcaaacgttctattaaacctaataaagctccggcggtaattcgtaatatgcgcaaagataataaagaaactctcgaaaatcgttttgatttaggcgacgctgttcgctccatgatgtccggtaaagctgttcgcggcgctgctgctgaatatactcaggaaatgactcgtaaacgtctggctcgtggtcagaacgtaagcaccggtatctatctgcccgttaatgctctggctcagaattctcgtgctatcaacaccgttccgagtgtttctgctatccaagaaactgttcagcgttatgactctttcgttgaaatgctgttaaaaggcactgtagccgatcagctgggagttaatttcctgactggcctgactactccgatttctgttccgaaacagactaagagttctgttgatgccttcggcttcgttgatgaaaacggtgaaagccctgaaggtgaaagctcgttcaccaacattcagttcatgccgaaaacctttactggtggtaacccgatttctcgtcaggctctgctgaccatgcctaatctgggtgcattcatttctgaccatatcgttaaacattctcgcgctaagctggaaggtctgatgttcggttctgtaactgatgccaaagctccagaaagcatcatcgctcagctggttgcagctaaaatgggtatgacctataaagagttcgttgttgaagctgctaaagctaaaggcaatggcgttgatatggctgcattcaaatatctgatgcacgctgctcttgaaggtgatttgaaaaccactctgcgtgatgctggtgtttctggttatatcatcgatgatgaaaaccgtatcggtggtcatgacgttatcggttctggtctggttaaagacggacaagtaatcgctggtgatttctctgctgttaccgttgcagaatgggaaggtctggctcttgacctggacgatactacttatcgtaatcgtggtgctatcgttcctcgcgtatgggctgatatcgactggaaagtctgtgcagatgaccgtctgttcctgtacgaaaaaggtactccggaaggtactccggctgaagctaaagctggtaagtaa

SEQ ID NO: 205755 - DNA, 306 bp, Klebsiella oxytoca
atgcttactaaatttaaccactgcacgaccaacacggtctgcatcaattcggacagaaccaggaataacaatacccagatggttatcaaaattatggttaaacaaaagtgctgcaccgttattaattcgagtcaggtctgcattttctggaccatcgtggacaagaatttctttaactgtaacaggctgaccatactcatcttgaatttgacgttctacaggagtttcagaactaaaagcgatttcataagtaccgtcttcagatgcttgaatttccttgaccgtatattctcgcttgagctttaa

SEQ ID NO: 205756 - DNA, 1551 bp, Klebsiella oxytoca
atgaaattattctccagaaagaaaactactgttaagaaagtaagaaaatcacctaaattggtcattgataattcaaaatcgtttgaaaaaggtcttgatactcgccaacttggtccacgtattgaccgtttaagtggtgattttgaagaaaacctaattcgtacagcaactattaacaacgaaattcgttcttcaggagataatctgagggcgatgtctcgcacgctgtcaattaatactccttacggtaaacgagctgtacagtatcaggttgataacgtaattggtgaaggtattaatccgcaaccacgtatcattgatcgcgatggtcgtcctaaaaaagacttgaacagtcttattgctgatagttttgagtactgggctagttctcctaaacgattcagtagaaacaaacgattgaactggcgccgtttccaggagctagttgaacgagctcgtgtagtagatggtgaaacgtttattcgcattcacgaagaagttgactcacttcgtattgaaataattgaagctgctcgctgtaaattcggtgatagagaaaaaactgaagatggctatattctcgatggtatcgaatatgacgaagatgatgctccgattagatattggtttactgatatcgataaaatgactcagacagaaaagggtggttcatattcagtacctgctgaagatattatccattactacagagagttattcccagaccaacgacgcggtattcctgaagctgttgcaatcatcgcaacaatgaaccaatacgatgcgttcagtcacgcgactttagtacagaaacgtgctgctgctagttctatgggttttattactcaggataaagatggtcaagaagatatcgaccttggacttgaagaaaaagagcatgatggtgaacaacctgatgttattcaagactttgagtctggtactatccataaacttcctgctggtcacgatattaaacagttcagcgcaactcaaggtggtgatgatttcattagctttaccgatcgattagaagaccaacttgctatgggttatggcttctataagcaaggatggaaaggcgatacagctaatatcaactactctgcggcacgatttggcgatcaagctcaacgtaagatgtttaagactgttcaacagaatttaaaagaacaagtctttgaagttatctacgaacgttggttagcgtgggcaattctcaatgagactatccaagttaagatgacgaatattccaagcattcttcgtcagactatctggacatatccaaaatgggaaagcattgacccgcttaaagatactcagaaagaccagcttgatgttgataatggttttaaatctgcgtctgacgtaattattagtcgtggtgaagaccctgaattggtatttgctcagattgaacaagaacgttctcgttatgttcctaaacacgcaaatcaaatcgatatcgctaaagctcctgctgaggttactgctggtgctcaagtagaagtagctgagattaattctgattcaagcactgacgagtaa

SEQ ID NO: 205757 - DNA, 471 bp, Klebsiella oxytoca
atggctgaaaaatttgatatctttgctggctcttacgtcagcgtgttctataactctaatgttgataacacacaattcgactctgatgagtttgtagaaatcccggaaactggtgcattccctcagactggtattgaacgcgaagtaattactgctcctaactatactcacaaatatagtcgtaaactggctggtcgtggttctgtacctgatattgacctgactgtaaactatattcctgagagtatccatgaccagctttataagttggctgaagacggtaaacgtggacagttcaaaatcgtatattggttagatgcaactaaaacgactggtgttggtaaagtctataacggcttcttgagcaacgctactttcggtggtggtgaaactgaagttacttctctggcacttactctgtcggtagacggtggtccagtagttgctggtgttattactcctaaagcttaa

SEQ ID NO: 205758 - DNA, 414 bp, Klebsiella oxytoca
atgtttaaatttcaagctgaattaacaaatctacttaatagatatatcggtaaagagcatcagtttggccagaatgattgcaatattcttattgctgattatcttgacacattctgttcaacaaattacttatcgcaattaaaaggacagtacacgtcgattaaagaaggtctttcatgttgtaaagaactgacgggttttcataacgttctacaggcatgtgaaaaacatcttattcgttctgaacagataaaagacggctcagtacttttaattaaaaaagaactcaagaaaagagtttattacatcgctacggtggtctttaacaataaagctctagtcgagcacgaaaattattacacgttagttgatgtacagcccgaacaatacgaattagtttttaataggagttaa

SEQ ID NO: 205759 - DNA, 4158 bp, Klebsiella oxytoca
atggctgttgttgctgtaggtgcaattattgctggcgcagctgctggcgccgcggcttatgccgctggtatgactattgcctttgctattggtataggtcttgctactgccgctatttctggactcatgtcttatatggcaatgaaccagaccgttccaagatataacacaactgatacagctactgcgttaggtactacttccgatccaaagacggttattcctgtggtttacggacaacaacgagtaggtggtattaacgtatggaaagcagtaggtaaagacacaacttatcttgttcagattttcgctctttgtgaaggacagattggtggatttaaatctttgtatctagataacaagaaaatcgttcttgatgggaattatcagagtggtattcttaacgaacaggctatacatccagattatagaaaatttgttgaagttgaattgtctgttggtgctcctaagggacatgttttcacactggctcagaagtacttaggtaaagacatcaataactcgggttggcctgactcagcaactggtaataacgttgcttcagtttgtgttgttatgcgcaaacgtaataaagacctgcaaaaccaagctgatattctccagcctaattctcagttaactgctgatattaatggtctgttaattcaagacctaaacaccggtaatagagaagcgtcaagaaatggtccaagtcaacttcttgattacgcaactaacactcgttacggtctgggtattcctcttgataagattgatacagagagttttaaagcgtgtgctgaccactcattaagaaacaatctatacagcgatggttcaaccgatccaaacgcaacgtttaaagaaaaccttactcaaatgactgctgcgtttcagggtgttatttttgagtcctttggccgaatgacctgccgtatagatggtcctgatgtagtacagtttgatttcaacgaagataatatctctgctggttcagtaactcttaactcaggtggttcagaaggttattacaacacgctgaacgtttcataccaagaccctgctcttgattactcagaccaagtattgcgctatccatctgatactgttaatgatggaactatcgcaaaagacaaacgaattattgctaaagatattacttatcgtttcgttaaacagaaatctcaactggatgttattgcatctatcgagcgcaataagtctctgctgaaaaatcagattgttttcagtactgtcgatgcttatacagttcaagcatgggacgttattagagttaatttccctgaattacaacttcaagactcgttatggcgtgtttttcaagttgaccgttcgttagagaagggggctgctggactgattactatcacagctgctgagtacgacccgaacgtctataccaatcttgactatgctaaagacccgaataactcaggttcaaacatcccaaatgcatctgtacttatcgcaccaaaaaatctgcaagtaacttctgttgctgaaactgctattggacgtacttttaaagtccaatgggaaagtgaagaagattttaaccgagcaggtttctacgttcagtatgctgtttctggtactgatgagtggactcaagctggtttcacttcaggtaattatttcatgataatgaacatggatattaccaaaaagtacgatatccgtgtttgtgccactggccttgtgtatcgttcagagtgggtctatcagaacaacactaaccctgctgtttcttaccagcttccaaaggtcactggattgcatctagtgaactctgatgctgggactaatattaccacggcaactcagtttgaattcgcctgggatgaccagagtaaccagaaattcaacgttaacggtactactcaaacattcgatgaagtgttccagtactatgaagtccaaatcactggtactaagaccgtttcgtacagaactaagaacattaacttcacgtatgatttcagaatgaaccagttgaacggtctgtctcgtgaaatcaccatcaaagtaatcgctgttggttatgctggtatgaagtctgaaccggttcaaatcacggcgaagaacaatcagcatcctgcaattcagaacttcgtagctcgtacaggtattagtcttaactcaggtatgattttcactcagtggaaaccttctactgttcctgattttgagcaaactactgttcagattgctcgcgataaggagttcactaaagaagttcgttcattcgtttctaaagatgatgttcttaactttgagttaggtgaaaacggcgaaggtacttggtatgtaaaagccgcgcagaacgacgtatttggttctgataacgtggtatggaccagtcctactatattagacgttaagtacgaaatcccgttcacgcctgatgatattgacactatagaagacatgcttggtcttaatgaaaagctcaaggatacgcttgatagcgctaatacacatgctaataacgtttcggaacaagctaagaaagacgctgaaaaatacgccgatgatacagttaaacgttctgaggtcaaaactaaagagtacgccgatgctgaagttaaaaaatctaatgactatactgatgctgaaatagggaaatctaatgatagaactgatggcgctatcaaagactctgaagcaagaactcaagttaaaataacagcagctcgtgagtacaccgatactcaagttgctgaatctactaaagctcttaaccagactatcgctgaaaacaccactgaaataaatggaaagattgacggtgttgaaacttctattaacggtaagattactaccattgagaaaaaccaaacgacttttgaagagcagactaatcagaagttaacttcaatggaaagtaatttcactacaaaaattggtgagtctgaaaaacgtactaacgctaaaatcactgaacttaatgaaacggttactacgaatgatgaagcgtatactcagagatttagtaagatggaaagttccatcgaagataatacaactgagattggtaagaacactgcttcgatttcttctttaagtgaaacagtagctactaatgagaagaactccgcaactagcatgaaacaacttgaagctcgtgttggtgataaaatcgccagtgtttcttctgaagctaaagctgagattgataaagttactaaccaagttaactctcagtacgcaatgactgttgatgctaatggtgtttatgcgggctttactttattagctcaggatggtccagttaaaggttctaaagcaatatttgcagctgataagttcatgatcgttcctaccgaacaagatgcagcgaaagctaaacctgtgttctctgtagatacaactaccagaactgtctatcttgacaacgctgttattaaagatgcttctattggtactgctaaaattgcagatgctgcgattgatacagccaaaattaaagatgcctccattactaatggaaaaatcacagggtttatccaatcagataactatgttcctggttctcagggttggaaaatcaacaagaacggtggttctgaatttagtaatgttgttgttagaggtgaagtacatgctaattctggcgtatttaacggaacagttaacgcgcagaatggtgtatttaacggaacagtcaatgctaatggtggtgtgtttaacaacgtcagaattgaaagaaactgtactgttcttggaactatctacgctgagaatattcaaggcgatatcgtcactatgactgaccgtgtatctaaagcatggccacctagtggtaatacaagttctggtactcgttatcctatcgcaactattgacggtatgccatttaacagggttatggtctttagtggtgatgtttctattcagcaaacatggagacagaacgttactattcgagttaatgaagacgttgtatggacttttgactcaggtaacgatggtaaaaactttgatacaaatatattttcattcagagttcctgctgcccctatgggaactaagcagtatgttaccattcaatggcctaaccgtggtgatagcggtaggttcgcgtttaccggtgttgtttcgttgtacaaaacttcaggaagcatagcattagcttaa

SEQ ID NO: 205760 - DNA, 2601 bp, Klebsiella oxytoca
  misc_feature (2578)..(2587): n is a, c, g, or t
atgaacggaagaggtcctggtaaatccggtactcttctgacgaatgtagaaaacaatcgtcaagcctggcaatacacaatttcagctgcaactgccacaaccccgcgctgggttaaagtagctacattgaaacacccaggaatggcttcttcacaactggatttaatgattagcggtggcattgattctgggcatggaaagcattatgttgatttcatcacgttatctggacgtaatttaacatcttggagcactaacaacttagataactgggttgaatggcgccgaattggttctccttctaaaggaaacgttccagagtattacgttgttaaaaacgattctgtctctgatgcggacgcttcatttgatttttatgctaaagttcctcgatactccaatgacctttatgtcacagtactaaacacatctggatataacggacaagattctggtagcgtaatcatttatgaaaccaaccaagatactggtgctactggaccgactggaagcattcttgtttcaatgaaacagatttttgacagttactcaaaaccagatttcggtgatactacaggtactcttccagttaaccgaggtggtacaggcgctactaacgtaggagatgcccgtaataaccttggtctcggtactgctgctgtgcgtaatgttggtgaatctgctggcaacgttttagaaaatggcgcttatggcttaggcggtaacggtggtaaatccatcaatgacattgtctctaacgcggatatgctgacccgtttaaaagcatatggcggtactttctggcgtggtgttactaaatctggtgttagtgttcaaaatggtctttatagtcacggctctggtatttttatgaatgctggtgataccatgtcagctattaatatcgactatgccagtgctaaagttcgtgtatacgcagctaacaacagtggtcttgctgcaggaaatgttaactacaatgaactttacggtacagcaaacaaaccgacaaaggctgacgtcggacttggtaatctgacaaacgatactcaagttaagaaagctggcgacaccatgactggtgatttaactgctcctaactttcatgccaccggttctggaaccgcatcgttctacgttaatgctgggtctggaaacgcgcatgtatggtttagaacagggggtaatgagcgtggtgtaatttgggcaactccgaataccgcagacttgggtcagattaatattcgtgcaaaaactactagtggtgtttctgccggtgattttagtttccgttctgatggccgccttgatgttcctgtagcagttaaagttggtggagcagcaatgctaaccaaagatggaaacattacatccggttcaatgtttggtggtaaccttaacaactatttgacttctattaaaaacgatatcgttgctggcgataataagcaagtaagcaagactggtgataccatgaccggtaacttgactattaacgctaacttaaaagttgaaaatcctaatggaacatttgttgatttaggttcagagaactctgataagtatagcagattaacccttgctcgtaaagttggtgatggcgctgctgtagcaatgcttaaaattactcctgaaggatacgtgcaatttggttatcaaactgcagttgctaatccgtctcccactaagtatatccgagttaaaccggacggccttgatgtagaaggggatttggtttttaatcagacatatcgcggcactgaagaggcagttgatatttccgataagactgttgaccttaatggtcttgtcattaaaagaaccgacccaggtactcgtcagttatataaatgtgtatcttctggcggtggaaataatatatcgaacaaacctacatctgatggtaactttgttctcgaagttctgtctttgcgtaaagtttctgatactgattggtcatgtaagcagacctttactacaaagaacggtaatgttgaaggcgtatatgttcgatatggacaaaatggttcatggtctgcatggaaagaggttgctgctggtgttcaaccgatcaatttaggcggtactggagcaacatctgtagctgctgctcgtaataaccttggtgttggtgaaggacaaacagtatcattcggtaatttagttaccaacgatttaactgcaaacggaaacgctagattagttggaagactgaaccttggttctacttctgcgactggtgtattacgagctaatgaaactggtgcggttgtcttaggttctgctagtggtcaaaacatccacatcagagcaggaagcccagatacttcttctggtgaaacccgctttgagccaaatggaaacgttttagttggcggtgcgattacagcttccggaagcttgcaagtaaatggcgaagccgcgatgagcagaagcctgatcgtttctcaaaatataaagaatactaacgataatagttttattctgatgggaaaagattcggatttaggtttcgtaaaaaaatctaactcaggcgctaaactggtatttgcttcaggaaaatcatttattgtcgctnnnnnnnnnnactgcaatagctaa

SEQ ID NO: 205761 - DNA, 1230 bp, Klebsiella oxytoca
  misc_feature (9)..(18): n is a, c, g, or t
ttgtcgctnnnnnnnnnnactgcaatagctaatccggcttcggaaacttacactgatgtctttaaagttgacgcagatggaaaccaaacagtttatggaaactcagaagtttccagagctttgacggtatcaagctcagcaactgttaatgatgttattaatgccaacggtggtattattgttcctactaccaagtatgtgcaaattgccgatgctcctacgcagaataaccaagccaccaacaagaaatatgttgatgatatggttgcttctgctattagtaatgctggtgatacttatcttccattagcaggtggtactgtaactggtaaccttgacataactggtactagattaaaaactgcatcgctttgggttaccggaaattcggctctcaacggtgctttagaagtaggaggtaaagctaatttcttaaatgaacttaccgccaaaacttctattaatatcatgaatgctggaaatagccatctgtttttccgtaaagctgacggtacagaaaaaggattagtatacgcagatgatcctggtaatgttagtgtaagagcgggtggtggttctggcccggtatggaatttctggaacagtggttcatgtcaattcccaggagcaatttctaactataacggaattaacagcactactaattaccctggcggcggaaacggtgcttatttaaatactggaaccttacgaactggatttagtaatggcgcttatgctgcgttatatttccaagaacatgtcggtaatacgcatcaagctattttgaatgtcaatggatatggtagagatgagagtttctattttagagcgggtggtgtaattgatacacctctgggtatggtacaaacttctggttctgatgttcgaataaaatctgacttcaataaaccaaaagacggtgctcgtgaacgtatcatgaaacttggtgttagtgaatttaaaatgaacggtgatttcagaaatcgcagaggttttattgctcagcaggttgaaaccgttgatgaagaatacgtattccaaggttctgaacaagaaattgacggcgagaagattaaaattctcaatgtagaccagacagctattgttgctgacatggttacaacaattcaagaacaggatgctgaaatcaatgatcttaaagctgaattggcaataattaagaaaatgatttcagctcttaaaaaacaagccgggaaaccggcttaa

SEQ ID NO: 205762 - DNA, 1779 bp, Klebsiella oxytoca
atgaaattgtttgaatttcagaaagggatgatagatgtagttaaagaacgtaaacgaaaaattgtattcgagacttctgcccaaatcggcaagacaaccatcctgaacgggattttgttctacaaatctgctaatgacccaggaaacgcaggggtacttcaatcaactggtaaagaaacaggccaatggttagcaggcaagatacgcccaatgattgatgcatcaccagagatgcagaaaatcgtaactgataagaatgaccgtaacgcagtcaataacggttctcagattcagttaaggactggtgggttctggtacttcatgagtttgaactctcctagtcatcttcgcggtaagacacttcctcttattcttatggatgaagtggacgcagttgaaactgatactgacgaagggaacccgatcgttatagctgaaaaccgcgcaacaacgttcggtgaagacgctcgtatctttattagttctacgcctacttctaagcatggagctatccatacgcagtacgaagcatctgataagcgtaagtatcacgtcccatgtcctagttgtggtcattatcatgaactcatctgggaaaacgttaagttctcttgggtaaaaattgacggtaagtctgttcctgatacagacagcgtatatctggaatgtccagaatgtggtcatcatatctctgatggtgaacgagctagagcagttaagaacgggcaatgggtgattactcagcctgactcacgaattgctgggttccatatctcacggctatacagcccgatgagttctttacgctctgtgatggaggactataagcaagcgtggcaatcgttcagtttatcaactttctataacactgttcttggcttgccgtttgacgatctaaacgaagacgtagagctatacaagttagagaaattaaaaaccgacgttggagtgaacaacatcccagatgatgtgttgttcctcacggcaggagttgaccaacagcaagaccgcttagaagttacgttgctcggacactcagaaaaagctctgtacatcatctgtcaccgtagcttcatgaccatgaacgctgaagttattgagagcccggcatatagagatttactggcattcttaaaggcaccgtttagaacggtctctggccgtagagtaactatggcttgggctaacgttgactccggtaacggacgtgcaactaaaacaatctacaggttctgttctcagtggaagcatctacacgctattaaaggttcaagttctgttgacgcaccttatgtaccaaccaaagagtcgaaatcaggtggttatcgtctgtttatgattggtgtcaacaaaggcaaagaccttatcagggaattgatagttcgtaatacgtcaacaacattacagacgcctgtacatctcgaaatatccgatcaggaagtacctgatgattatcttgagcaattaatgtctgaagaacttaaacgttcaggtaatacagttcgttggacagttaaacccggtggtgtgcgaaatgaagcactcgactgtattaactatggctattgtgctcgtctgcaagttattgaacaaatcaaatggcatgagtggcggaagatagttgccagacagacaatcgacgatacaccagatgcatcagaaacgattgagcctgaacagttaatagaaaccatacctgaacaaaaagaaacgcctagaaaggctgtagttaaacgtagagtagtaaaaccgtctcgtccaagaggtttcggtctgtaa

SEQ ID NO: 205763 - DNA, 138 bp, Klebsiella oxytoca
atgacaacaataattattggagccatcacattcggtggcttgtttattgctgattacgtcaaatttaaattacttgataaacgcctcaaaatcgttgaggcgaagcttgggctaaatgaacagacaaaaacttcttaa

SEQ ID NO: 205764 - DNA, 501 bp, Klebsiella oxytoca
atgtctaaatcttataactctattccttattctctggtagaaaagctcttcgtaattgactcatcttccaaaactggtattgcttggaaaaagaacgcccgtcctgctggtacagttcttccaagtggttattgccaagttcgtgttccttcttctgataagaacttatttgttcatacacatcgtattgtatggatgctcgcaaagaaaaaagatattccagatgagtcttatcacgttgaccatcttgattttgaccgtacaaataaccgtcctgaaaatcttcgtctgattaaacgttattggaatatcagtcgtcgtcaagataaaaaatctgatggtcttccttctaatatctacaagaaagctgatggtaatttctttgctcagtttagttttgaaggcaaaggatatcgacacgatgatgagtcagtccagaaatgccaagaatggttgtgtaaaaaacgtgctgaagttatcggcataatggaagaattctaa

SEQ ID NO: 205765 - DNA, 1428 bp, Klebsiella oxytoca
atggacgctcttaaacagttctggtacggcggtgatacggctattgcaaagcttaaccgttgggttgatggcgttgatgaagaaggatatagcacagcatctaagcaacgggctgaaaatcttaaaaagatggcagctgatttagctagtgatgttaaaacatctgttgaccaagccgaagaagcaactgctgctcaaaaaaacatcctcaagaaacagcaagaagaaaaagagaaagctgatgctaaggctaaagccgctcgtgataaggctcttgctgatgctaagcgtaatgctgctgaacaattaagagttcaacaagaacttcttaaaggtctacagtcattatctgagtcttcgtctggtgctaatctgattgattataacgctgagggaattaagttaatccagaacgctaacactcaggcagagttattcaaaaatataatgaagaacctcactgaggagtataaaaattcgttcagagaaatgagtggtaaagaacttggtgatagtcttactaagttaaaagactattacagtactcgcgagttactacttaaacagtctcttgaaaatcagaaaatcactcagaagcagtacaatgaagaaattcagagaatgcaggctgaacagaaagctattgaagatgctcaagtaggtatagatggaaaaggaaatcaactaaaagacctgtcgagtattggctttactacctcagacgaagaaattcagctccagcagcagaaacttcatgagcaattccagatgatgtacgagaacaaccagtcgatgtatgaagctggtctggtacagcatgatgattttcttaaacagaaacaacgtcttgaccaagcgtatgctattaaatctcaagctattgaacgtcaatctgcacagcagaaacttcaaatcgctaatgatttaacttctggcataagctcggctatgacaggtatgttaggtgagaacaacaaagctgctcaagcaatgtttgcagtgtctaaaggagtggctattgcaaatggtatgatgaacgctcatgagtctgctacgactgctatggccaaatatccaggaccattagggtatgcactggcggcgtcatcatacgctcgtgttcttactgaagtaatgcagatgaaatctatgtctctcggtcaattccatgatggtatcgataatgttcctaacacaggtacttatctgctacaagagggtgagcgagtagtagataatcggttgaaccaagacctgaaagacttcttaggtaaacaacagactggtaaaacagacagtcaaccaatcgatgcatctatccatatctctggatctgtgaatggtgaacgtgagttaatgcagataatgaaacgtcaacaaaaaatccttgctgatattgttcaagatgctaatcggcgtagaatgtaa

SEQ ID NO: 205766 - DNA, 342 bp, Klebsiella oxytoca
atgcgtaaaggactcactggagatgaaatactctccatgagtatgaaagaattctacatggtatatctgttcgatactttcattgagcctcaaggtcctgtcatgaacgatttctatcaggcgcgtctggcgcatagtgtaatagcttctaatcctaatcttactgctgaaggccgtaagaaaatcaatatgaaagatttctatctgttgaaggataaagtattcaaaagtcctgaggaacttcaaaaagaaaaacagaaagagcaagaacgtaaacgaaaagctcttgaaagtatgttcgaacctgaacttctggctaaagctagaaagtcaatcaaataa

SEQ ID NO: 205767 - DNA, 315 bp, Klebsiella oxytoca
atgtctaaatttaacttcgaagaaatgattgctgctcttagtccgaaacgtgaagcagtagaactgaatggctttaaattctatgctcgtccgatgactgtatctgaatttggtgaagctttctatcagggtaaagataaagaagaccgaaacgacatcatgattttggaatgcattgaacatgaagatggctctaaggttttcgaatctgttgaacaagtcaaggctctttatactactgttcgtgctcagctcgctagtgccgttactcgcgcaagtatctttactgaaactgtagaagaactggaaaagtaa

SEQ ID NO: 205768 - DNA, 486 bp, Klebsiella oxytoca
atgacattatatgaaatgctccgctttgatgaaggcgagaaactacaagtttataaagacaccgaaggatattggactgttggtattggtcatttattgactaagaacccatctaaggaacaagccatcgcttgtcttgataaagaactaaaccgagttacttctggtgttatctcaaagccagagtcagaacagctgttcaatcaggacacttctagggcactccaggacatttcccgctcagaattgagttccatatacattcagatgaatggacctcgtagggctgctctggtgaacatggtgttccagttagggctcactggtgtgttaaagttcaggaaaatgattcagtacctcaaagttggtaattatgaggctgctgctgatgaagggcttgatagtaagtgggcaaggcagacacctaatcgtgcacgtcgagtaactgaagttattcggacaggaacctttagttcttacagttga

SEQ ID NO: 205769 - DNA, 249 bp, Klebsiella oxytoca
atggttcataatgatggtatagccgaaaaatacaatgaaacactagataaaaaaacaaagaaaacagataaagagaaacggctattaaaatctatacgaagagcgcagggaattgaagttaatgactataatactgttataatgcgcaatgattttcttccgtatgtcattagtgaatttgaacgttatatcaaagcaatagaagaaatcgtcattgattacgaaaataaaaatgcaacacagccataa

SEQ ID NO: 205770 - DNA, 168 bp, Klebsiella oxytoca
atgaacatagaacagaaagtagacttactaattaatgaacttgagcaattctcttctaatcaagtaaaagagctaatcaagcttcgctcaatctataataaagaacaatcagagtattgggagataactgctaagttatgtaaagaaaaagctcggaggttaaaataa

SEQ ID NO: 205771 - DNA, 126 bp, Klebsiella oxytoca
atgctcgggattttttttattaagttatggatgaatttgaatctatattactttggtgaaaatccgttattcctcgaagcatatatctattcttctgaggttaagccgtttggtgcaaagagataa

SEQ ID NO: 205772 - DNA, 714 bp, Klebsiella oxytoca
atggcgctggcgtacaacgtggcgtcgaatatcatcaccggcttcgctatttactattttacctacgtcatcggcgatgccgatctgttcccgtattacctgtcctacgccggtgcggctaacctattgacgcaggtgttcttcccacgactggcaaaagcgctatcgcggcgaattttgtggtcgggggcatcggtgatgccgatattgagtgccggtgtgctgctaatcatggcgctgacgggtttccacaatctgcttcttatctgtgtggcaggcgtatttcttaatatcggcgcggcgctgttttgggtgctgcaggttcttatggtggccgataccgtcgactacggtgagtacaagtttaatgtgcgatgcgaaagtatcgtctatgcggtgcaaaccatggtggttaagggcggttcagcatttgcagcgttctttattgcggtagtgctgggcgtgattggttatgtgcccaacggtgtacagtcggccgaaacggtgctgggcatgcagtttattatgattgcgctgccaacactgttttttgccatcactctggcgctatatttccgcttctaccggttaaatggcgacatgctgcgtaagattcacattcacctgctggacaagtatcgcaaagtgtcacagccagctgtagtgggtaataagcctgttggacctgttgctgccgtaagcgaagtgaagtga

SEQ ID NO: 205773 - DNA, 789 bp, Klebsiella oxytoca
atgccgatggtagtcatgttgcagatggtaaccactcttttcagaagagtccgggaggttgtcgcaaaactcgaagcatcacagatacagccctttaataaggttatcgttcactggacaaggtctataataccgttaatacgtgggcgtgtaacagttgacacactattcgatgagacaattgtgccgcgtggtcctcatgacccgattaatgaggcagcttctgtagcaaggcgagcattttgggaaaagtatggcagcgtctcagatggctttaaggctgaacaaaatgacgcgaacgtacacaaccagacggaatggttcgggccccatcgtcgagtactcgatattaagaactacacccaattaacgctggccactgatggcctctcgacgccctgggctggcattgcagacccggaaaatggcgtaggatgcgaactctttatggaattagacgcttcgagttttaccagccacgagattgatgactgggctcatctcttgattaagctgggggatctcgtggccgatgggtatcaggttgctgccgatgatgaagaatatgttgcaatcctgttttgcactcttacagacgaatatagcccaatgacccgaatcatcctcagccgtgatggccgtaagattgataatttgcctttcggttccgttccgctgatccgtgtaacgccaatagcagagtcagagattgaacaccttgaccaatctgatgaatgggcatcaagcgcagcaaggcatgctctcgcggaacggcagaaagaaacatag

SEQ ID NO: 205774 - DNA, 180 bp, Klebsiella oxytoca
atgaacacgatcagggttgttggtatcaatattgccaaatctgtttttcaggtttgcgtctggatgaatgatggctccgtcgcatggaataaaaaaatctcacgttccagattgcaggataccgttcgacaattcgagcctggaacaattattgctatggaagcttacattacgagctag

SEQ ID NO: 205775 - DNA, 459 bp, Klebsiella oxytoca
atgtttacgttaaaaaacgtcttaaaatatatcaaatataaagtaaaaacaatcagattttatattgtgagtgatgcctgctttcatgctggcaggctttgtaaaatatatggaggtcatgttaacattgaaaaccccgtcacgctaagtgaaaaaatatgccatagcatgatccatgatcataatccaatatatacacatatcgccgataaactagccgtccggaattatgtttatttacacacagataaaataaaaacagtgccattactgggcgtttactcttcttttgatgagatagattttaacagcctgccggaccagtttgtgttgaaatacaaccacgacagcggcagtaccatcatctgcaacaacaaacaatcttttaatgtttcagaagccagagtcagactaacgatggcgttaaacagcaatatgtattgcagcccccgtgaatga

SEQ ID NO: 205776 - DNA, 267 bp, Klebsiella oxytoca
atgcgtaaagcccgttttactgagtatcagatcatcgctgtgattaagtcggttgaagccggacgaaccgttaaagatgtctgccgggaggccggtatctctgagggcacttactacagctggaagtccagatacggcggtatggaggcttctgatattaaaaagatcaaggatcttgaggacgagaaccggcgtctcaaacagatgtttgccgacctgagccttgagaaccgggcgctgaaagacgttatcgaaaaaaagctttaa

SEQ ID NO: 205777 - DNA, 165 bp, Klebsiella oxytoca
atgagtgcaggtaaaattgttattaccgatcgaatttcaataattgatctgcaaaatctatcgataaaaacgatcaattatttgtatttgatagattataactatcattgcaatgatatcgatcgtttttgtagatcagtttatgagggggatgtggtgtattaa

SEQ ID NO: 205778 - DNA, 1212 bp, Klebsiella oxytoca
atggcgttaaccgatgtgagggtaagaagtgcaaagcctaccgacaagccttataagcttaccgatggtgaaggtatgcatttaatggttcatcccaatggatctaaatactggcgtttacagtaccgctttgacggcaaacagaagatgttggcgttaggtatctatccagaaatttctttatctgaagctaggcagcgaagagatgaagctaagcggcaagtcgctaacgctatagatcctagtgaacagaaaaaggttgagaaacaagctcgcaaagcgacagtggaaaataccttcaaagcgatcgctttggaatggcatgagtacaaacggccaaactggtccaaaggctacgctgaagacatcatggaggcgtttgaaaacgatatcttcccggatatcggcaagcgcccgattgccgagattaagcctctggatatcctcagttcactacgtaaactcgaaaaacgtggtgtccttgataagttgcgcaaaatccgccaggcctgtaaccaagtctttcgctatgccattgtcaccggtcgggctgaaactaaccctgcctcggatctggcaagtgcgttaaccccgccaaaatctgtgcactatcctcacctgctagcggatgaacttcctgcttttttagaagctctagccgcttattccggtagcccagtaactcggctagcaacaacgattttgatgctaacgggcgttcgtactattgaactccgcatggctgaatggaaagagttcgattttgacaagcgggtttgggaagtaccggttgaaaggatgaagatgcgccgccctcaccttatacccctatctgatcaagttgtggcagcactacgggagatccaggctgtgactggccgttataacctagtgttcccaggccgtaacgatattaccaaaccgatgagtgaggcgagtatcaatcaggtactgaaaaggattgggtatcatgggaaggccacaggacacggcttccggcacacgatgagtaccatcctgcatgaacagggatataacacggcatggatcgagctacaacttgctcatgtggataagaataccattcgtggcacctacaaccatgcgcagtatctggagcaacgcagggaaatgttgcagtggtatgcaaattatgttgtgtcactagctaagggcactttcatacagggagcctttggtaagacaggctag

SEQ ID NO: 205779 - DNA, 972 bp, Klebsiella oxytoca
atggcaatttataaattctataatatacaaatgcttccaataaatactgatgtcggtaatattggcgcagaaggatactgtcgtctatttcaatctgtaagtgatttgattgatgagataaaaagagaacatcataagctaagttcgatagcagtttcgatgagaggagatatgttttttgctccttttcatgtcgatgtctacgaatatccaggaattgatgaaaacaagaaattgatctatggatcttttcttaagtttgatgatgtgaatgaattggttgacaccaatagcggagaaacagagtatcgctctaaggggaatacaagtagcaaacggtatagcttggagtttgttttcgatccatatactcacatgcttgctatacatgatacgaaagggttacctacaagggttccattgataaaatccttgaaagagatattagagtatcatgcaataaagttattcaaagatcataatcttgaaattgaggaattaacttctgctgattctatctcagaatttctttcttcccccaaaaaaggttataaaaattataatggatttatcaccttttcaaattctgatgcattcgatgaagcaatagaggaagatatgttgcttactgaacaagaattgaaagaaaaacgggtgggtaagtgggaagttaattataaaagtttttctaaatcggtgatgaatgaattacctcggcaagcgaaaattcaaatgcttttggcaacaaggtatgggaatgcagaggtttcatatttagatgaaaatggtgatcgccagaagtatcaaatggataattatcctgtaagggaaggctttaaagatgaacaggttaaggggaatagaaatagagcattggaaatattaggcttgattaataaggctcttaataaaacgaaggctaagataaagacagtgctttcaaataagaatttccttgataataaggagtga

SEQ ID NO: 205780 - DNA, 558 bp, Klebsiella oxytoca
atgaatttctataacttattacgaagattgccagttgtagggtctgtttttcgtatcgtcaatgcttatgcatataaaggtgatattgattgtcaatgtaaaatagcaccttttaaactatggtggggcaggattttcaagaaaatgctttggttagttatttttgttggagtcctgttcttaattaaacatgatagtatattagattggactgcggcagatactattctatcggtatttcctagtgtacttggttttggtattggtgcatttgctttgttattcataatgccaagtgattttatgctttttcttacacaaaagagagaacgtttaggatttggtccagaaatcgttcctgttgatatgggctatccgcttattgtatttacttttgttatggctatagcaggtttaaataaaatgtttcctggttcaatatttaatatttttagcatatgggcctttttttatggtttagcaatggcattagaactgattacctttctatttaatgcatcggtagttattcagaaaattatatctaaagacaactaa

SEQ ID NO: 205781 - DNA, 1263 bp, Klebsiella oxytoca
atggccctgaatgacagcaaaatccgcgctgcgaaacccctcgcaaagtcctacaaaatcaccgattcgcaaggtttgtacctgacggtgtccgccagtggctccaagctatggtatttccgctaccgttttgaaggtaaggaaaatcgtctggcctttggcccctatccgcaggttacgctggcagaagcccgcgaaaagcgcgatgccgcgcgtaagctgctggtatccggtatttgcccttctcagccccgtaaagcagaaaaagctgcggtagatgaatcccgcacgtttaaatttatcgccactgcgtggcacaccagttgccttaagctctggtcggaaagccacgcggacaagatcctcacctgcctgaagcgctacgtctttcccgatataggcgggatggatatcgctgaaattgaaacccgccatctggcccaactggtcaaagctatcgatgataaaggcgtacatgacgtcgccggacgggtgcgccagcatctgaccaaaatcatgcgtcacgcggtacagcagggggttatcaaatataatccggcttacgatctggatggcgtcgtgacccctgttgtgacccaacatcatcccgccctgcccctgaaacgcctgccagagctgctggataagattaatggttacaaagggcgggaactgacccgtctggcgctggcgctgaatctgcacgttttcctgcgttccagtgagctgcgcctcgcccgctgggatgagttcaacctgaaagcccatatctggacggtgcctgcacagcgggaagcggttaagggggtgagattttcggagcgtggcgcaaagatgaaggatgagcatctggtgccgctgtctgcgcaggccgtcgccctgctggagcagattaaggaaattaccggagagtcggtatttgtctttgcaggtgcgcactccatgaacaagccgatgagtgaaaacaccatcaacaaggcgttgcgcgttatcggttatgacaccaaaaccgaggtgtgcggtcatggcttccgcacgatggcctgtagcactctgaatgaatccgcgctgtggtcgaaggacgccattgagcgccagatgagccataaggagcgcaacggcgtgcgggcggcgtatgtacataaggcggagcatctggaagcgcgtatggagatgatgcagtggtggtcggactatctcgatgtaagccgcgaggggtacgttgcgccgtatatttatgcgcggcgacataaagcggcctga

SEQ ID NO: 205782 - DNA, 2511 bp, Klebsiella oxytoca
atggaaattgaaataattaaaaatacagttagtgatatgattcttgatggaaacgtatcttcagatgttctcaatacatttatcaaaagtaatggttcagtattacccttagaaagtattttgtgggattataaggttgagttcgacgactcaccacatggattaaagaaagctctaaaaagcatcgtaagcttatacaatacgtatggtgggtatataatctatggaataaatgaaaaaattaaagacaccgaatttgaggttgttggaatcaatgaaaatcatataaatcaacagaaactaagagggcaatttgataagtactttggtaagcgcataccactggtttatcaagaaatattgattttaataaatggagccaacgtcttgcttggattgttgtacattccaaagagaaaaagttctgaacgatcactcgcccctataactgatgctaaagacgataattcaaagtttatccttgaaaaaagcgcagtatattttagagcagaagatgaatgtaaaaaggttattagcacagaagattttgtttttatctccagtcccagaatctttggtgagaaatcttctcagcgcaaaatcccgagtgttttcatagatcataacctaccggataaatcgtttatatgcccggtctttgtaggccgttttggaattttaaatgaattatgggcatggctagcagatgaattgcaacactccaaagtattagctgccgatggtggtaaaggtaaaacctctatagcttatgagttttgtcaattattgattacaagtagagttgaaggtatcgagcaaatcatatggttaactgcaaaaaacaaacaatttaaagctgtttttaatgaatatgtttctgttcccgaaacccatttcaatgatatgtattctctattaaaagaaatatgtataagaactggaacgttagaaaacacacttgaagatttatctttaattcaattaactaaactagctaaacaaaacctcaaagaatacccttcatttattgtaattgatgatgttgactcgagtactcctgaagaacaaaaacgaattttagaaatggcacgtacaatttcttcagaatcttcaaaaatattattaacaactagggttaatagtatttactctttggactcatcaattttgatacctggtatgtttggcgatgaatacaaggatcttattaataccttatgtgaaaggcttaagttacaaaaacttaatgataaaaacatagaaaaacttgaaatagcctcagaagggtctcctttattttcagaatcaatattaagattattcaaacaaggtagtgcaatagacttagcaataactgattggactggaaaaagtggtgaggctgtacgagaggctgctttaaagaaagaagttagtgaattatctcttgaagcaaaaaaagttctggtcactgtttgcactgtaggttcttgttcgaaaagtgaaatccgacagcttactgatcttgaatacattgacataggtaacgcactccaagagcttgatctattattcttgctgaatagcacaccattcatcgaatcagaaccgcgatatgaatcctcctcatcaatcagctatcttatttcaaatatgattagtgagataataccggaggctaataatttcttaagtaaaattagaaaagcattccacggcctgcaatccaactctagaaaatatcatcccagagtaggtgaagctgtacgccaatgcaatgcattactaaaaagtttacgatttccagaggcaagagaaacattacagagtttgattagtgatccagaattcaaagaaaacaaagatttgtattatttatctgcatcaatagaatattccgatcctaattctgaaccaaaatcggtgagtcatgctttccagcaagcttatatcaaggggcaaaggaaactacaattttttgaacaatggtatgatttttcattgaaaaatgaatcaaactcaacagttttggatatatgtaaaaacgctattaaatccggtgcaaatgacttccgatgggctgaccgatatatcgaagtcactgacaagatcattccagccgttattaataacaataaaaagaaggaactattgattgattcttacaagatactaattgcttccaaaagcagtcgaggctatggcttcaatagagaaaactttaaagtaaaatcacaaagactactggagcaaattgttcatattttagatatcacacaagatgttaaggccaaagctagcattatattatttgcactagaaaatggagacatgagctcttatacactaatgaatttgattgatatttccaaaattttcagggagcgctgtgtagatgatgattttctactagacaaaatatttattgcaatcacatcagcaattgagtcactcaagcaacaggattcacaaagacttaacataatcgaaggtctaaatgatgaattattaaaacacgcaaaggggaaataa

SEQ ID NO: 205783 - DNA, 723 bp, Klebsiella oxytoca
atggttaagttctcatttaaagttccaattttcgatttctccctaacatttgacattatcgaagcattaataacgcaaagtgaatcctcaattaaaaaagggattgcagagtataaagaaaaaggcccagaagaatatgtgattggtatctctcctgaagaaggactctatcagacaattgatcactacatgggtcttgacagttcagctgttgacctagatgaaatgttcttagagtattatccaagtgtgtttcgcaggtctgtattcttaactatcttcgggatgtttgagcacgagattgaaaaattttgcaataattttgcaaacagacatcatacccctataaacatttcagatcttaaaggcagcggatttgagaggagtcatctattcataaaaaaacttcttgaaatgaaagtatcaactcactatccaaccatcaaaaaaataacaaaactaagaaatagttgcgcgcacaacgatgctaaatatatagagaacgatggacagaatagtaaactcattatcgaacttatggatgctaatcctgatatatttaaaaaggatggaaaacaagttctgtttatgaatggtgcattgaccatggtcttaaacgccttcaaatcgtatctaactgaagttgagcaagcagtagatgaatacgagaagaggattcgaagtggcgacaaagtggcggcagcggttggcattgccccgtaa

SEQ ID NO: 205784 - DNA, 318 bp, Klebsiella oxytoca
atgcgcgaacccgggggctggcagtggcggttgtcgggactgagggcgagctcatcgcctttggcgcgcacgcttgctgcccgccgctaccgcgcctggagcgccctgcgctttcgccgtccgacggcaacgctggcgcaagaggtcagctccggtaccctgcagctggcggtatttaacgacccgcagctgctggcgatgccgggcggcgagccggtgatagttgaagggctggctattggcggcatcgggatcagcggcctgccaccggagctggacgccgggctggcggcgcggtttgttcagcgattgacttga

SEQ ID NO: 205785 - DNA, 372 bp, Klebsiella oxytoca
atgataaacggtgcggctacggtacagcactttgcaagtgatatcgcgatgctgaagcggaacaacgtagagctatcgggtcggcctaattttaccgttcaggagcgctggccggtaagcatcacagcccaccagcgggtccgcgttagtgtcaggatttcccgttcatttcaggtcagcctgctgtcgattttgcacaagcagctcatgctgagcaccggcgaaatcaagagatacgttgagtcagggaaaataaggggtatcacgatgaaaatgcttaaatcgcgaaagctgaaggctgcggaatataagtttcagctgcctgcggaaacgctgttcgcccagcgcaagatagttctgacacatcgttaa

SEQ ID NO: 205786 - DNA, 1122 bp, Klebsiella oxytoca
atgtcattttctgtgcaggaaaccctgttctcgcttttgcagcacaatgcgatttcaggacacgaaaacgctgtcgctgacgtcatgctgtgcgaattcaggcgtcaggcaaaagaggtctggcgagacaggcttgggaatgtcgtcgcgcgctacggtagtgataaacccgatgcgctgcgactgatgatttttgcgcatatggatgaagtcggttttatggtgcgcaaaatagagccgtctggatttttacgctttgaacgcgtaggcggtcctgcgcaggtcactatggctggttccatcgtcaccctcaccggggacaaagggccagtcatgggatgtatcggcattaagtcctaccactttgccaaaggcgacgagcgcacgcagtcaccttctgtcgacaaactgtggattgatattggtgccaaagacaaagatgacgccatacggatgggcattcaggtcggtacgcctgtcactctatataacccgccgcaactcctggcaaacgatctggtgtgcagtaaagcactagacgatcgtctgggctgtactgccctgctcggtgtagcggatgctatcagtactacggagcttgatatcgctgtttatctggtggcttcggtacaggaagaatttaatatccgcggcattgttcccgtattacgccgtgtaaaacctgacctggcgattggtattgatatcactccatcgtgtgacacccctgatttacacgattattccgaggtcaggattaatcagggcgttgggatcacctgcctgaactaccatggccggggaacgctggccggattaatcacgccccctcgcctgatacggatgctggaacagacggcgcttgaacacaacattccggtgcagcgagaagtggctcccggcgtgataacagaaaccggttatatccaggttgagcaggatggtattccctgcgccagtctctctattccttgtcgctatacccattctccggcggaggttgccagcctgcgtgatttgactgattgcatccgcctattgaccgctctggcaggtatgtcagcagcacatttccccgttgagcctgattcaggcactacacaagaggcacatccattatga

SEQ ID NO: 205787 - DNA, 279 bp, Klebsiella oxytoca
atgaaaaagatccttgtggcatgcggtaccggcatgtcgacttcaaccatgattgcacacaagctgcaagagttcctgactgaacagggcattgcagccactaccgcccaatgctgtctgaatgagatccctcttaactgtaacggtatggaccttattgtaacctccatgcgaaccaacagtgattacggcatccctacgcttaatggcgccgccctgctcacagggatcaacgacgacgcgttaaaacaacaaatcaaggctctgttaacccaataa

SEQ ID NO: 205788 - DNA, 1314 bp, Klebsiella oxytoca
atgtttgattacatcctgtctctcggcggtaccgttttcgtccctatcatcatgatcgtgattggccttatcttccgcatcccctggctgcaggcgattaaggcaggggtaacggtcgggatcggttttgtcggtatgggactggtgatcgtcatggcgatcgacagcctaagtccccctatcaaagtgatgattgaacgcttcggcctgactctgcatgtctttgacgttggcgcaggccccgcctccggcgttggttatgcgacagccattggtgccatgattatcccggttatttttcttctcaatgtcgccatgctggtcacccgtctgaccaaaacgatgaacgtcgatatttacaattactggcactacgccattacgggtacggtggtccaacttatgactggcagcctgatttatggtgtgttgggggcaatctgccatgcggcgctatcgttaaaaatggccgactggacggcgaaacgggtacagaacatcgtcgggctggaaggtatttcgataccgcaaggctacggttccagttcagtaccgcttttcgttctacttgatgctatctatgaaaaaatccctttcatgaagggacgcaatatcgatgctcaggagatccagaaacgctacggcatggtcggcgatccggtgatcatcggcgtagtgcttggtctgatttttggcctggccgctggcgaaggctttaaaggttgcgccagtctgatgattaccgttgcggcaatcatggtgctgttcccgcgcatgatccgcctgattgttgagggcctaatgcccatctccgacggtgcaagaaagttcttccagaaatatttcaaaggacgtgaagtgtatatcggtctggataccgctgtgacgctggggcatccaaccaccattgctgtcggtctgctactgatacccattatgttgattctggccagcattttaccgggcaacaaagtgttacccctcgcagacctgccggtagcgccgttctttatctgtatggctacggttatccaccgcggagacctgatcaggacgttgataagcggggtcatcgtgatgattaccgtcctgctgatcgccacccagttcgcgccttacttcaccgaaatggcgctcaaaggcggtttcagttttgccggtgaaagtgcgcaaatctcagcgttgtccgtgggcaatatgttcggttggtcgatttctgaactgatgtcgcttgggattattggcgttgtcgtggcggtcggtattgtcgccagcgtcgtgctgttcttacgtaaacgtgaattatcggaataa

SEQ ID NO: 205789 - DNA, 807 bp, Klebsiella oxytoca
atgagttggctgaaagaggttattgggacggaaaaagcggtcatcgccatgtgccatctacgtgcattgcccggcgacccgagttttgatgcgcagttggggatgaactgggttatcgacaaagcctgggacgatctgatggcgctgcaaaatggtggggtggatgcagtcatgttctccaacgagtttagtcttccctatctcacgaaggtgcgtccggaaaccactgcggcaatggcacgaatcatcgggcaattaatgaacgatatccgcatcccatttggcgtgaatgtactgtgggatccggtcgcctcattcgacctcgcgatggctactggcgcgaagtttatccgcgagatctttaccggtgcctatgccagcgactttggcgtttgggacactaacgtcggtgagaccatccgtcatcaacaccggattggtgcaggcgaagtgaaaactttgttcaatatcgtccctgaggccgccgtgtatctgggcaatcgcgatatctgttctattgctaaatcgacggtatttaacaaccatcccgatgcgctctgtgtttccggcctgactgcaggggcgcgtaccgacagtgcgctgttaaaacgggttaaagaaacggtgcctgacaccgtagtgttggccaacactggcgtctgtcttgagaacgtggaggaacaactcagtatcgccgatggctgtgtgaccgcaaccacctttaaaaaggacggcgtttttgccaatttcgttgaccaggcgcgagtcagtcagtttatggagaaagtgcatcatatacgccgataa

SEQ ID NO: 205790 - DNA, 432 bp, Klebsiella oxytoca
atgattaacgatattaaatgggtacaggcacaacgtgaagctaccgactggcgtcaggccgtggaaatcgccacccggccgctggtagcctatggtgccgcgcagccatgctacgttaatgggatcatcgaaaatacccttaactgggggccttattatttgatagccccgggaatcgccttgcctcacgcccgaccagagcaaggcgcgaactataatcaggtcagcatcaccacgctacgcaccccggtcgcctttggtaacgaggagtgcgaccccgtctggctgcttctctgcgtcagcgccacggatgccaacgcacatattttgaccattcagcgcatcagccagtttattgattcgccacaacgcttagcggcagtgcgaaatgccagcaccgacgatgcactttttgcgctggtatcaggttaa

SEQ ID NO: 205791 - DNA, 633 bp, Klebsiella oxytoca
atgatcctgcacccttctctcgccagcgcaaatcctctgcactatggtcgtgagctgacggcattggacaatctggattttggaagcctgcatctggatattgaggacagcagcttcattaacaacattacgtttgggatgaaaacggtgcaggccgtcgccagacagacgcctcatcccctgtcctttcattttatggttacccggccacagcgctggtttaacgcgctggctgaaatcagacccgcgtggatcttcgttcatgcagaaacgctggactatccctcggaaacgttagctgagatccgccataccggcgcacgagccgggctggcatttaatccggcgaccccaatcgacgcctggcaatatctggtgtctgagctggacggggtgatggtaatgaccagtgagcccgatgggcacggacagcggtttattccctctatgtgcgagaaaatccaaaaagtacgcacggcttttcctcagaccgagtgctgggccgacggtggaattacgctggcggctgcacagcaactggcagcagccggggcgcaacatatggtgattgggcgcgccctgttctcttcatctgactatcgcgcgaccttagctcaattcgccaccctgtaa

SEQ ID NO: 205792 - DNA, 783 bp, Klebsiella oxytoca
atgagccaacagagacctgaccgtatcaaacagatgctgcactacctgtggcaacatcgtcacctctccacacagcaggccatggagctttttggctatgcggaagcgactgtccgtcgtgattttcagtatattgccaaccagtacccaggcatgatccgcggtcacggttgtctcgacttcgacgacagtaccgacgacaaagagtacgttttcgacgtgaaacgcacattgcaatctgtggcgaagagagaaatagccgcccttgcccgaatgatgatcaaagatggcgactgcttttttctcgactccggctcaacctgcctcgaactggcgaaatgcctggccgatgcacgggtgaaggtcatctgcaacgacattaaaatcgccaatgagctgggctgttttccccatgtggaaagctacattatcggtggactgattcgcccgggttatttttcggtaggagagagtctggcgctggagatgatcaatgcgttttccgtagaacgcgcgtatatctcctgcgatgcgctgtcgttggagacgggaatcaccaatgccaccatgtttgaggtcggggtgaaaacacggattattcaacgctcgcgtgaagttattctcatggccgatcactcaaaatttgatgccgttgagccgcatgctgtagcaacactctcatgtattaaaacgatcatcagtgacagcgggttacctgagactattgcacagcgttatcagcgaaccggatgtcagttgtttttacctcattcaataaagtga

SEQ ID NO: 205793 - DNA, 789 bp, Klebsiella oxytoca
atggttcgcaaagggtgtaattcattagtccgtgctgaaaaaatattaacccacattgcatgggttggcatggcaagttatatggagttattaaataaattccagtaccccaaaagcagtctgcttaatttattgaatgtaatggtggagtgtggtttcttaattaaaaacaaaaacggctactattcactgggaataaaaaactacgaattgggttgtcaggcgttacaccgtcaaaatatatttgaggtgactaagcggccaatgcaggagttgtcgctgaaaagtggactggtttgtcatcttggggcgatggagagcatttcggctatctatctcgacaagatcgaaagtccggactctgtaccgacgagcaaaagctggattggcaaaaaacttgagttgcatattaccgcgttgggtaaggcgttattagcctggaagacacgagaagaactggattattttttagaagcactcacgttaactccgcatacgcgcaatacatttaccgataaaaaattgtttctggaagaattacaaaaaacacgccttcggggatgggccatagacaacgaagaatcaacctatggtgcggtatgtttaagtatgccggtattcaatatgtataccagagttaactatgcaatctcactttctggcgatccggtagtttattcaggaaataagatagacagctatctggaattgctccggaaatgcgctgggcaaatatcatatgggctgggatacagaaacgaaaatgagcatttacgaaaaggaaactga

SEQ ID NO: 205794 - DNA, 906 bp, Klebsiella oxytoca
atgaaaaaattcagcggcattattccaccggtatccagcacgtttcatcgtgacggaacccttgataaaaaggcaatgcgcgaagttgccgacttcctgattaataaaggggtcgacgggctgttttatctgggtaccggtggtgaatttagccaaatgaatacagcccagcgcatggcgctcgccgaagaagctgtaaccattgtcgacgggcgagtgccggtattgattggcgtcggttccccttccactgacgaagcggtcaaactggcgcagcatgcgcaagcctgcggcgctgatggtatcgtcgccatcaacccctactactggaaagtcgcaccacgaaatcttgacgactattaccagcagatcgcccgtagcgtcaccctaccggtgatcctgtacaactttccggatctgacgggtcaggacttaaccccggaaaccgtgacgcgtctggctctgcaaaacgagaatatcgttggcatcaaagacaccatcgacagcgttggtcacttgcgtacgatgatcaacacagttaagtcggtacgcccgtcgttttcggtattctgcggttacgatgatcatttgctgaatacgatgctgctgggcggcgacggtgcgataaccgccagcgctaactttgctccggaactctccgtcggcatctaccgcgcctggcgtgaaggcgatctggcgaccgccgcgacgctgaataaaaaactactacaactgcccgctatttacgccctcgaaacaccgtttgtctcactgatcaaatacagcatgcagtgtgtcgggctgcctgtagagacatattgcttaccaccgattcttgaagcatcagaagaagcaaaaaataaagtccacgtgctgcttaccgcgcagggcattttaccagtctga

SEQ ID NO: 205795 - DNA, 1968 bp, Klebsiella oxytoca
atgtctgttcgcaacatttttgctgacgagagccacgatatctacaccgtcagaacgcacgccgatggcccggacggcgaactgccattaaccgcagagatgcttatcaaccgcccgagcggggatctgttcggtatgaccatgaatgccggaatgggctggtctccggacgagctggatcgggacggtattttactgctcagtacactcggtggcttacgcggcgcagacggtaaacccgtggcgctggcgctgcaccaggggcattacgaactggacatccagatgaaagcggcggccgaggttattaaagccaaccatgccctgccctatgccgtgtacgtctccgatccttgtgacgggcgtactcagggtacaacggggatgtttgattcgctaccataccgaaatgacgcctcgatggtgatgcgccgccttattcgctctctgcccgacgcgaaagcagttattggtgtggcgagttgcgataaggggcttccggccaccatgatggcactcgccgcgcagcacaacatcgcaaccgtgctggtccccggtggcgcgacgctgcccgcaaaagacggagaagacaacggcaaggtgcaaaccattggcgcacgcttcgccaatggtgaattatctctacaggacgcacgccgagcgggctgtaaggcctgtgcctcttccggcggcggctgtcaatttttgggcactgccgggacatctcaggtggtggccgaaggattggggctggcaatcccgcattcagccctggccccttccggcgagcctgtgtggcaggagatcgccagagcttccgcgcgagctgcgctgaacctgagtcaaaaaggcatcaccacccgggaaattctcaccgataaagcgatagagaatgcgatgacggtccatgccgcgttcggtggttcaacaaacctgctgttacacatcccggcaattgctcaccaggcaggttgccatatcccgaccgttgatgactggatccgcatcaacaagcgcgtgccccgactggtgagcgtactgcctaatggcccggtttatcatccaacggtcaatgcctttatggcaggtggtgtgccggaagtcatgttgcatctgcgcagcctcggattgttgcatgaagacgttatgacggttaccggcagcacgctgaaagaaaacctcgactggtgggagcactccgaacggcgtcagcggttcaagcaactcctgctcgatcaggaacaaatcaacgctgacgaagtgatcatgtctccgcagcaagcaaaagcgcgcggattaacctcaactatcaccttcccggtgggcaatattgcgccagaaggttcggtgatcaaatccaccgccattgacccctcgatgattgatgagcaaggtatctattaccataaaggtgtggcgaaggtttatctgtccgagaaaagtgcgatttacgatatcaaacatgacaagatcaaggcgggcgatattctggtcattatcggcgttggaccttcaggtaccgggatggaagaaacctaccaggttaccagtgccctgaagcatctgtcatacggtaagcatgtttcgttaatcaccgatgcacgtttctcgggcgtttctactggcgcgtgcatcggccatgtggggccagaagcgctggccggaggccccatcggtaaattacgcaccggagatgtcattgaaattaaaattgattgtcgcgagcttcacggcgaagtcaatttcctcggaacccgtagcgatgaacaattaccttcacaggaggaggcaactgcaatattaaatgccagacccagccatcaggatttacttcccgatcctgaattgccagatgatacccgactatgggcaatgcttcaggccgtgagtggcgggacatggaccggttgtatttatgatgtaaacaaaattggcgcggctttgcgcgattttatgaataaaaactga

SEQ ID NO: 205796 - DNA, 1350 bp, Klebsiella oxytoca
atgccactaattatcgttgtggcagggattgctttactcctgcttttaaccataaaaataaagcttaatacgtttgtttcgttaattattgtctcgattgctgtcgccatcgccagtggtatggatttgagtaaagtcgtcacctcagtcgaatccggacttggcggtacgctgggccatattggtttgatatttggcttcggtgttatgctcggtcgcttgctggccgatgcgggtggtgcgcagcgaatagcgctgaccatgctgaattatttcgggaaaaataaacttgactgggcagtggtctgttcggcgtttattgtcggtatcgcacttttttttgaagtcggtttaattcttctggtacctattttattcgctattgcccgtgaagcaaaaatatcaccgatgtttatgtgtgtgccgatgctttccggtttgctggtcgcacacggttttttgccgccgcaccccggcccgacagtaatcgccagagaatatggtgctgatgtaggattggtactgatatacggtatcattgtcggcattccaacctttattctttgcggcccggtattgaataaattctgccagcgcattattccggacgcctttaaaaaagaggggaatatagcctctctcggcgcgacccgccgattcagcgaaagcgaaatgcctggctttgggatcagttttctcacggcaatgctgccggtgatcctgatggcggttgtcaccatcatccagatgactcatgccaaaagtgccgcggattcaggcttattctacaatgttctactgttcttaggtaattcgacgatcgccatgctgatttcactgctgttcgcgatctataccatgggcctggggcgcgggaaaacaatccctgacctgatggattcttgcggaaaagctatcgcgggtattgccggtctgctgctgattatcggtggtggtggtgcattcaagcaagttctcatcgactctggcgttggtcagtatatttccaccctggtttcgggtatggatattaacccgatcctgatggcctggggcgtggccgcattcctgcgtatttgtctgggttcagccaccgtcgcggcgatctctaccgccggtctggtcatcccattgttggcagtacatcccaataccaacctggccttgattacgctggctactggtgccggatcctgtatttgttctcacgttaacgatgccagtttctggatgattaaagacttttttggcctgaccaccaaagaaactctgttatcctggacgctgatgtccacactcttatccatcagtgggctgatttttattctgctcgccagcttagttttataa

SEQ ID NO: 205797 - DNA, 987 bp, Klebsiella oxytoca
gtggatagagatcaaacaaacagcagcctgttcaatgatgatcccgtacttcatgcaacatggctgtactatcaggaaggcaaaagccagactgaagttgcagctatcatgggggtgtcccgcgtcacggttgtcaaatacctgcaaacagcccgggaaaatggactggttcatatcaacctggatgtgaatgtctttggctctatcgacgcggctttgcaaattcgcgataaattcaatctccagagagtgatcatcgtgcctgatggcgaacatgccggaaaacgtgatgatacaaagctgatgcgtactcgtctttcacgtgccggtggcatgtatctgaatcaggtaattgagaatggtgatgtgctgggcgttgcctggggaagaacaattcatcagatgagcaaaaccatgacgccgaagtcatgtaaaaatgtcaccgttattcagatgctcggttccatgccctctcaaccagacctgacgattattgaatcctcatcgcaaatcgcctacaagctttcaggtcgtgtcgcctcgctgcacgtgcccgccgtggtatcaagtgccagactggccatggagttacaggcagagcctattattcgatcgaattttgacgttctgactcgctgtacgaaagctttttttgtcgtgggtaacgcgcttgatgaaaatcccctgattcgggtgggcgtgctgaataagaacgaaatgcagacgtatcgggatttaggcgcagtaggtgtcatttgtggccgcttctatgacaaggaagggatgcccgtcgtggctgatgttgaccagcgtattctgggaatcagtctggctcagttaaggcagattgaacggaagatcttccttgctggtggggaaagaggctatgacgcaacgttgggtgccctgctgggaggatatgtcacggacctgattgttgatgaaggaacggcagagtttttgctgacgtgtgaattaccacactaa

SEQ ID NO: 205798 - DNA, 1005 bp, Klebsiella oxytoca
atgtttatcgtggaatcgtatgctgtcgccataataatgtgttttattaccatgatttgctggggttcatgggcgaatacaaccaaacttgtcagcaataaaaaatgggagttccctctattctattgggattattcaattggattattgctgtgttctttgttatttgccttcacgctgggttctatgggcgaagccggtcgcagctttatacctgatattcagcaggcgagcagcagtagtctgatgtcggcaatactggcagggattattttcaatatttccaatatacttctggtcgcttctattaatcttgccggtatggcggtagcttttcctgtgggggtggggctggcgctggctctgggtgtaatcactacctatatcggcaacccgcagggcgatccgctcattctgttcctcggtgtcgcctgcgttgtgatcgccattatttttaccgcgatagcctatggtcgtgtcacgcaggaggcggataaatcccgtcgtaacaaaggtctcatcactgccattctggcgggtatcatcatgggatggtttttccgcttcctggcggactccatgtctgacaatttcagtcagcctgccagcggtctgatgactccgtactcagcacttgttttgtttgccgtagggctgtttttatcgaactttgtccttaacacgctggtcatgaaaaagcctatttcaggagaaccggtcaacgggaaaatgtatttttccgggagtttacgggatcatgtttgcggctggctgggcggtatgatttggtgtgtcggtctggcattcagtctgattgcgtctggtcaggcgggttatgccatttcctacggtctgggacagggtgccacaatgattgccgtgatctggggagtcttcatctggagagaatttgccagtgcgccagccggaaccaataaactgctgctgaccatgtttatttcatacattgtgggtattgttcttattatcgccgctaatcaataa

SEQ ID NO: 205799 - DNA, 642 bp, Klebsiella oxytoca
atggaacggattaagttagcagaaaaaatcatttccacttgtcgggaaatgaatgcgtcaggtcttaatcaaggaacatcaggtaatgtgagtgccaggtataccggtggcatgttgattacgccgagtgggatcgcttattcaaagatgacgccggacatgattgtctttgtagacgataagggaatacctgaagcgggtaaaataccatcaagtgaatggttatttcatctggcgtgttataaagccagaccagaattgaatgctgtcatacatacgcatgcggtgaattccacggcggtggcaatacataatcattcaattccggccattcattatatggtggcggtatcggggacggatcatattccctgtattccctattatacctttggcagtcctgaactggccgacggtgtatctaaagggatcagagaaagtaagtccttgctgatgcagcaccacggtatgctggccatggacgtcacgctggaaaagacgttgtggctggcgggtgaaaccgagacgctggctgatttatacatcaaatgtggcggattacatcacgatgttcccgtgctgtctgaagccgaaatgaccatcgtccttgaaaaattcaaaacgtatggtttgaaagcgtaa

SEQ ID NO: 205800 - DNA, 1116 bp, Klebsiella oxytoca
atgaatattaaaggtaaacaataccgtacggtctgggtttccggggatggaaaagcggtagaaatcatcgatcagactaagttgccttttaagttcgaggtggtggcgcttacctctgcggaaatggccgctacggctattcaggagatgtgggttcgtggcgctccgcttattggtgtcgttgcagcctatggtatcgcgctgggaatgaatcacgatgccagtgacatgggtctgcagcgttactatgaccttcttatcaaaacccgaccaacggcaattaacctcaaatgggctctcgacaggatgagtgccacactgaaggatctctgtgtatcagagcgcaaggatgtggcctgggcgctggcggcagaaattgctgaggaagatgtcgcgttgtgtgaacaaattggattacatggtgcagaagtcatccgcgaaatagcccagaaaaaaccggccgggagtgtggtcaatatcctgacacattgtaacgcaggctggctggcgactgtagactggggaaccgcgctttctcccatctacaaagcgcatgaaaacggaatccctgttcacgtctgggtggatgaaacgcggccacgtaatcagggcggactcacggcatttgaactgggctcacacggtattcctcacaccctgatcgccgacaacgcgggtggccacctgatgcaacacggtgacgttgatctctgcattgttgggaccgatcgaaccacggccagaggggatgtctgtaataaaattggtacctatcttaaggcgctggcggcccatgataaccatgttcccttctacgtcgcgttaccttctcccactattgactggactatcgaggacggaaaaagcattccgattgagcaacgtgacggaaaagagcagtcccatgtctatgggataaaccctcagggagaattgagctgggtcaataccgcccctgaaggaacccgttgtgggaactacgctttcgacgtcacgcctgcccgatacattaccggcctcattactgagcggggagtctgtgctgccagtaagtcagcgctggcagatatgtttgctgacctgaagagtaaagcactccagggggaacagcattaa

SEQ ID NO: 205801 - DNA, 1260 bp, Klebsiella oxytoca
atgacggattcaattccatcaggctacaagccgctgacatgtgacacgctgccgggttatctctcgtccagactgaccccttcatgcgaaccgggagggttacctgaagagtggaaagtttcagaagtgggggacggaaacctgaacatggtgtttatcgttgaggggacacataaaaccatcattgtaaagcaagctctgccctggcttcgcgcagggggcgaaggatggcctttatctctgagccgtgcgggctttgagtacaacgtcttatgtcaggaagccaagtacgcgggtcacacactgattccgcaggtctatttttatgacccggagatggctctgtttgccatggagtatctgacgcctcacgtaattctgcgtaaggaactgattaacggtaaaaaattccctaagctagctgaagatatcggcagatttttagcacagactctcttcaatacgtctgacattggcatgtcagcagaacagaaaaaagcgcttactgccgggttcgcgttgaatcatgagctgtgcaaaattacggaagatctgatcttcacagagccctattacaacgctgaacggaataactggacttctcctgagctggacgatgccgtccataaggcctgggctgatgtagagatgatccaggttgccatgcgttataagtacaaatttatgacagaagcgcaggcattgttacatggcgaccttcattcaggctcaatcatggtgaccgacacggataccaaagtgattgatcctgagttcggtttcatgggaccaatggcgtttgatatcggcaactatattggcaaccttctgctggcgttcttctcacgccctgggtgggaggcgaatgagcaacgtcgcgctgactatcaggaatggctgcttcagcagattgtccaaacctggtccgttttcacccgggagttccgccagctctgggacaacaaaacacagggtgacgcgtggccgacagaaatgtatcaacagaacagggccgctcttgaggacgcacaggatcagttttttgccacgctgcttgaagattccttggtgaatgccggcatggaaatgaatcgccggatcattggttttgctggcgttgccgagctgaaacagattgaaaatacagagcttcgcgcagaatgtgaacgacgtgcattgaccatggcacgcgatcttatcgtcaatgcccgccagtttaaaaatatggattccgtcatccagtctgcgaaggttaagtaa

SEQ ID NO: 205802 - DNA, 312 bp, Klebsiella oxytoca
atgaaaaatagaatcgatgtcagcgccattatccctgcttacaacgctgctgtgaccattggtagtctggttaataaaatcctcagtgaaccccacgttgctattgaattaatcattgtcgatgacggttctaccgatggtaccggcaacattatccgccaaatccacgatgaccgactcattctgattgagcaggccaacgagggggtctacggagcacgcaatgcagcactagacatccatcggggagagtgggttgttttcctcgatgctgacgatgatattgccgacgggtttattgaaaaacgatag

SEQ ID NO: 205803 - DNA, 372 bp, Klebsiella oxytoca
gtgtcgcaagccgacgtcatgatctttaatggctggcattctggcgctgacagccatcgaagagccgttcatacaaagcagccctatgaagcgacgttgtcaggtcatgagtggctcagactcagcgttatccatcgcgaatggccgcattacctgtggctgcaaatggtcagatcatcctatatcaaacaacattcactgcacttccagtccggcaagagccacaaagacattctgtggacggttcatcttgcggcgagcaatggtcgattctgtacattggatattaaggactatatctatatcaacaataaggcctctatcacgcatcggccggattactacgatgttcgtgctataagctatgtttaa

SEQ ID NO: 205804 - DNA, 267 bp, Klebsiella oxytoca
atgcgtaaagcccgttttactgagcatcagatcattgccgtaattaaatcggttgaagccggacgaactgttaaggatgtctgccgggaggccggtatatctgaagccacctactacaactggaagtccagatacggcggcatggaggcttctgatattaaaaagatcaaggatcttgaggacgagaatcggcgtctcaaacagatgtttgccgacctgagccttgagaaccgggcgctgaaagacgttatcgaaaaaaagctttaa

SEQ ID NO: 205805 - DNA, 654 bp, Klebsiella oxytoca
atggcatttgaattgaaagatttattaactccggcagcctcccttttagcagtctggcttactgccaggtttacccttaatcgtgaaattcgtaagaaagaactggagcttcgtgttgatcgacttgagaagctctctgctgattgtgatgaggtcttattacagcttatcaattatgccggtggtattagtgggcttgtccagtctcggctcttagaggtcactcaggctcaatcaaaggcccaaattcctattcaagcactttccgaatacaaggacctattagatgacagcaaatggtctccggatcgggagaaaggacgaagatgcgaacacggcttacgcttccatcattatcaggaatggcaaaaatgggatgctattgttccgaagctgcaaaacgatatttacgattttttcatgattacacgtgctggtgagatcgttaaagatttaaaggaccagggccgaacacaagaagagtgtgaggcattcgttcgacaactcagtaaatggcaaaaagatgccaacttcctgcgaaaacagctacttgacactatgtctaacgattttcatgagttaactaagtcgaaatcatcttcatggtttagatggtcttatgtacgttcgtggttcaagaagtctggatgttaa

SEQ ID NO: 205806 - DNA, 771 bp, Klebsiella oxytoca
atggataaagcagaagttctggagaaaaatggttgggttgcaaccaacatcgatgattttgcacaaagagtgaagggaattccacgggatagttaccctccattacgttgcctcgcttgtgaaaagccagtgcatgatagtggattggtaacccctaatcctgattatcgccccaggttctcgcattcagtacctccggagaatggagagctttgcccactaagtgcagagacacgccgtttcagcgggttagccggaaatgacagtactgcaacaacggagctagccagaacacggcgtgcgcagtttatggtcttcgatagtctatgtagggcctatattgtctgccgctcactacggggaggaaagggtaagcttgaccaaaagtcgtttattcgattggtcaggatagctgatagctttgggatctggcgttatagctatctccctgaatggggtatccctcttcttttaatgctgatggacaatcatccaacaccgaatggtaagtctgcatttttctattcacttaagaaagacagagcccgccgggggggtgagtggcaaaatcttaacgtacggctggaagcgcattgggttagcagtagtgaacttattgtaccaaatcctgagaagccagcttcgttcctgctggagatccccttcaagaaggatgttgttaatgacatcttggggaaagaggacctatcgtggtgtacaagggatgtgctgagaaacttgagtgcctttagcatcagcgaattacggtaa

SEQ ID NO: 205807 - DNA, 366 bp, Klebsiella oxytoca
atgcaactattcagacctattgaacacgcgattaccgatgatggagagtgggtcacaatccgtgaactacccgttgattacatgaggcgactgaagtgcgatagctgccatgccagcgtggtggttatcgagaataaatcgggtgaggaggaatttgttcacttacgccacaatctgcaggaaatcaccagaactcgcagctgccggtatgcgctcgccgggtacagggatggcgataagcagacccgtaacaacagtcactcagatagcccccataccaccattaggcccaagaatactacgaataaaaacaacgcagagaaaatggcactgtgtctggtgcggccaccagtactacggaactaa

SEQ ID NO: 205808 - DNA, 468 bp, Klebsiella oxytoca
gtgtcggataatctgtttaacggacggcgtttccgggcactgactgtagtcgataatttttgtcgggagtgtctggtgatccatgccggaaagtcgctgaaaggtgaggatgtggtcgatgtgatggaagggttgcgggtactgggtaagcgtcttccggtacgtatacagacagataacggcagcgagtttatctcaaaaagtttggataaatgggcatatgaacacggagtgaccatggacttctcgcgccccggaaagccgacagataacccgtttattgaatcatttaacgtgagtctgcgggatgagtgtctgaacattcactggttcctttcactggaagatgcgcaggacaaactcgacaactggtgcagggaatacaatcatgagagaacgcattcatcattaaatgacatgaccccggctgaatttatccgaagtatccggaaagacgaagatctctga

SEQ ID NO: 205809 - DNA, 831 bp, Klebsiella oxytoca
atgttccggtttacggaattgtccaatacagagcgtattctacgcctcatcaggaaccatgctgataccgacgccggttgtttcaccgaacagtctacatttctagcaaacgattttcagtctcaccaccacacaaaaaatgccagtatgggggtgttctttctttttgagcttcataccctcaacgatgaaaagctgtttgctctcattaaacatgataatgaggatgtggtgcgctacgtgctggatgcagagggaaacgagtttcaggtccccaggctcgaacgtttccgcgaaagtttcgtcaagaaagcggaggccatgcagaaaattgccctagtccacctgacggcagatgctcaaggtgggcaggtggtcgtacgagagcgcagcaaacgaaccaatatctccgtttattttgagcgttttctgcaggtacagcgagtcaacagtacagccgacctcagcgaaaaactggttgtcgcgctcaaggatgcctttaaacagcaccgcgacctgcagccggacaacatcaaacgcagcggtgttaacaagatttatgaaacgttacatcacggtgcgcaaaattttaacaccgatgagcccctttccctactaaaccagatttttaggccaatggaagaagatcatctgctggtcacatcctttacccgcaaaataaaggacctaggtatttcaggtgaatctttccagatagtcccagagaacatccctaagccacggaaaagaaaactggaaactctggaggatgttaacgtcggccatcgtgctcattttggccatgatattgctcacagcagcagtaggtga

SEQ ID NO: 205810 - DNA, 255 bp, Klebsiella oxytoca
atgggactgaagttacggctggagtggtttgatagaaaaacagagttattggttggtaaagagtattcaaaagacctaggggatgatggctctgttattgaaagcttgggtcttcctttgaaggataatatcaataatggagggtttgacgtcgagaaaaaatgggggccttcattgcaaccgtattttaaaaacaagatcgacgtggacgaatactggtatcagatttcatttgattaccgggatgaatggtaa

SEQ ID NO: 205811 - DNA, 927 bp, Klebsiella oxytoca
atgcgacggatgttcagaccacttacaactttacaacgcatgacgctaactctgagtgttttcttaataccttttccggcactatcttgcggcgggatcttcgacgcactctgtaacgtgcaaaatggcggtctcagccctggcaatataagcaaccaaactaacaaagtcctacaggatggttcaaacgcagtccagaaggcagggcaagatgttgggaacgcgcttaatgagttacaagcgaaccttttgtctggtccaattttggaacaagcgattcgatcatcgcgaaacaccgcaataaacggtgccatgcctatacctccagaaatccgaagcaggctcacagggtatgccagtgaggaatcaatgaaccaagtcaggtacaagattggagataacggattcctgaatctagctcgtcttctcgaacaaggcggagcagcctcagcggttactttgattgatgttgtggtttttcggggacaatctgatgcggaaaacgtggcactctgggctcatgaactgacgcatgtagatcaataccgaaactggggtgttcaaagctttgcggttcgttatgctagaaacgccaatagtgttgagaacgaagcgtatgcaaaagagagtggctatatctcatgggcacaacaatcgcactctcccaccatgcccatgccaacctcaataccgcctgcaccaatgcccgtacctattcctgcacctgcacccatgcctatgcctatgcctacgcccgtgtatgcacccgtcttgccgagtggtactgtcatgcagacgtgtggctgttatgggatgaccaatggcttcaacccggaaccaagatgctcgcgcggtggcgtaatagttgctgcttgtcaagggttttgcccaggcggtggtgtgccatatgcctgggtatgtcaatag

SEQ ID NO: 205812 - DNA, 486 bp, Klebsiella oxytoca
atggaattagtgatattacagctgccgtttttgacgcgatttaggccaagatggagtcgctgggttttgcgactcaggatgttcaggagctcaaacggtgctggacagtgtgccggcaccgaaagagcctggccgagtgctgaccaaggtgtatgcctgggtttgctggggtatttgtgctgttccgatactctggctctggtcattattctgttgtctaaagttaccaggttatcaaagacctacgagaattttccccgatgccgcttcagcggcatggaggcgcctgcagctgttgaatggagtactgtgggcaaatggcgccgtcgcccggcgcagccggctgctgttttgacaggttctgcctcaccgacccccttccctgtaaagccatacccgcttaaaacatctcagacgcctctgtacgcggtcggagtggtcccgacaaggcgatatagccgcagtcggggcgtatctccgcgttag

SEQ ID NO: 205813 - DNA, 555 bp, Klebsiella oxytoca
gtgaaaataaaccgtactttccgcagatggtgtctgcccgggctggtctccctggccctttttacacacgaaccggcaatctatgcagccagcattgagacaggattttcccaggaggggagcgctctgcagcttgtccttaaaactattgattctgcccagacgaccattcgtctgatggggtacagctttacgtcaccagaagtttctcactccctgattcaggctaagcggcggggggttgatgtgaaggtggtcgtcgactggaaagcgaataatgtgaaagggagcgccggtgctgcagcgatgaatctgttggtcaatgccggcattcccgtgcgtacggtcaggcagttcaaaatcatgcatgacaaggtcatcataactgatagccggaacgtggaaacaggatcatttaatttttcccgggctgcagctcgcagcaattcggaaaatgcgctgctcatccgtgattacccggcattagcagcgacgtatcttcagcactggcagtctcgatgggatatggggcttgactggaaaaaacaatactaa

SEQ ID NO: 205814 - DNA, 591 bp, Klebsiella oxytoca
atggcagaagaaaaacgcccggtgctgagcctgaaacggaaacctgcagcggaaagtgcaggaactgatgtcacaaacacaccgggtgtcgttcgccgcaaaaaagtggtggttgtctcgactccacctgcatggaaggtgaagaaagagaagcttgagcaggcgaaaaaggctgctcaagccaccacaagcaaagatacgcccgaaccggtcaaagcaacaaaggtttcatcgcctgtgcgttatcttcgtctgctgccaccggagcaggccatcatgaccctgaaggcgttctggccgcagctgtttgacggtaactcgccacgtctgctggccacggggatgcgtgaacagctgtttgctgatatcgcgaggcgtgacctgccgctgtcccataaacaggtgattaagtgcctgaaaagcctgacccggtcggcgggttatctgtcccggatgagggcgggcgcctcccggtatgatctgcagggaaatatcgtggctactgtcactgctgatgaagcgcgctacgccagtgagcgcatgatgaaggagttgctgcgggccgaacgaaagatgagccagtcggtttaa

SEQ ID NO: 205815 - DNA, 591 bp, Klebsiella oxytoca
atgaagaaaatggtattgctgcttatagtacaggccatctcatgtctcatcgacgggtgggatctcccttcaaccctctttgttacgttaacattggcaatatggtttttgattttttattacgtttctttccaaatcagaaaaagtaaatcaataggtgaagctaatggaaaatttcgcctgcatttattgggtgtttgtataagtgcgttttttagcccgattgtttgtttgttcttttgcctgatatacccattgtttgcaatgaataaatattatcgatttatggctttccacgaaaaaagagtgtttaaaaaaactggatgtgattcgggaatggatgcgctcaaccaggtatcaacaactccttactcaggttcttttgaacagagaggtaattgctttgaatcgcatcactctctcgatacatcttcttcggcaaatactgaagttgatatatataaagattttggggggcaagtggatacatcatctacaacgtttacagacgttaatccaccgagtgggcttccaatgataggtaatgttgatgttgctggtaatccatatggcattgataggcatgattga

SEQ ID NO: 205816 - DNA, 2823 bp, Klebsiella oxytoca
atgctggaaatctacaccatcgccggaggcgactggctgcgaggcaacctgaacgccatcgctgctttcatggggaccggtacctggtcgaccatcgagaaaatgtgcattgccttctcggtgctgatagttgccgtcagctgggtgaaaaaacataacataatggaccttgtcggttgggtgttctctctgaccctggtctcgatgctggtcgtgatccgcacgcctgtgcagataattgactacagcaacgtgtcccaggtctacaaaatcgataatgtcccgattggcctggccatcccggcgtcgctgaccacgcgtgtcggcaatgccctggtgcagagctatgagatgattttctccctgcctgacagtgtgacctacagtaaaaccgggatgctgtttggcgggaacctggtggcgaaaagcacggattttgtctcgcagaaccccgaaatcaccacgctgttctccgactatgtccagaactgcgtaatgggcgatatttttctcaatggcaaatacacccttgaagagctgatgaactcgtccgacccgtacacattggtgttttctaatcccagcccgctgagaggggtattcgataaaaacaacaagttccagacctgtctggaggcttcacgtgatttgaagtcagcgttagcactcgactctcagaccggcgggaaaacctggagctattatgtgcgccagctgtttggcggcaaaccgaatccggacctgctgttcagccagatgataggcgacagttacagctacttctacagttcaggccagagtgccgggcagattatccgccagaacgtcaccatgaatgcgctgcgtaacggcatccagagttacgcgtcccgcagcggcgatacggccagcctggtgaacatcgccaacaccatgtcgctggagaaacagcgtctggcccaggccacgatgggacatcaggcactacgttctcttcccatgatgcagactgtcatcgtgggtatcatgattggattattcccgattatgattatggcggcgatgttcaacatgatgacgctgcaggtcctgaaacattatgcgtttggcctcatatggctgcagtcctggccgttactgtatgccatcctgaacagcgcgatggcatactacgcaaaacagaacggtgtcccggtcgtcctgtcagagctctcacaggtgcagctgaagaactcagatattgcgaccacggccgggtatatctcgatgatgatcccgccgctcagctgggcgatgataaaaagtatgggggccgggttctccagcgcctacagccactttgcctcctcgggactcagctcgacgtcccaggcctcatccagtgtcgtggacggcaattactcgtttgccaatatgcagatggagaacgtcagcggctacagctggggcactaacagcacgaccagcttcgggcagatgtcgcggcagctggggaacggggcaatgagcacgcagaccagggatggctcaatggtctgggacagtggtggtgcaatgtcaaaactgccggtggatatcaacgtcggtcggcagatagccagtgcgcagcagcagatggccagagagtcggatgtgcaggccgaaagtgcgttgcatggctataacaacagtgtgacaagtgcctggaacagtctgaagcagtttagtaccaacatggggaccagttcctcgatgacaacgggtgctgacaacactgaatcctctcaggacacgatggccagaagcaaaatgatgaatgctgttgactcttacgcaaaagccaatcaaataagccgcgatgaagcgttcagtcagttaatggataaatcggtaaaaggtgcggtttctggcgaaatttatggaagtgcaagagctggtgctggttttgaagtattcggtacaggtggtcatgttgaggggggtgggaaattatcggttagcggcattgtcagttctggctctcaggacaatacaagtgaatctggtcgccattcaaatacgaataaccacgatcgcagcagccaggcggttaaagatttcagagaagcgtctgattacttaaccagtcataagacaaccacctccggaaatgttactgataataatgcatcttcccgagttgaccagtttgcagcgtcactttccagcgcgaagaacagctatgaccagtatacgacaagcaaaacccgcagccatgaatacagcgatatggcatcacgcactgaaagcatgagcggacagatgagcgaaaatctgacgcagcaatttgcaaactttgttcagaaacaggcgcctcagaatgcggaagccattctgacagatacccgatctccggaaattgccgcgcaacgagaggctcttgccagagactttgtaaaatctcaggttgagccgaaaattgacggggcttatcaggaggccagaggttctcttggaaatggtatgagcggtgtttccactggtggtgggcatgaaggtgttgtttctgactacgatcagaatgtcactaacattgacaatatgactgcacaggccggtataaaacatgacgtaagcagtggcgtagatgcgctagtgtctgaaaaccatcaaattaatcaggatgctcggcaaaaaataactaaacaggaacaagaggtacaaaaacaacatacagacctgcaaaacaaccacaatttagagggaaataaaattgacaatgaatacaatagtagaacatatgaacaaaaagctcttcctggtgcagatacaagagatgagctcttaaggaaagctcaggattatgagaagaatcataaaaaataa

SEQ ID NO: 205817 - DNA, 444 bp, Klebsiella oxytoca
atgaacatgaaagtgcgtttatcggcactgtatgactttttatttcccgactgcttaagaaaaacgggtctgacaacaaaagagaagactgagcaactgaaatctgaatttatccgccggggcagacgtctggatatttatctggaattgttcattgtgtttctggtcgcaggggcgctgatgttctgggtaatgacagccatgtttagtttatgtgtggaggactggaaagccagcggtgacctgcgtgtaaaagacctgtggaatatcctcatgtacgctatcccttatgcactggttgctattggcctggggttcctggttgcagcattgtcattgtcgctcctcaattttgtcagttattacctgaacattatttttattcagagaaaagaccgcattaaaacttcgggcgtaaatcacggagggccggatgcgaattaa

SEQ ID NO: 205818 - DNA, 441 bp, Klebsiella oxytoca
atgatttattttcgggcaggatgtattgctctattttttatcacgattccggcgctggcctcagaaataaggggggttccggaaggaaatcgaattttctggtttgttgtttttcctgtaacgtgcctgatgttccctgttctttttggttggttatttgcccgtaatgaccacacgaaagaatacgttatcattgcaatgtcggttctgataacacaacttgtttttattgcatgcttttattcatttgactattttaaaattattgtggtatccgggttggttcagtcgatagtgccttcaacgatatatgccgggatatcttttcaggatgaaataaatatctcccgagcttcaaggtacaaggtttgtatcggaggcacgtccatcgttgcgactgcgattacgtggttttttttaaaattactgtttgattgttga

SEQ ID NO: 205819 - DNA, 327 bp, Klebsiella oxytoca
atggaagagaaaaaagcgtacgggctggttatgacgtttgtcgcggtgtttgtcgtttttctggtcagcgtcatgtcttacagcctgtggcgagataaacagattaatgcatttctggccaccaaccgggcctggggcattcagtgtgaccgaatttctcaggccgcctgggtggttaaagagggtgagcgggtggccctggaaatggacgaacttcctttgtactgcagtggttaccgctttgaagcccgaaatgacgcaggaaaaaagatacgtcttctcagtaaatacagtgtttatcagcacctgtcacgccagccgctctaa

SEQ ID NO: 205820 - DNA, 249 bp, Klebsiella oxytoca
atgaatcagcatatcgcgattgaaagctttgcggacctcctggcagaggagggcttaccccgggagtaccatgttctggtgctggcgattctggcggaaatttctcctgatgcgacgatgtttcgggtcaattcatccgaactggttcagctggctgcactgtactccccgactttccgggcgctgccttcggataaacaggcttttgtttcctcagtactgaccatgccactgttcttcacggtgtga

SEQ ID NO: 205821 - DNA, 261 bp, Klebsiella oxytoca
atgaaagttaattttcacaaacatcctgccgtcgatttttctctgagactggcgctgacgataattattatttctccggtgctgtacttttcatgggatgctgtcaaagggacatcgggcagtgattatattgagagtgtggtttttatccttattgtcggttttttatggttggtgagttacctgtttttctctgctctggagggactgatgaaaaataatcgtaaggagaaaaaagatgaatcagcatatcgcgattga

SEQ ID NO: 205822 - DNA, 417 bp, Klebsiella oxytoca
atgaagaagatattgttggtggcagcaggtcttgcgtgcgtggtatttaccgttgctgtgggtagctggctgacagatcacgctataaaaggactggagtatgtctgggggctacgttcgtgggcggtgagcatgacaacctgcggaatggtctggtgtctggtggtgatcagtgaatttatccggcttacgctgaacggtaccgggttgatgcggaagaacacatatgacatctggataggactgtattttggaatagtagtaattctgttatgggcgttatgtgcagcgttgttctggatgttattccacctgcagggaggtgagggcgatattcaggtgccactaatggtggtgagcttattcgtatcaatgctctatccgctaattttgtcccgactgatacgagatagctga

SEQ ID NO: 205823 - DNA, 588 bp, Klebsiella oxytoca
atgtatgattgtgatcctgtaaacgaattcgcttatgttcgtgagaggttaaatggcattttacttcgcctctcggaagaaccatttatccgactgagtaaaacaagagttatgcaacgccacctctcggacatacagtggatgttgaaccacaaccattaccctacaccgggacaggtggatttttttatcagcctgttgcgggatgaaaaattcagtgtggttagagaggaaggacgacacacaaaaagtacagcagagattcagctgatgatcgatgctctaaaggatatccgggattgtttaaagctgattacccggtatgaacgggaaggagatattattacacttcattccggttctgaatggaaaaatactgcgttgtgtctctgtcttactgttatgtttattctgtgcgttgctcagttttttattttttcagggcgttcaccgttgggagcgtatttttgtggggttgtattgttcttcacggtatcactgatgcttgaaaataaagaacaggtattttctttcattggcctgattgtttttacactatgcagcttgttctcgtgggcatggtattag

SEQ ID NO: 205824 - DNA, 675 bp, Klebsiella oxytoca
atgactgggttgcttatctttttagttttgttaactgcagcccttcgctttcgcttcaaagataatcattctcttttcataaaattgagaagaccatttcctgccgaacttactttattaatactgtcttcagcgttgtgctttacagcacaggaaactttctgtttattcagagagaatgtttatcttttttattctatgacattcatgtcagttgtagccgtctggtttgtttcttatcttttctcgtcatcaatattaaaaaccccgattaccgatatggtgctgaccccctgcctgtcgaacctccggatagatattaaccgtggatatacagaggccatgtctcaaccaggatcttatgaagacatcgccgagaaaaccgcagcagatatcagctaccttttgagtaacattccctgtaagaccatcacattcgaatcgcacctattaagacagggactacgcaaagtcttatgtaacaacatgagtgaaagaggaatatcattcaccgttaaagaaagaataactcatcttcctgaagcgatggttctcaatctgagatacggtggtaaaacacgctatcgtctttttacctactgcaagcaccccaacggattcaaagtgcatcgcaaaggtggcgcatttaaaatttataaccataaaaccctttga

SEQ ID NO: 205825 - DNA, 174 bp, Klebsiella oxytoca
atgaaagagcaacagaaacaatgtgacacccaaccggctcagtttcaggagacttcttcacgtacatcccgggccgctttcagtggggaaaagacactcacggcggagcaatacagagagtgggaacagattgccgcccgtctcagaaaggatatgagtcgacacgctgaataa

SEQ ID NO: 205826 - DNA, 297 bp, Klebsiella oxytoca
atgaaattaaaaggagtacacggagttaaaattgtcattaactgggttgtcccggtatttttgttgggaggtctgctgtatcttgtttacgatgattacagagataacagcacagcgaatgaagaacagttgttaacaatttctcatgaaataccctgtgccggagaagcttttcaaacggcaattcgtaaagaatctaaagcattgactctccgcgctgcaaataaaattgcttcggagtgtggtgaacgggagaaacaattgcaggtattaaataaaaccctcacggacaagtaa

SEQ ID NO: 205827 - DNA, 225 bp, Klebsiella oxytoca
atgcatacctttatttttctggtgctgatgacgcagagtagtggcggcgggatctgggatgttacatccatgcccaatacggatgtatgcctcaaaatgctgcgtacagtcgaggccagggggggagctggtccgaccggggctaaccggggtgagtgtattgaagttaaaacccgcgagcctttgaacagtgcgatagaaacaatgaacgaaggaagacaatga

SEQ ID NO: 205828 - DNA, 294 bp, Klebsiella oxytoca
atgagtgaattattcaaatggagtctcgcgctggtcattttagtggctgtatatattgtaattttttcttcagaaagtcataccgtatctgacgcacagtctcaatactggataaataactgccggttgctggaatcaaatattgacagaggttttctctctcctgcacaaaaccgccttcagtgtggtgatgttatcgaaaatgtcagcaaggttgactatgacagtgcgataaatggcgataagcgaataacaaccatcgcagagttaatcgaagaactattcggtagttaa

SEQ ID NO: 205829 - DNA, 588 bp, Klebsiella oxytoca
atggttaagtctctcatcactctcgttctgtcagcgctgcgctggagacagtggctgtttcagtatgcggtggtatatccgctggcgttcatggcgatgctggttgttctggtgttctggaaggggccgtatacgcccggccagacgctggtgaataccattgagtctgtgcagcgggagggttatgtcattcaggactgcgcggggccagcttcgcgcggagaactcaatggtgatgcggtgaagccattactgcctcctgaagattgcaccactgtcagtacggatgcggcagggtatgcagcgcatatcgaccagggctacaccaaaaacatcctctgtctctggctgctgatggcggttgtgtttacgggggccgcggtggttttccgtcgtaccccggccagcagaacgggtatcacgtggttgagggatgccagggggaatgtcttccccggctgcagacctggcaaaggcgcgatatccccgctactggccggatatcagaaaaacgataagaccatcgtggtttatgacccttccgccagatttagcgaggaagataaaaatgaaaacaaagagaaataa

SEQ ID NO: 205830 - DNA, 387 bp, Klebsiella oxytoca
atggccagggtccaagcgtatgccagcgatgaagtggctgagaaaatccaaatgattgttgaaaaacgtaaagccgaaggggcgaaagaaaaggatgttagcttttcaagtgttgcgtcaatgcttctagaactggggttgagagtttatgaggctcagatgcaacgtaaggaatccggcttcaaccagactgagttcaataaggtattacttgaaaatgtgttaaaaactcagtttgcaatatcaaaagtcctggcgatggaatcgctcagtccccacataaaaggcgacgaacgttttgatttcaaatcgatggttatgaacataaaggatgatgctaaagaagttgtggaaagatttttcccagagctagatgaaaaagaatga

SEQ ID NO: 205831 - DNA, 231 bp, Klebsiella oxytoca
atgaatttaactattgtttcaccttccactggcgctgtaaagacccgccgtcatcaacgcattctgcgtcatgacatcgccgcacaggagattaacccggcgctgaaggccttcgggcggcatattgcccggagcgttcgcaaggggcgcggcgtccatattcccgcgatgaacaacaccgccttcgggcaggtgctccgcacgctcgaacttaaacgcgcatttaactga

SEQ ID NO: 205832 - DNA, 432 bp, Klebsiella oxytoca
atgcgcaatgttattaccactgatgttctgaaaaccatgatccccgacgaactggaagattatcgcgccgcaggagaagactatcgccgcgaactgacccatgccgtgatgcgtgatctgcagtcacctgccggatggtctgcgaatggtgaatatcgcagcgaatttggcggcttctttccggtacaaatccgtttcacaccttcacacgagcgctttgacatagcggtatccagtccgggagaactgagctcaagctggatgatggtatttatcacccgtggcggtcagccgttctctgttgtgcgcacgatgatgacgtttaacccggagctgattaaccatacattgagcctcatcgcgtgcctcgatgctgacagctactcttttgcgagcatcatcagcacgctggcacaggagggcgcattatga

SEQ ID NO: 205833 - DNA, 2010 bp, Klebsiella oxytoca
atgtcagttgccgagtctaaagcaaaaactacccggaaatccagcactaagaaaccgaccaaagcggagcgtgaggtgctgaaatccgcactggacgccgcgccgattgaatatgtaccgctgtcctgtttagtcgtatcgcctctgaatgtgcgcgtcattccttacccggaggccagcgtacgcagcatggcgacatccattcaggccgtcggactgctgcaaaatctggttgttcactcgatgggtgagggcaaatccggcgtggcggcggggggacgtcgccttgctggcctcagtctgcttgccagcgaaaagggaatcgacgcggagtacagcgtaccggttaagcgcgtgagtgacgatgtggcgcgactggtttcctttatcgagaatgacgaacatctgtcgatgcatcccgcagaacaaatctatgccttccgcgacctttctgagcaggggatgactcccgggcaaatcggtgcccagcttgggtacggtgggcgccacgtccagcgtatgctcaaacttgcagcgctggctcccgaactgttatcccggctggcaaagaatgaaatcacaattgaacagtgtcaggccctggctctcgaggatgatccgacccgtcagctgcaggtctatgaaaacgtcaaagccgcttatggccataccgctccgcatctgctgaaaatcgcagtcactgaccgggaaatttctgtcacaagcgcagattttttgtttatcgggcgtgacgtttatgaagctgctggcggtgtagtgcgtgaagatctgttcagtgcagaggaagggaagggaacagcagataaggcgctgattgaaaagttaactcacgagaagctcacgacgctggcagatgagattcggcaaagtgaaggctgggcatggtcacaggtcagaagcatgtccgttcgttcctggggagttgattcacagattttccagctgactccggcaccggaggcgaactacaccgcagatgaacagcagtgcctcgatgaactctatgcctcactggagaccactgagacacatgacgatgagtatgccattcaggctcagattgatgagcttgaagatgctgctgtaaatcgcgagtggacggcagcgcagaaggctgaaagcggcgtggtcgtcagcttctggggcggagaaattaacattcagcgaggtgttcgccagattgccacggagcagaatgagggggccacggcagacggggaacgtaacgctgtcatcaccacaaaaaccgagaaacccatcgacagcatcagcgaaccactggtgaaaaagatgtcttcagagcgcaccctcgccgttcaggcagcgctgatgctgcagccacaaaaagccgtagcgttgatggtgtggcggctgtgctcttgcgtatttgaccactgtttgacaaccaaccaccccttcgatctgaaaatgacggagcatcattcctcactcgtcagcgacgcccctgaaggtaaaacgggaaaagcctggcagacgctgatgcaggagaaaagccgacttgaggcactgttacccgtgggctggcggaaggacgtcaccacgtttttcaccctcgatggtgaaacccagatgtcgctgatggcgttctgcactgccagttctgtgtatggggttcagacccggacgatgggacatacgacccgtagcccgctggatgaagtcgaaaaagcgatcggcttcgatatgagggagtggtggacacccacggcggcaaacttcctcggattactcaccaaaagccagatcgttgaagcgctgaatgatgccggactgaccggagcagcggcagatgccggaaaaatgaaaaaagttgatgcagctgaacatgcagagagtgtcatggcgcaaacccgctgggtcccggtatggatgagggctccgggagaggcggcagagactgcggttactgaaacccattcagcaacggattccgacatcgataacaacactccggctcaggccgcctga

SEQ ID NO: 205834 - DNA, 570 bp, Klebsiella oxytoca
atgcacagtgaactcagggaacgtattcaggcgatgcggggcagactggatggtcgcgcgccggttgcagaaatccgggccagttctcagctattcgtttcacccgacctggtctgtcgtcagctggttgacctggcggatctgacggattctgatcacattctggagccggaggcgggaacgggggccattttacgggctatcctggaggcggccccgctggcgcggtgtgacgccgtggagcttaatgcggagttagtccggtacctgcgggcatcttttcctggcgtcagtatctggtgcggggactttctgaactactcgccggaaaaacggtacagcaaaatcctgatgaatccgccgtttcagcatgcgcaggatatcaggcacatacagaacgcgataacgcatcttaagcctggcggtgtcgtggcggcggtctgtctgaacgggccgcgccagcaaaagatactgaagccgcttgctgaggtctgggagacgttgcctcgcggcaccttcacgtacaccgatgtttcaacggctctggtcagaatacgtcagactgcttaa

SEQ ID NO: 205835 - DNA, 1368 bp, Klebsiella oxytoca
atgaatcaggctatcgaacaggcattcccgcatactgaagctgaagagaaaacttgccaggtgtaccgggcgacatactccccggatgataacaagctgcggctgtatgcatcgctgcgcctcgatgaggaaacgtataaaaagatccgtgatgtgggattccgctgggcgccgaaacaggagttatttgtggcaccagcctggactccgggccgcgaggatgtacttatttcacttgcaggagacattgaggacgaggacagcaccctttttgaccgccaggaacaacgcgcggaacgttttaacgattacagcgataaacgggccggagaatctgatcaggtgctcacgcatgtcgatgcgctggcatcagcgattccctttggccagccgatccttgttggtcaccacagcgagcgccgcgcgcgtaatcatgcgaaaaaaatcgagaatggtatgaaacgcgcagtgatgctgttcgaacgcgcggaatactgggagcaacgcgcaaaggcatccctgcatcacgcgaaatataaagaacgcccggatgtacgttaccgccgcatcaaaaagattgaggccgaattgcgtaaggctgaaaagaacattgcccggtcggaaaaattcctgacgatgtggcgtgctgaaacacttgatttaaaaatggcgcggcttgtcagtaattacgatcatgtatccgcctgttttaccctcgagaaattcccccgcgcagcagataagaaccagtatgagggccgtatgtccctgcactcagcccttgcagaggatatcatcacctttgaacaggcccgggatattgctgttccctgccatgaacgctctatccgtcatcagcagcgctgggcaaatcattaccgcaaccggctgagctatgagcgggccatgctcgatgagtcgggcggcgtggttacccgtacacaagagtttgagcagggcgggcaggttcagagccggggggaatggttaactatcctgcgtattaacaaatgcaatggtcaggttagctcggtggaaacgccctgttatcgttttctggggtatggcggcactatgaagctgacgcccgaccgcattaccgcttacaaagcgccatcagctgatgaggccagcgccgcgaaaaaggccgcgaagcgtcccccgatagtcaattatccgcaagaagggttcagggagatgacaaaagcggaatggtcaaaaatgccaccagattataaggacatccggggagttgctgaaaatgatgagcatggcgcgtaccgttttcgtcgctgcatgactaacgcttatacgctggatacggtgtatatcaccgacatgaaaaccgtcgaaattccgaggaaataa

SEQ ID NO: 205836 - DNA, 231 bp, Klebsiella oxytoca
atggtcactactattgtttcaccttccgcagagactgtaaagccccgtcagcatcaacgcatacagcgggatgacattgcagcgtcagagattgaaacccctctgaaagcattcggacgacatattgcccgacgtgttcgtaaagggcgcggtgttcatatccccgcgatgaaaaacgcagctttcgggcaggttctacgcactcttgaactgaaacgcgcatttaactga

SEQ ID NO: 205837 - DNA, 288 bp, Klebsiella oxytoca
atgactgaagcggaagatttatcagataacgacagtccagccgtttgttttattcatcagaatcagggtggttttttgtctgtcccggccgaaaccggcatccatatccacaatcacatcacatgtgaagacggtatctgttttatcagacctgcagtgctgtttttccagggaatagagttcgggctaatgaacagacaacattccggaagaaatatattcaggcgcctttccggaggcattctcttttgccgctgcatccctgagtttcctgttttgctgttgtag

SEQ ID NO: 205838 - DNA, 225 bp, Klebsiella oxytoca
atgcggaaaaatatcattcctgttttgagactgaccatcccgtttctgttgtccggatgcctgcagttgtcttccggacatgagccgtctgagcctgagataaaagccgcaatggcctcagcgctacaacagcaaaacaggaaactcagggatgcagcggcaaaagagaatgcctccggaaaggcgcctgaatatatttcttccggaatgttgtctgttcattag

SEQ ID NO: 205839 - DNA, 420 bp, Klebsiella oxytoca
atgtacggaacctgtgaaaccctctgccggttgttgcgtgagcagtatcccgcaaaaactccactaaacctgattatctggtccacggcggatatcgaagcgctggctcaggggatggagtatgtcgtttctgagcaggagacaagggcgatccttaaacgcatcgatgaaatcccggaggagcaacggcttgagtcgggcgtgtctgtcagtgcggtgatgacgctgatagatcaggtgaaagagatcagacaggaggtggcggtgccggttgaattgcttgaaaccctgctgactaccgtcgaacaggcattgtggcgcagggaatgggccgcccgggatgataaccaccctgtgccggaaagcgtgatgcgcaggctttcagatgcagcgaaactacgcgcattactgaaaggctga

SEQ ID NO: 205840 - DNA, 849 bp, Klebsiella oxytoca
atgggttctggctgtcattcatttgtagcatcgacatcaggcatgagtgctcattcacttcaggaacaggtgacaatcgaccggaatgcgcttgaggcaaagacagccattgataagctcagcaatattaagtacacacctatccaggctgatagtgtcatggctcaaatcaatgaaaataatcaagtttattctttcaactcagaaaagagttatgttgcggcctattctgtcgaagggaaacagttgggtcggtcagtaaaattaagttcgccattagatttcagcgtgttcatcccttccgtgatgattttagatgaaaactttaacgttcttaatttaataaaaagtaactacttcccatacagtgaggattcattcggggccaacctttacaaaggtacattttcattaccggatggttattcaaaactgtatttgttaattttcacaaccgcgaaagacgcttctggaagtacagttattgataatgaactgttacaaaatagtatgcgctacgatagagtatctgatgttggtaagttttctaaactagccgtaccccattccaccacgggacgtgtaaagcttgaacttataaaaaatgctgacaaccgctatgctacagaagaagccaaagtaaggaccccagtatgtttgcaaaataggctcaagccggctgcaggtataagcgcacaggagtattatgaaaaaataagaaaatccttatatttaagagactatgagcaagccattcagtatgttcgtgaagctgagtgttccggatttacaaaagccagggatgttttcttttctgtgattgaagataatgaaaggaaaaatttatag

SEQ ID NO: 205841 - DNA, 2670 bp, Klebsiella oxytoca
atgaagcttaacgcattagctaattctgtaagacttgccgttatctacacgcctgtcattatcaccggacttattacctccgctcaggcagacgatccctgtaactcaactgactcaatgacttatgtctgctccggaagtggaacaagtggtattaaccttgccgggtcatcgctgaatgtctcgacagcccccggatttggtgtagatacaacggaggcgaacgctatcaagcttaccaacagtgagggggagctgatattaaaggatgagaatcagtcgcagattgtcggtggcgataacggtatcaccgccattaatgataatagcgccacgaacataatggttaccaccagtggtcatgtcaacggtgggtccaacgcggtttctgtccaaaatagtggctctggggagaccgtcatcacgacaacaggcactatcaacagcggaaaagtggggattaatgtcgttaatgacagtcataccaagggattaacgattaccaccgataacgagttcggcgtcgggaaggacgcgattaatgtcacgaacaatggcaccggggcgaccgtcatcacgacaagaggcactatcaacagcggaaacgtggggatttatgccgttaatggcagtcacaccccaggattaacgattgccactgattccacgtttggcgtcggggtggacgcgattaatgccacgaacaatggcaccgggggaaccatcgttaccacatcaggcaacatcagcagcggcaggcatggaatttatgccagtaacgatactaccgctacggacataacgattaacagcagcagtaatatcggtgtcgggggagatgggattaataccacgaataatggcaccgggatgaccgaaatcaccatatcaggcactgtctccgggggacatgggatttatgccgtgaatggtgttaacgccacggatatgaccattgatgtcagcggtgatatctcaagctgggctaccggaatttatgctgagaacaatggcggcgggaagacatccatcatcaacaccggcgaaattggagctccttcctatggcaacgccattacgactaaggggagaagcaacaccatcaccaattccggtcgcattatcggtaaggttcagattggaaacgaaggtaataccttcactaatgccatggcaggtacatgggacatgtcaggcgacacgagcgactttggtacaggttctaactcccttgttaattcaggtattctgattacagccagcggctctttcagcgacggcgtgcagaccaccaccctcagcaatgtcggcactcttactaactccggtagcctgaccatggcgaacgaacgcgctggcgataccactattattgacggcaactacattggccaagggggaacactgacctttgatactgtgctgggtgatgacaacgcggtaacggataaactgatcattaacggtaatacctccggtacatcttcggtgcttgttaacaatattggcggcagcggtgcgcaaactctgaatggtatcgagattatttcggtcaacggccaatccgacggcgtctttacccaggatggtcgtattgcagcaggggcctacgactactcactggtgcgcggcaagggcattaactccagcaactggtatctgaatagttggcaagatcagggtgataccgcccaagttctgcgtccggaatctggtgtttatgctaccaatttagcggtatccaacaacttgttcaccacgcgtcttcacgaccttataggggaaactcattacactgacgccctgactggcgagaagaaagcgaccagcatgtggatgcgtaatgaaggaggccataaccgttcacgggacagcagtggtcaactgaaaacgcaagctaaccgctacgtcctgcagatcgggggcgatattgcccagtggagctcgaacggtgatgacctataccgcctcggtatgatggcaggttacgcgaacagcaaaagtaaaaccgtatcgagcatcaatggctaccgtgcggatggctcggtcaatggatacagcactggagtatacagtacatggaatgccaacaatgtggacaagaccggggcgtatgtcggtacctcggtacagtacaactggtttaaaaaccgagtgagtggtgaagggataaacagtgaggcctatgattcgcaggggttcaccgcgtcagcggaaagcggttatatcttccgtgtaggccagactgctgacggactacagtcatacttcattcaacctaaagccatgttgacctggatgggcgtgaaggcagataaacacatagagctaaacggtacagaagttgtcggtgaaggggatggtaatgtccagaccagcctgggtgcgaaaacgtacattagcaataatcgcaaaatcgatgatagcaaggagagtcacttccaaccgttcgtggaagtgaactggatacataacacccgtaactttgccagtcgtatggatggtgtagtggtgaaacaggatggtacgaaaaacattgctgagttgaaagtgggagcagaagctcagctcaataagcagtttggtctttggggtaatttcgctcagcaggttggcgacaagggctatagcgatacatctgcgacactaggtggaaagtacagtttttga

SEQ ID NO: 205842 - DNA, 1584 bp, Klebsiella oxytoca
atgttgaacgctgaaggtttaattatcagctggaatgaaggtgcccgtcgggcgaaaggctatctcagcgaggagattgtcggccggtattttggtatcttttatagcgagactgagcagcacacatcagccccgaaaaaaaatctggaaatggcactgcgtaccggtcagtttgagggagaaggctggcgataccgcaaagatggctcccgtttctgggcacatgtgcttattgatgcgatccgtgatgaacaaggtaatctgcaaggttacgctaaaatcactcgtgatatcagtgaacaaaaagagattactgaccgaatggcgtggatggcgcgctatgatgtcctaaccggtttacccaaccggggagagttctttgcttatgttgaaaggcagattgtcagcaacgatgcccggagctttgccgttttcactcttgatctagataaatttaaggaaataaatgatcaggaaggtcatcttattggtgataagctgttacagcacatttcaagcgatgtgcttaaaacctttcagaaagaagagatggtcgcccgattcggtggcgatgaatttgtagcggttaagcctttttatcatgaaagtgaagcagtggcattcagcaaacgactctggcactgctttagtggtaaaaaggttttcgccgacacggaaattaccgtttcggccagtgttggagtttctctttaccccagggatggtgcggatatttacaccgtgcttggcaactccgatctggctatgtaccgtgctaagaacagcctcgataataagatctgctggtatgaaccggaaatggataataaaacccgcctgcgtaacatgctagcggcagatattcgctctggcatcgggaaagggcagtttacaattcactaccaggaaattcgctgcattaaagaccttaatgtgaccgggtacgaagcgctattaagatggcatcatccacagttaggtatgatttcgccagagatatttattccgattgccgaggagagcggatctatcgtgcctttaggttactgggtgctggagcaagtctgtactgaatcgcaggttaataaactggataaaaaaatctctgtaaatatctcaccggtgcaactgcgtcacagaaaattaactgaaaaagtcagagaaatcctgaaacggacggaatacccagcaagcatgcttgagtttgaagttacagaaactgcatttattactaataagcaactggtctacagtgtcctgcatcatctgcagaaaatgggtatcagtattgcgcttgatgatttcggcactggttattcttcgctgagtatgctacgtgagtttagttttgatatcataaaacttgaccgcagctttataaccgatgtagaaattaatccccaggtacgctctttcgtgcgagctattatttccttggctaactcgattaatacaccgatcatcgccgaaggaattgaaaccaccgggcaattgcggattctggaggaagagggatgtcatgaggttcagggttatctgttcggtttgccagttgatatcagacatttgcctcgtaaggagtag

SEQ ID NO: 205843 - DNA, 387 bp, Klebsiella oxytoca
atgaaaaaagaattacattatgagtttcatcactttggcattccgttacaggatagtaaatgcgagggaatgtttagtgagaaggctggaatgttcacgaccgataatcccggaaaatttaaagtccagtggcatcgttttactgacgagtctccactgcactccctactgaaaactatacctcacgttgcttttaaagttgacaacttggcagcaaccatcagtggagaagaggtaatcctcggcccctatgaaccgattgataattacttcgtggcagttatcaatgacgttggtgtacccattgaacttattcaaacaacactgacggatgatgaactttgggatagagctaggacagctaagggaagtctctatcgtaaatag

SEQ ID NO: 205844 - DNA, 399 bp, Klebsiella oxytoca
atggatcctagagaaaaaatccagaaagttggtcaagtcgtatacggcaatcggtggaaatcacctttatctcgagaaatgaaagtagatctaaaaaccttccgccgttttctgtcaggtgaacgttatctaccaaagaatatttcttttctgttgcttcagtctatggagcaagaattagccaaaattaatactgctattgaaattatcaactctgataaactacagcggaacaatataacacctgacttaatagaaagaattgctaatcagtatgattatgcctgtcaaaaagattacaaatctgctatcgaagctatgcaaaatgcggtatttgatgaaacttatctttctgacctcgctgctgtagcactaagattttcattaaataacgattga

SEQ ID NO: 205845 - DNA, 213 bp, Klebsiella oxytoca
atgctcgaccgcatggctaaacgttctgaagtgatgagaaaccttgtgttaatagtttcgctgattttacgcgatggtgtgaacaaccgctttaacaaaatcatcaaatcacgtctggccataggaacgatgccgatgattgtgagtatgcagtatttgcactatcacgccctcagtggatacctgctgcgtggtggatccagtggaatgtag

SEQ ID NO: 205846 - DNA, 693 bp, Klebsiella oxytoca
atgataaagaacagtgtggaaatagaatcctataaatttgttttagaaccatcttacaaaaaagatggatctattcattcttgggaaattcttactaaaaacgtaaaaaaaaacgatgctaatgattatgatgctaatgaaaatacattttgtttcaattcattaaacgaaaaggaaatagttgatgtatttaacaaacagttattgataattggaggacttgattctcagctattggactttaaaaccgtctcaatgaacattgatagcatcatcagcgattatattttaaatgataattacatttgcgaatacctaaaaaaccaaaaaaatattgcttttgagatgaacgaagaatttcatgagttcaaaaattcatgttgtatggctgacttgaaatttctttccaaattgtgcccagtatggttggatgattttgggagaggtttaacaagtttctctgttattgaaatgtttaaatttgaatgtataaaaatagataaagattacttttgggatattcagcatgaaaataatgccgtacagatattagaagagattaaatcacactgtaatttcattatagttgaaggcattgagacaatagagcaaaagaataaagtattttctgttgttgatagcgcttgtcaggggcggttgtggatgaataattactactatattgagtgttaa

SEQ ID NO: 205847 - DNA, 1065 bp, Klebsiella oxytoca
atgttaaaaaattttccagatgaaaaatacatatcagatagaaatctatcgtttattaaacgggtatactttctacgtcaggtcggctcacttctttgctttattcctatttattctgttcttctagaacaattacataataaaattacgcttgcgttgttgattttgaatgcgcttatatggccatcagttgcttactttgcaagtgtgatatcgaaggacatgctgaatacagaaaaaaagaatttgatactcgattcattctgggctgggatttggattggaataatgcaagttagtccggttccatcgttattcatcatctccgctcaaatagcagatcgctatgcagctggagggatgaaaattttaaaaccagcattgttatggatgatgagtagttttttgacagtttggtttataaatgatttcaaatatacgacggagttcagtacccgaacggttttgttttctttacccttagctacctgctaccccatcgttttgagtgttgtttcgagacatttatctataaagctgaggaaaagaagagagttactagaaaaacaggctctcatggatccgggtttagaactcccaaatcgtcgtttttttgagcagaaaatggagagcgctttccaggctacgcgaaaaaaacggatccattcatatcttgttctcattgatgtggataattttaaaaacatcaacgatagctatggtcatgaggttggtgatgcagttttatatcgtatatcgaaaatattgcgagagtgcactggtgagaaggatattcctgcaagatttggtggtgatgagttggctatcattgttaacaatagtaataatcagcttgttttaaacatggctaacataattcggcaaagaattgaaaaaatttcaatgtcttctcacaaaggtatttgctgtactgtgagtatcggtatttcctgtgctgaaaataaaaaatcgatcatcgagtggattaaagcaacagatgaaatgctttataaagctaaacgtaacggtaaaaatagatattgtattgagagtaatgaaagatga

SEQ ID NO: 205848 - DNA, 393 bp, Klebsiella oxytoca
atgaacgacacctttcctgacgacatccttctgctgaaacagtgcctggccgaacaggcagcgctgatccacgccctgcagaagaagctgaacagccgggaacgcgaaatagaccatcagcaggcgcagctggataaactgcgccggatgaacttcggcagccgtttcgaaaaggtatcctgccgtatcgcacagatggaagctgacctgaaccggcttcagaaagaaagcgatacgctgactggtcgggcggatgccccggcagtgcagcgcccgctgcgtcagacccacgcctgcaaccgttccccgaatcactcccccgcgatgaaaaacggttttacctgcagagccctgttgccaggactgaggtggttcgctgagctacctgggtga

SEQ ID NO: 205849 - DNA, 240 bp, Klebsiella oxytoca
atggacatgaacgcgggttatataagagcggcccgcatccatctgcccgatgcggtgagtaaaatcgcctttgaccgcttccatgtggcgaaacagctagctgaagtggtgggtaaaacccgtcagaatgaacatccgcggcttccagctgacagtcgtcgccaggccaaaggcacccgcttcctgtggcagtatggcaaaaaatggattacagaatcacgacaggagaagctggcatga

SEQ ID NO: 205850 - DNA, 468 bp, Klebsiella oxytoca
gtgtcggataacctgtttaacggacgacgtttccgggcgctgactgtagtggataattttagtcgggagtgtgtggcgatccatgccggaaagtcgctaaaaggtgaggatgtggtcggtgtgatggaaaggttgcgggtgctgggcaagcgcctgccggtacgtattcatacagataacggcagcgagtttatttcgaaaagtctggataaatgggcgtatgagcacggtgttacaatggacttctcccgccccggaaaaccaacggataacccgtttattgagtcatttaatggcagtctgcgggatgaatgcctgaacatttactggttcctgtcgctggaagatgcgcaggacaaactcgacaactggcgcagggaatataatcatgagagaacgcattcatcattaaatgacatgactacagctgaattcatccgaagtctccggaaagacgaggagctctga

SEQ ID NO: 205851 - DNA, 288 bp, Klebsiella oxytoca
atgggcgacaggaaaatagtggatatgacgaatatgtacagagcgctgaaggcgctcgggcataatcgtatctggctgcaggtcatcagctcaggtgacagattcatggtgacgtatgaaagccgccaccttgcccggtttgaccgcaacctgcggacatggcgtttcatgaaaaatgccgacctggtggatgactggccggtgggaagcgaacctgacggcgacggactaacggagctgacagaggaagatgaagaacttttttatctgacgctggagcacggctga

SEQ ID NO: 205852 - DNA, 831 bp, Klebsiella oxytoca
atggactccctcggattaccggccacgttacgacggcagattaataatggggttctacaggccaatcaacctgatcggcaggatacgatctggttacgctccgtcgcggcctggcacacctggctcagttatgagcaaaactgcgtacgttacctccgtcccggccacgacggtgattatgactatctaaaactccacatcccgcaactggccgggctggtcagctgcgagattacagaaaattatctctgtgatatttctgaaatcggtgggatgagcagttcgaggaatagtgacaggcagtgcagcagcctggaggattttgcactgcagtgctgccgggaactgaccatcccagtgagtggtgatcatctggacaacaatctctctcattctcaactgcggttgaatgagatggaattcagcaaattctcctggatgccggcacggatatactggaacaacctgggtgggtcacatcattttgctgctgcccggttccaggctagccagttgggtcagcaggttcctctgacaggccgactaacctcctactggattaatccgcaaaatgtgaggctgctgacggagaaatgggacctgttcctgatatcggataccgtggtttatggcgaatttaaagatgcgctggcgcgacacaaatgcccgtttggcgtatctcatccccctcgatgggaaaatggagacgagcagcttttccggattatatggctggaacgtgatcaacctgtcccggcgcgggtatcacgaactctgacgcaggcgggatttccgtcagtaggtcagctgctgctcaaaccgggactctga

SEQ ID NO: 205853 - DNA, 1215 bp, Klebsiella oxytoca
atgattattttctgggaattcgttaaagagaacgtagaggttataggtactcttgctacttcacttgcttttttagcaacagcctgggcggcttatgaagcaagacatagtgcaaaggctgcaatgagagcaactcagttgacggcagattcactttttgagctgaaaaaaaattcatttaaggactggctcgaattgttacttgagcagcacaataaaatgcttgacgatgttaatcaggcactaaaagaagatagaataattaaaataatatctaatactaacctcgtcaagggtgtttataatgctttaataaaaacacccgtcatcataaaatacattaatcatgttactttaattcttgattatatagataaggacttctatcttccgtcatcagcatatgatgaaaagagatcgtatatcaagcaactacataatagtattaatacagaagtaaacttggtaattgccatccttggcctcaatgtcgataacaataaatcttacaacgccaaaaaattatccaatctactaaatgattttaattattttgaaaatgagttattttttgaggatgcagttatatatgccagtagattggatgagtatatttctagcaagtttgatgaagagtatagaggtaatgtggcgttttatgttgatgaaatgattaggaatcattactataaattcacaccatctaacagctacgtatttcgcgtttaccaacgaactactatggcagtatcttggtcttacaataccccttatcaacaacatttattagataaattcaatgcgttatcactgcaaatgagttcaaaaatcggacgagacatgaaggaatcagttgaagaagtggccaatttcgattccaatttatctaaatatgtgggttgggagtataagagagggaataaaacccgaagaagaataaaaaatgaaaatcagcttaaaagattaatgagtatttattttaagtcttgtaatgataaaaataaaaaaatgaatgatatttggcttacaagtcaatatgatcgcattcacgccagcgatattaaaaaggagttattgcgttatagtttatataaatcatattcgatgcttagatctgatccacttaaaaaagaaattattgacaaaatcgtagcggaagttgataaaataatcgataattataagtctgagcttaataaattaagctttaaataa

SEQ ID NO: 205854 - DNA, 1245 bp, Klebsiella oxytoca
atgaaatatatagacgacctaaggcaaatatatgaagtgtttaatgaacatccctcattgctgcctccctatgaagcgaaagaaagcttaatagacgactttaataatcgggttaatagttacttaaccgtaattgaaactatatcttccacctaccctaacaattctataattaaaaaagtgagtgcaaaaaaaaccacaataacttctttcgcagcgaaaatcacagctacacttactgaatatttaaaaggtaacatccgagaagcatattcaaccttcgaccaagctataacccgcacggccatgaataatcatatttataatatgacgcgcccgcttacaaaattatgtaatgaccatcaaccattattcagggtaagaagcagtcaaactattctcaaggagcgcagagagttattccatattccatttgaagataggcatcatgtcggtgcaatgcgtttttctgtatctggtctaccgtgtctttaccttggttcatccatttttgtttgctggcaagaaatggggaaacctgatttcgacaaactatacatttcttcattcaaaaccgaccttagttcacaagaattaagaatactggacttaggttataatttaacctccgcagtaaaaacaaacccattagatattttctttgacgttgaagatgagcgttttattgaggaagacacagaattcagtgaaagatctgagagcagtagaaataactcggggatgtggggagagacaaatatcatatcaaagttaattgcgtggcctttagtcctagcctgtaattacagcaaaaatcacatagatgctaaatttcatagagaatatatcattcctaatctattgatgcagtggattagtagtgacaaaaacaaagaaatttcggggatatcttatcgctcgacaaaaatcttaaaccaaaaaaacaatgatattggattgaatgtaattatcccacccaaaaaagatagcctaacacctgattgcactggacattgcccagtattaaaacaaacgttctctctgacaaaaccggtatcatggacattttttagtacccttgaaatcgtacctgcgcggttcaagggggaacgctcggaaatccatggttcccagccaagaattgaagattttgatgagtcattggttgacctctatggcactacaacatttaagaaagtagaacttctgattgaccaaatgatgcgttacgaacacctaccatag

SEQ ID NO: 205855 - DNA, 633 bp, Klebsiella oxytoca
atgatcaacattcaggcgggtcccaatacgggaggtagagaagcaatcgaaagattgcttaaggcatatggattcagcaccaaacaagcactagctgaccatttgaaaatttcaaaaagcaccatggcaaacagaaacttacgtgacagcttccctgctgagtgggtcatccagtgtgcacttgaaacaggggtttctcttctatggctagcgacaggccaaggtgaaatgttcacttcagaagaccgcgaaaaaaatcccgtaaacgagtcaaatgtcacgctgcgaccactttccaaaatcgttgcaccaagcattaagcaagtcgaactgaaaaacggagagttgaataacgaaggggaggttttgcttgatagcagcttactggacagtgagtccggcaattcgttgtttataaaaacgtctactgactgctttgtagtggatacatctgtcaaacaggttagcaatggctactggcttgtcgatattgatggggttaagagcatcgtcaagattgcccgaataccaggcaacagaattgttgttcaccaagacgactcatcctttgagtgttctgttgatgatgtggaagttatcgggcgagccattaaagtaattaagagtatttag

SEQ ID NO: 205856 - DNA, 201 bp, Klebsiella oxytoca
atgctgaacaaccaaccatcaatggcatcgcttctcgttaagcaaagtccgtcgcctcatttcgggcatggctggatcatggggaacgatggtaaacgctggcacccgtgccgctctcaggatgcgctgctggctgacctgtccaccactaaacaggggaaaccatggctattgaaggcgattctgcgactgttccgctaa

SEQ ID NO: 205857 - DNA, 585 bp, Klebsiella oxytoca
atgaataccgataagatgacaattagccaacgtgcaaatcaatggcttgataatgactacttatttattgataccgaaacgacagggctgggtgatgatgcggaaatagttgaaatatgcattattgatagtcatgggtttattatgctcaatacacttattaagcccactaagcctattcctgatgaggcaaccgccattcatagtattactaatgaaatggtagcttttgcccccgcctggactgatatatgtggggctgtagaggagctattccggcgctttgggtttgttatctataacgccgattatgatatacggctaattaagcagacttatgcagtgcatgggcgaagctcagatgcggcaccgtggatgcttgcctctcattctgtgtgtgcaatgaaactatatgcagaatatcgtggcgagccggggaaatatcacggttataagtggcataagttggttgatgctgctgcgcatgaaggtgttgtggttgagggtaaggcgcaccgtgctttagctgattgcaaaatgacactaggtgttatcaaagctctagcgcaaggcggtgcagcatga

SEQ ID NO: 205858 - DNA, 792 bp, Klebsiella oxytoca
atgactatgaaccgcataaccgatgaaagtttagaccaacttgccgctatagagtggctggcaagcgataacgctcatgatgaaaatcgccaagctgatcagatttaccattcaaatgtagctgctgcgttatgcgagctaaaggaacgccgcaaagcggaagccaataacaagcctgtagcgtggaccggtgcggaacaactgcgcgatgcaaatactcagggctgcgggtacatctttggcttaggtatccctgctaaagcagatcaccagataatgctatataccaacccgtcgcaggtagcgtctgaccttttcatttcaggtgttcgtgatgaggatggagaatgcagcgcggttgacgatgctgccgcacaattctggaccgtgtaccgcagaaatgaggacgggacctgcgatgcgctgatggattttatgagcagggaaagtgcggaaaaggcgattcaaatgattgcctcacctgtagaaccacaaacagaatctttaccgatactgaacaaccatcatgttgctcattggtcagaattgcgtactgataattttccagagcataccgtatccacccgtcagcagatcggggggtgtgcttggctcgactggaatcagttaagcgcactagggctgattgttcgaattaataaagagattcttaaccctatggggttggcattattccgtgatccaaaaactggaacatctgaaggtgctttgattgccccagatggacactggagttattcagtagatattgaaaaaggcggtgccgcatga

SEQ ID NO: 205859 - DNA, 297 bp, Klebsiella oxytoca
atgagcgtaattcacagcttaaagattggcccgctgttttttaatgctgtagcaaacggcgagaaaaaagcagaagtgagaaagaatgaccgtgattttaaatgcggtgattttctgctgcttcgtgagtgggagggggaatattcaggtaataagctggtagtgaaagtcacgcatatattgccgattgatggtttagttgtctgtggtggcaattgggtgatgatgtctgtttctcatattgagaataatgatattcagccatttatggatgcagttttagggggtgttcgatga

SEQ ID NO: 205860 - DNA, 861 bp, Klebsiella oxytoca
atgagcaccattctgaaatgggcaggcaataaaaccaccgtcatgcatgagctgaaaaagcaccttcctgtaggcccgcgactggttgaacctttcgcgggttcctgtgctgtgatgatggcgacagactatcctcattatcttgttgcggatattaacccggatctgattaatctttatcaaatgataaagagtgatgttgagcttttcatttatctggcaaaaaaagcatatcgagaaggcgctggtgaaactaattattatgagtttcgtaagttctttaatacttgccaaatggattcgatggataaggccgttttcttcctgtatctgaatcgccatggttatcgcggattatgccgttataacaaaaaaggggcgtttaacaacccatacggcaattataaaaagccgtattttccagaagatgagatcagagcgtttgctgaaaaggcagggcgggccacttttgtttgcgcaggatatcaggatgttttgttttcaatgctgcgcctgggtgatgtgatttattgcgatcctccatatgacgaaacattttccgattatcacacggctggttttactgcagcggatcatgtcgttttagcgactactctggaacgccgcgcacgctccgggcatccggtaattgtgtccaatagcgataccagtcttacccgcaatctataccgcaattttgccagctcccgcatgaccgcaaagcggagcattggcgttgcggcaggtaagggaaaatcggcagaagaaatcatcgctgttttccagccatgggcgaggtttattggttttgacctggcaggcggacccgataccagcgttgcatatgaggttcgcgcgtga

SEQ ID NO: 205861 - DNA, 1182 bp, Klebsiella oxytoca
atgaaactgactgagctaactataaacggtatcggggggataaagtccctgtacgtaaaatttaggcctgacatgaatattatatgtgggcctaacggaattggaaaatccacactcttgcttgctgcctcctttccttttcttcatggatacactaataaaataaaacgcaatgtcacttctgaaacaggaagtgttagtctaataatagaagataattctattaactttaattcagtattagatgttaacgtccatttgcctacagaaacaattcacaattttaataataacggatttgataagaggaaactaataaaatttgaaatattacgtaactttgattataaacatcttgaagcgttgaatgcagataaatcactatccgatgatgctgtttcgcaacagattaatttaggtgtcaatttacatgatatcaaggattggtttgctaagagggatttgtttgaaaaagtagataatggttatggtcctaatacgataaaaaatatacatcttgcaagggagtgtatatcaattttaaatcctcagttttcttacaatcgcgtcgatcctaaatcttacgatatttttgtaaataccccgaccggggtaatatggtatgaatatctgtcctcgggattcaaatcatgtatgagtctccttctcggtattattaaagagatagagcttcgttatccggagaaagatatttacgcccaggaatttgatggagtgattcttatcgatgaaattgagcttcatttgcatcctgagtggcaggcaagaatcactgaagcccttacgacaacatttccatcagcacaatttattgtcacaactcacagcccacatgtagtacagaatgcaaaaccacatcagatcattgcgttagtaccagataatgatggcacagtgagagtaaaagaacttcctgaaaatggcttgggttattctgcttggacagttgaagaggttttgttagatgtaatggggatggaaagcactctcagtagaaaactacaggaactacttgataatttcgaacgttttgttgatgaagaagatttcgacaaggcgaaagaaatttatgattatttggatatggcattgcatcaaaacagtattcttcgtaaatctcttaaaataagcctgatgtcaattcgagagagagaagagtaa

SEQ ID NO: 205862 - DNA, 747 bp, Klebsiella oxytoca
atgattaagcttgaacggaactttattcctgatttttttactcgtgttgatcttctatctttaactcaggagtttaaagataatggaacatctgtctggcatcatccggaagtaaaatcggcatgtctaaaattaagtaatggcaaatgtgcattttgtgaggtcaagcttgaagaggctagcacctataatgaaattgagcattttaaggataaaaaaactttccctgatgatgttattagatgggaaaatctccttccttcatgccgtcactgtaatggttcaaaacaacgccataatgttgtactcaatcctataataaatccatgcaacgatttaccgtcagaacacctttatatgatagggtatcgtattaaaggtaaaactgatttaggtgaaacaacagtgggtgttttaaactttaatcacagggagcacaagtttataccgcgttgtaaagcaggggagcttatagatagcagtattgatgacgcaatagaaaaacttaattggtttaatgagaatccaagtactagacgtaaaaacattcttatgaatctagtcgaggcaatattaggtgagtgtcagaaaacatctcccttttctgctgtatcagcaacaatgcttcatcgttcagtcgaatattcttatctgaaagagaccatgcagatgcaaggattatggtcagattatatgcaggaacttcatgatgaatctttgagcctgacgttaccgtcaattcgctag

SEQ ID NO: 205863 - DNA, 672 bp, Klebsiella oxytoca
atggcttttagagcggaagaagcagcagcagcgaatttcgaaaatgcctataggtatttggttccccagggttcaaaccaggagacgcgtgcgaaggtccggacgaagcttgaggaaattgttgaagagtgtgggccggtagtggatggatatccggcctggcacccttttttgctggaaagagataaagctaattgggcacctacggttccaagcaatactcccagctttaaatacctagaccatacgatctatttcagaaacgctattcttacctgcccttatggccatggcgttgatgaatttatagcggggataaaccgtttaaagcatagggatgcttatatctctatcgagaagattgacgacattgcgctttataatgaaaacgccgtcccgttgctgattaaatgccattggcatatttcggacgatatggaagaagatggcaccatccctgcgaaggccgcaatcggcttaatgctggagagcgaggttcctaactggcggcatgctgtttattgtgaaagttgggaagatatgcgcgggcaactgatgggatatccgcacggggcaagatcatctctatttgttaatcagcagacagggcagaaaatgaaaagcttctggaatcagctgattaagaccgggattcttggcgaataccgataa

SEQ ID NO: 205864 - DNA, 1251 bp, Klebsiella oxytoca
gtgactcggattccgacagcgattcggactctgacagcgactcggattctgacagcgattcggattctgacagcgattcggattctgacagcgattcggattctgacagcgattcggattctgacagcgattcggattctgacagcgattcggattccgacagcgattcggactcagacagcgactcggattccgacagtgattcggattccgatagcgattcggattccgatagcgattcggattccgatagcgattcggattcggacagtgattcggatgctgacagtgactctgattccgacagcgactccgattcggacagcgactccgattcggacagcgattctgactctgacagcgactcggattcagatagcgattctgactcggacagcgactcggattctgacagtgactcggactccgacagtgattcggattctgacagcgattctgactcggactctgacagcgattctgactctgacagtgattcggattccgatagcgattccgactctgacagtgactcggattctgacagcgattcggattccgacagtgactctgactccgacagcgactcggattctgacagtgattccgactctgacagcgattcagactcggacagtgactcggattctgacagcgactcggattccgacagtgactcggattccgacagcgattctgactcggacagcgattctgattcggatagtgactcggattccgacagcgatgcggattcggacagcgattcggactctgacagtgactcggattccgacagcgattcggactctgacagcgactcggattctgacagcgattccgattcggacagcgactcggattctgatagtgactcggactccgacagcgattcggattccgacagcgattctgattcggatagtgactcggactccgacagcgatgcggattcggacagcgattctgactctgacagcgactccgattctgacagtgactcggattccgacagtgactccgattctgacagcgactctgactccgacagcgactcggatagcgacagcgattctgattcggatagtgactcggattccgacagtgactccgattccgacagcgattccgattcggatagcgactcggactccgacagcgattccgattctgacagcgattcggattcagacagcgactccgatagcgatatcgaggctgtaccggatagcaacagcccggatgtggtga

SEQ ID NO: 205865 - DNA, 918 bp, Klebsiella oxytoca
atgtttaatttattaattactagtgatgaagatggttggaaaaatgaacgtcacataatgaatcgtgatagggtgattgtcgaatatactgcatcagaaattgtggaacgttatagaaagctaagtcaagagagcattggtgagttaaagagattcccatgtctttttgtggtggaaagcgaatccattccctctcgcattggatatataacaaatatcaggttgagagacaaagagtgcgtgatagagtttaaaattgatagaagctttccagagctaccaataggaactatcgaatcaatcaggaaagagatagacttgggtagatgggagttatcacgaacacattggtcgattaaagatgaatcattattcgatattttgcttgataggaatttaataactcaaaagcaaattgatgcttctcatttttcacaagtctctcatatgcaaaaaatacctgaccccaccaatttagatactactatatataactgtcgtcaagtttttatagtccacggtcatgatgatattatgagacttcaggtagaagagtttcttaagtctctttatattgaacctatagtattaagtcagcagccaagcacagggaaaacgataatagaaaaaatcgaatattattcgaacgtcggttttggggtagtgttgtatacagagtgtgatactggagcaaaaagaggatctctcgtaaataaatacagagccagacagaatgtcgtctttgaacatggttttctaataggtaagttaacaagaaatagagttgcagccttggtaaaaggtgatgtagaaactcctaacgacattagcggtgttgtgtatattaatgttgatgatgctgaacattggaaacaagaactaaaaaaagaaatgcgagccgttggatataatgtttga

SEQ ID NO: 205866 - DNA, 2007 bp, Klebsiella oxytoca
atgaaaaaagaaagagttgtagtaaatgatagaggtattaaaaatcgattaaaatctgtaaaaccatttaatgctatttccgagtatatatggaatgggtttgatgcaagggctaactgtattgaaatcacatggagctgtaatgaactcggctcattagattacttatcaattaaagataatggtaacggcatacctgaaaatcagctggatttaaaattcaaaccttttctatcatctgaaaagaaagctaatagtgatttaaaatatatcaacttagtccatggtaaaaatggtttagggaggttaacattctatacatttgcacatagagcaacttggaatacgacatttttaaatactgataatttgctgtacgattactcaatcacagtcaattcaaatagcttagataactactcaaaaaaagatatcatcttatccaattcagaaaaaacaggcacaagcgtttcgttttcaaatattgtagaaatctctgatttttatatagaaaatacattaacccctttcattgaaaaggaattctcttggtttttgtatttattcaaaaatttaggatacaccttaaagattggaaatagatttatacaacctgaaaatataataaaagaccaagaagcatttgagattcaaatagaggggtttgagtttcatgtggaatatgtaagatggtcttcaaaattaaactcacaatcatcaagattttatttttccgaaagcaatggtaattattgtcattctgagacaacgcaattaaataacaaatctgattctttttatcatagcgtatacgtaaatagcatatattttgacaacttcatacctaataataaacaggatgatttattttcaaacactacaaactcagatgtatataaaaaattaattagtgaacttaattcttatttacgtgcaaaacgaaaacctttcttgacagaatacgctaaagtacttgttgaaacgtatgaagagaaaggaatattcccaaaatttaattataataataaatgggagaaaatgaaagctgacgatttacgtgaggcgattcaagaactgtaccaaattgaacctaggttttttagagatttaaataaaccacaacaaaaaatcctagttagaatgttatcattaataatagatggcggtgaagttgaaagtttctttgatattattgacagcgttatatccctctcaacagaagagaaagaaaagtttgctgaacagttgaaagtcactcatttatcttccattttaaaaaccattgaattattaacggatagatataaagctgtcatagagttcgaaaagcttgtctttgatcctgaaatgtacgcaggcgaagtccctcacttacagaaaatgatggaaagaaactactggttgttgggtgagcaataccaactagtaaccgcagaggaacctgatttcaatgaagctgtaaaacgccacgcatacattttacgtggagagaatattcgcaaacataaaataggacacgcctctgaacaaaaagagatggatttatttatgatccgtcaaagaatgaacgaaaataaaatagaacatattgttgtagaacttaagcatcctgtaaacataaggttaggaaaaaaagaaatagaccaagtatatgaatattaccaagttatcagaagtgaaagcctctttaatgcgagtaatatgctctggaaattttacttaatagggaacaaatatgatagcactggatacatagagcatattatggatatttataaaggaaaaggggattatggcctagtgtataaaggtgagtatgaggtctacgtaaggacgtggtccgaagttttttctgagtttaaattaaaacatgacttcctgaaccagaaactacaaattgaaaaagaaaaaattcaggttgccctttatatgaacgctgaggaaatcgtaaataaaacgcattcatcggactccccagcagaattctcatggcataaaacaaactaa

SEQ ID NO: 205867 - DNA, 150 bp, Klebsiella oxytoca
atgactaaggcaaagaatattgaatttcggctgagcaaacttgagaaagggccagacaaaaacgttctggccatcatggagataaggtcgagggctattgcaggtacggtgttgaaccaggtacgaaatcaggtgttgaaaggtcaataa

SEQ ID NO: 205868 - DNA, 324 bp, Klebsiella oxytoca
atgacgggaagaggcattaacacagtacgtatcggtgatgaagtgaagcacatcgccgagctcaatgcactaacactcatgcatgaatggtcaaagcttaaaaaagaaaatgcagacctgtatgactataaccgtcaggttaaccgggggtggcgcggttttattcttcgcctgatgggtatccatttgcctgaaaaaaacgtgtttgtctttatggcattaatgccagaaaagaatccatctatcccgactgaagccgtgctggcagtgatagtgagcaggccattgcagaagaatagctgtaatttgacgctaagtttctga

SEQ ID NO: 205869 - DNA, 1374 bp, Klebsiella oxytoca
atggtggatttaatggtgagtgagcaacagtcggatgcggcggagaaaggcgtgcctgcggggtttaaattgactgaggtggggattattcctgaggattgggagtgcaaatatctcggagaacttggcgatattgttcggggaggctctcctcgccctgcaggtgatcctaaatattttgagggtgattttatcccttggctgacggttgcttcattgacgacaatcccggatgcccaacagatcgttatggcaacatcctcgatgttaaccgaattaggttctaagcatagccggaccttagaaaaaggcactcttattatttctaatagtggtgcaacacttggtgttgcaaaacttttaggaataaaatgctgtgcaaatgatggtgttgctgcaattattaaccaacgaatcggaaataaatcatttttgattcattacattaatacaataacaaaaagccttcatgacaagatcgcaacgggtaacggacagcctaatctaaatactgatctgattagacttatttctgtaccttttccaaacgagcaagaacaggaaaaaatagcagatacgttgtctgattgtgacaattttattcttaaactagagcaactaatcgctaagaaacaggccatcaaaacagccaccatgcagcaactgctgacaggtaaaacccgtttgccgcagtttgtgttgtgggaagatggggttgctaagggatacaaaaagagtgaattgggggatattcctgaggattgggatatttcgacctacggtaaggttttttcatttttatctacatcgacaaatgcaagaagcgatctttctgatactggagagtacggatatattcattatggtgacatccacacgaagtggaacaacaatttgaatttagagaatagctccgttcccagaatatcaagcgacttggtatcttcttcgtttatcgaagaaggtgatcttatcatggctgatgcctcagaagactatgttggtataggaaaaagcattgaaattcaaggtgtaagggataatataatcgttgcgggattacatacctatttgttacgtgatgtgaacaatatatttgtagacggtttccgaggctacctacattgtattcgagccgttaaagctaatattgaccgactggctacgggtatgaaagtctttggggtatcgaagaataacctgaaaacaatccctattcctgttcctccaaaagaagagcaaaccgccatcgccgccatactctccgatatggacaaggagattcagaccctgcaaaagcgtctggacaaaactcgccagcttaaacaggggatgatgcaggaactgttaaccgggaaaactcgcttaatatag

SEQ ID NO: 205870 - DNA, 657 bp, Klebsiella oxytoca
atggcttatgactacagcgctaatctcaacccggaaaaagccctgatctggcgtattgtccatcgggacaatatcccgtggatactggacaacggtttgcactgtggcaacagcctggtacaggctgcaaactggatcaatataggcaacccagagcttatcgacaaacgcgccgggcatctggtgcctgccgggacgggcgggacgttgcatgactatgtgccgttttactttacccccttctcaccaatgctgatgaatatccacagcgggcgcggcggcattacgcagcgccccaacgaagaaatcattattctggtcagcagcctgcgacacgtggcgacgcaaaacgtccccttcgtgtttaccgacagccacgcctactataactggaccaactactacacccgtctggacgacctgaatcagatcgactggccgatattacaggcgcgggatttccggcgcgatccggacgatccggccaaatttgaacgctatcaggccgaggcgttaatctggcagcactgcccaatcacactgctgggcgggatgatttgttacaacgatggcgtcaggttacaattagagcagtggctgtcgcaacgcaatctgtcaatgcccgttcacgcacgggccgggtggtatttctcatga

SEQ ID NO: 205871 - DNA, 378 bp, Klebsiella oxytoca
atgaaaaaaccttttttaatccttctacttgtcgcatcccagagcgcccttgcagacaagatcccagactctattgagaatctcattgcggtttacgatacaagatcgcatagcctagacaatggcgagctaaccattaaatacagcaaacaaaaattgttggtagatgccgctgaatcaatattcagcggtatttgcaatgattactttatgaacaaatggaagccagagacgattaaaaaaatcactctgctaaatgtttcccatgaccagggttttaggattaatggcggcggagttgaatgtaaaaaaactggctctatggaaaacgaaaaggcacgtgcttacagaaccagcttgattgaacctgtgcaatag

SEQ ID NO: 205872 - DNA, 189 bp, Klebsiella oxytoca
atgcggcactggcgaagcattttgagcgttatgggaattatggacactgcgaaagaaaaagtgacttacaccgtagaagttgaaggagtgaaagtctgggttgaggtagtcaatcgccataaaagctacgtcgccacagcgatgacaggaatgcgcagactgagaagtctcccgggccagactgactga

SEQ ID NO: 205873 - DNA, 483 bp, Klebsiella oxytoca
atgagcaaaatcactgacggtaaaaaatactgctaccgctacgacgatggtcatgatggcgaaggtcgcccggtcgtaacactttggaagcgggtcattattcgtgagacggagaaaaccttctggcatgtcgaagatatgccgcaaatgacgtttgagcagcttgtgcagtatcgcaacaccggccggaaagagaatcaaaaatatcacgtaaagcgctgcttaaaaggtgcttaccgttctcgttaccactacacgcgagaagaggctttgcgagcgtttgtgtaccggaaaatgtatcagcttgaaaaaatccagcttacagcagaaacggtgaaaatgtgcctggcggggcttcatgatgcagggatgattacaggtggatatcgatgcacggttaagaaattgcctgcagatacagggtttgtggctgccgcggctccgggcccgatagcgtcaacttatagctggggggaatactga

SEQ ID NO: 205874 - DNA, 921 bp, Klebsiella oxytoca
atgttacataagaaaacaacacaagaaaatgtagcttttggacttgctgtacttaactactatcttcgtttcaattctaaagcaaatttacaggacgctaatgtaagttcagaggaattgataagtaatttagtaaatattctgaatggtcataattttatctgcacatcggaaatttcagcaaattatccaggaatagatgctatagataaaataaatagactaggactccagataacacatacaaaaaccaattcaaaaattaataaaacaatagataaaattcgcgacaacaaagttaacaatgacattggtgtactatatttcttcattacatcaagaagacagaagaaatacacgatcacagcacaatgcccaaatctaaacgtcacagtaaataacatactagactttgattccctggctgaactgctttcgcaaaatcagaataaactggctcaagcagaagcagaacttattaaagcaatgcctcgtctctaccaagatggaaaagcacgatatgaggttatgtttaatagtattcttgtggctaggaaggaattagatagaagagtattcactgctgacaaaattttagaagaacctgaagaaatgctttcatcccttagggaagtcagaatcgttatacaaaaaacaggcataatgaatgaagctaattctgttgtatcttcttcatttaaaaaaataatcaacattataaatgacgcagagagtcaaattgcaaaaaaatacacgagtggatataaaaaatatagggccgggatttttccctcgtgggattatcctgataaaggagattgtttgaacattttaatgggaataagaaaagacgttttagaccaaatagataatgttgacattgagatcaataaactgaaagggtttcttgggatacagtaa

SEQ ID NO: 205875 - DNA, 1119 bp, Klebsiella oxytoca
atggctcgaaaatttgttatacaaaaacctcagtcaaatgaggagctatttaaatcattagtaattaatgctattgattttttagatgcatcaattgataatttggataaaagacctaaaaactcaattattgatttttatactgctattgaactttttttaaaagcaagattgatgcgagagcattggactcttatattagaagatccagggaatgcacatagtcaaaattttagtgtgggtgactttaaatcggtttaccttgatgcagcagttaagcgactaagaactattctcggtataaatcttaatgataaaattatagataatttcaaagcgttgggtgagcacagaaatcaaattgttcatttcgcacatacagaatattcaaatcagaaagcaaataaagctggtgttgtagcgcagcaatggtcttcttggcattatttatatcacctcttatcggtagattggaaagacatttttatagatcatcagaaaagcatagaacgtattcatagaagaatgctcactcagaaagagtttctaaatgcacgatttactgaactctctcaacaaattgaaataaatagaaaaaaaggaataaaggttgtaaattgcaatcaatgtaatctacctgcaggcatagttaatcaaaatcataagtggggagatgattatgaatgcttggtatgcgaatcacaaggtgtagctttggaaaaggttcgggatacactagattgtcctcaatgtggtaatccttttgagttttttagccatgatgttaataaatgtccgacatgtaaccacaaaatagacacaaatttattaattagaatgtgtaaagcaaagtataaaacaggtgatgattggtgggaacctggtggagatgtcattgctggatgtcatcaatgtcaacatacccctgattctgttttttacattgaaggacagtggagttgcgtttcatgttttgatcgtggatggtctgcaataaactgtccacattgtgacgcgtatgttactggagatatggaaagaattaaatattttgcttgttataaatgtgaagataaacagagggcatcgattttatcaacggcgggcgttaatctataa

SEQ ID NO: 205876 - DNA, 867 bp, Klebsiella oxytoca
atgagcaccatcctgaaatgggcgggaaataaaaccgccgtcatgcatgagctgaaaaagcaccttcctgcaggcccgcgactggttgaacctttcgcgggttcctgcgctgtgatgatggcgagagagtatcctcattatcttgtcgcggacattaacccagaccttattaatctttatcaggtgattaaggataacagtgaagcttttattgagggttcgcgtgatttgtgggcgggtaccaacaatgaggataattattatcgcattcgtgaagcttttaatggtgaggcaattaaggcggataaatatctttgcgcggttttcttcctttatctcaatcgccacggttatcgcggattatgccgttataacaagaaaggtgaatttaacgttccgtacggtaattataaaaagccgtattttcccgaagaggagatcagggcatttgctgaaaaggcaaaacgtgccactttcgtttgcgcagggttccagcatgttttgttttcaatgctgcgtctgggcgatgtgatttattgtgacccgccatatgatgaaacattcgccgattatcacactgctggttttactgacgcggatcagacctttttagcgaccactctggaacgccgtgcacgctccgggcatccggtaattgtgtccaatagcgataccagtcttacccgcaatctgtaccgcaattttgccagctcccgcatcaccgcaaagcggagcattggcgttgcggcaggtaaggaaaaatcggcagaagaaatcatcgctgtttgtcagccatgggcgctgtttattggttttgaccaggcaggcggacccgataccagcgttgtatgtgaggttcgcgcgtga

SEQ ID NO: 205877 - DNA, 420 bp, Klebsiella oxytoca
atgaacgccagaaaatcaacaaaccgtttaaaagacagcgtattagctgaattaattgcagcaatatctctcaacgagaaatcactgccgcgcgcgatgactcgcgtggcgttatgcgagttacaggaacgccgcaaaacggaagccaatagcaagccggtggcctataccgatgaggaggaattgcgatttcctcatgcaacaagtgatatgtggccgcagcctctggggtgcgggaaagatatcccgctttatcgtcaggctcagaccatgcctgcgtgggtgttcccagagattattccgcgcagtgttttccatatgatttaccagcagtgcggcggattcgtggaatgtgaagctgatccgcaggccatatgggaagcctgccgtgaagccatgctgaaaggcggtgcagcatga

SEQ ID NO: 205878 - DNA, 435 bp, Klebsiella oxytoca
atgggattttttggatttgctaaaaaagcacgtaaagcagcagcggaagttaaaaagtttgaaaagcgtgatttggcgcaggcggtggtaaacgcagcgtacctggttgcctacgctgacggcgagtgcgaagcgtcagaaaaggcaaagattgagcaggtgctgcgtaatcagccagcgctggcggcgtttacctctgagattaactcaatcagcgcagcgatcatcgggcagctggataccaactttaaaattggtcgccgtgcggctctgcgtgaaattgaagatgttaagcacgatacccgcgaggcagaggacgtgatggatgtggcagtggctatcgcggaagccgacggcgaagtggagccggaagagcgtaaggtgctggaagagatcgccgctgttctggggctgcgtctggaaaaccatctgtga

SEQ ID NO: 205879 - DNA, 339 bp, Klebsiella oxytoca
atggctttcaaagctgaagatatcactatcaatatgagcgctgggcagcgtgccagtgcgttaaatcatatatctgtattacgcaccgctctatatggcgactgtgaaaaagaacttaatcgttttattaacgaaatgcgtgataagcgtgatgaaaagtacgagctgaataatcgtgtgcttgctgcattattttttcttgcaaatattagcaaggagcgtcacggcgttgaatttagtgagctgacgagtgacgaggtaaccgcacttattggtgtgatgaaccatcttcgcgcagtcgtgagtttatttccaaaacggctagccatgccgaattaa

SEQ ID NO: 205880 - DNA, 630 bp, Klebsiella oxytoca
atgaacgtgtcaacacaaaacttaacgaaaaaagatgacattagcttgattcgagatttcatatttcagaatagaggtgggaaagaggtgataggtcgcatccttgaagcctatgggtttacaaccagaatttccttatgtaatcaattaggtgtatctcaaagcaccatggcaaacaggtatgcacgcgacacatttccggctgattgggtcatcgtttgccatcttgaaacgggcgcatcattaatctggctaagcacgggagctggcaacaaatttgtggatggacgcgacgacaaaaccgtgtacctaaaacacatagacatcacaaatgggaacatggctaaccaaaaagacatcatcgctgatgcgtcaaccattcccgacggcttaacgtcaccatttattctgacggctgataaaacaacgtatctagtagacagctatgagggggagctagtagatggtttctggtttattgaaatcgatggaatcgctagcgtccgagagatttaccgcttccctgcaggccgtatacgggtagagaacggcaaagcatcatttgaatgctccgtgtctgaaatcaaggtccttggaaaagtcatcagcaaaactgagtttatggaataa

SEQ ID NO: 205881 - DNA, 888 bp, Klebsiella oxytoca
atgagtcagttcagcgcattaaattactcaaataatagagataaggctatagcaaaccttattaatattattgagggcatgacctgcgacggaaaaataagcgaaaaggaaatgatttttcttgatacatggttattagaatcggaaataatttctcaaaattattatgtgggttgcattagagataagattgcagacattctttctgatggtatcgttgaacaaaacgaactagacgatttaaaagaattacttcttgagatgcagcgcggcctgatcgacacaccaaacattgacctttattccgttgattcagacaagcatctactggaagggttatgtaaaggaatggcttctgattatcatctgagtaatgatgaaatcaattatcttaattggttcctctccactaatgcctgccttaagaataactaccccggtaaacatttgtatgaattagtcagagaaattctcagtgatggggtaataactgaggacgaacgcattgcattgctgcaggagatcaccgcgttcacaggctctaacatctctgagggaatagtagatggatactccacaacgtcaccggtagacctcatagagaagttcaactcagaaagcagcaaggtatgcctcacagggaagttcttatgcggttctcgtcgccagtgtgaagccgacctaattaaactagggtgtaaaatatctgatcgcgtaacccaagatttggattacctcatcataggagcgcttagctctaaagattggaaattccaaagttttggcagaaaaattgagcaggctattgactaccgagacaacaaaggcacctctcttaaaatccttagtgaagagcactggcaaagcctaatgcgttcaacaaactag

SEQ ID NO: 205882 - DNA, 1086 bp, Klebsiella oxytoca
atggctgtcagcaaactaagcaacggaaaatggcaggcgcagttttttcccaatggtcgcgacggcaaacgcatacgccgccagttcgctactaagggggaggccctggcatttgaacgccatgaaaaggaaaaaactcaagacaagccttggttaggtgagaaaacggataaacggcgggttattgatttggtcaagacctggtatgacgctcacggcgtgacccttgctgatggcctaaagcggaaaggtgcaatggagtttgcctgcatcgccatgggtaaccctcttgcaacagaattcaacgcaaaactattcgcaacttatcgccagcaacgcctaagtggggaaatcacccgttcagacagggttaaggctgttactcctcgcaccgttaatttggaattagcctacttcagggccatgtttaacgaactcaaacgccttgatgattggaatccacccaacccactggataacgtgcgagagtttaaaattgatgaagccgagctggcctggctgacagtggaggaagcaacccggcttttggaagaatgtgagaaaagccgggctggtgatttactgatggttgtaaaaatttgcctggcaactggtgcgcgctggggtgaagctgaatcattgaccggcaaacaaatcagccccggtaaaattacctacatcaaaaccaaaggcaaaaagaaccggaccgttccaattagtgatgagttatttaaagagctccccacaaaccggacatcaaagcctttgttcacgggctgttattctgcgtttcgtggcgccattaaacgtgcaggcattgagttgccagatggtcagctatcccacgttctgcggcatacctttgccagtcactttatgatgcgcgggggaaatattttagtgctacagcgcatcctcggacacacggatattaaagtgactatgcgatatgcccactttgcgccggaccacttaactgaggccgtaaacctgaacccgttaaacctgattaatggcagcaaaatggcagcagagctaagcactatgcaacgcttttcgacaatatacgaattactatgcacctga

SEQ ID NO: 205883 - DNA, 609 bp, Klebsiella oxytoca
atgagtagcagcctgttaccgccgggatcgtccgcgctcgagcgcagactggcgcaggcatgttcaggcatcagtgatttaaacgtgccactgcgtgatctctggaatccgtggaagtgcccggcaaagttcctgccttatctggcctgggcattttcagttgaccgctgggaagaaacctggacagaaaccgcaaagcgacaggctgtcagtgatgcgttctggatacatcagcgcaaaggaacggtggcagcggttaagcgggtgatcgaggggctgggttattcaatgacccttgatgagtggtggacagttgccgaccctgcagggacattccggcttgagattgacctcaatgatattggcattacggagccaatgatttatgagcttgagcgaattatcggtgatgcaaagccggtcagccgccatatatcacagctgacactctcggcgagtgcatactgtacggcgcacatcggcgcagcgatggtagacggcgaagttatcacggtatatccgcagaattattcacctgacggcagcatttattacgatggccaggcttattttgacggtagctatttattttcggagaacgggcaatga

SEQ ID NO: 205884 - DNA, 708 bp, Klebsiella oxytoca
atgcaaccgactgttatcaatttattttcatctgcctgctttaatactggtgcagaaccttttaattatcagatgagctggaatgtagctgctcgcggcagggtgcgggtattaaccaaaatgcgccagtgtggtgctgactggtttttctcactggaagcattatccgacgccctggcaaccgggcgcaaccaaattttcctgggctgcagcgataaacaggcaggcaccaaccatgcctatatctgctccctgcttaatcaggctggacctgaattgcaaaagtacgtatcaagcatgagtgattaccacctgaaacttactaacggcgcacatatctattttgtagaccctgatagccactgcgcagcacttcatggaaacgtctatgcctcggaatatgcctgggccgatgcccccaaaaatatgattgcgctcgccaaatctctgtccatgcactctcgctatcacagaaccttctacacaacgcccagcccgaacccggaggcgtgggcagagcacaagaaactgatcgccggcaatgccacatgcaggatgatttttactgctgacgacgccgcagaatcgggagcgtcgctttttaatgatgaatggctgaatgacatgaaaaaagaattttcagcagaacaatggcaaatgctgtttatgtgtgaatggccacaggctgcgcaggagctgcaggcatga

SEQ ID NO: 205885 - DNA, 582 bp, Klebsiella oxytoca
atgatggatgacccgctgacaggtgagacaaagccagtgcagctcggcagcgatcgtcgtctgcgtaccatctacgataccaatatgcgcaccgcccgcagcgccggtcagtgggagcgcatccagcgtactaagcgtgcgatgccctatctgctctatacgctggggccgtcacgtgagcaccgcgccgagcacctgaaatgggctgacctctgcctgcccgttgacgacccgttctggcagacacacatcggccccaacggctggggctgtaaatgcggggttcgccaggtcagcaaatacgagtacgatcagttacagaaaaatggcgtaccacgcaacgtgcagcagctcgacgacagcggccagccaaccggccacattatccgccagactgtcccggtccgcaccgaagccccgccggtcagacgggtgaagtgggtgaacaagcgcacaggcgaagaggagttggtgccggaggggattgatccgggctgggactacaatccgggtatgcgccgacaggccgaactggagcgccaactggccgcgaagcaaagcgccttcgacagtgataactaa

SEQ ID NO: 205886 - DNA, 972 bp, Klebsiella oxytoca; identical to SEQ ID NO: 202192

SEQ ID NO: 205887 - DNA, 621 bp, Klebsiella oxytoca
gtgagtggaacgaaagaaaaagcaacgggtaagcaaagcgctaaaggtcgcgctggcaaggtttcagcgcaggaagtggcacaggctgatgcatctgacctgccgggagctgaacggtcagtcacattgccagggcactacgttgcggtgggtgcatcccccgtcagcctgaagcctggcgatactggtgctactgagttatctggtgacgtcattaccttgagtgggggcagtgtcaacattaccgcgccagcggtctccttttcggctgagcaccttaataccgttcaggatgaattactggcaaacctgacacccgaaggtctggccgccggtggcggaactgagaaccttatcaccatgccccctgcaaccgatgatgtggtggtgctggaggttcgcgccagacatgagcgcgggttctggcgctgtggccgtttctggccgcgcgggccagtgcatgtgtttgtcagcgacgatcccgatggcgataacgaggcaaatgcgctggagggtgatgtggtcgtggaaagcttcatcagccacgaaaccgcagagcgcctgaaagctgagcctcatctggtggtgacggtcctgcagacggtagcggagaaagactga

SEQ ID NO: 205888 - DNA, 276 bp, Klebsiella oxytoca
atgggagcccacggtctgccagaccggatgcttcagcgcccggccaaacgcctgatgaatgagacgcttatgtgcgctgaccgggacgctgcctgcaaagccgtcctgatgaacgccgctgtagctgagcggcgaacccacacgaacgcggccacgctcgacgatgtactggatgctgtcgagcagatcgccatttccctgcagcaggctctgattaccgctgcgggtcttgcggtaaccttcggaccattcctcccagcgctcgccagccggtga

SEQ ID NO: 205889 - DNA, 582 bp, Klebsiella oxytoca
atgatggatgacccgctgacaggtgagacaaagacggtgcagctcggcagcgatcgtcgtctgcgcaccatctacgataccaacatgcgtactgcccgtagtgctggtcagtgggaacgtattcagcgcactaaacgcgcaatgccctatctgctctatacgctggggccgtcacgcgagcaccgcgccgagcacctgaaatgggctgacctttgtttgcctgttgatgatccgttctggcagacacacatcgggcccaacggctggggctgtaaatgcggggttcgccaggtcagcaaatacgagtacgatcagttgcagaaaaatggcgttccgcgcaacgtgcagcagctcgacgacagcggccagccaaccggccacgttatccgccagaccgtcccggtccgcaccgaagcgccgcccgtcaaacgggtgaagtgggttaacaaacgcaccggcgaagaggagatggtgccggaggggattgatccgggatgggactacaaccccggcatgcgccgtcaggccgaacttgagcgccagttggccgcgaagcagagcgccttcgacagtgatagctaa

SEQ ID NO: 205890 - DNA, 516 bp, Klebsiella oxytoca
atgaaactgataggtaatttgttgtgcataggattcattatttgggttgtttcatttttcgttaaagccgagaaaaaagagcttccgtctaatgaggtgttgatttcccaattcgataatatgggagtctttgataaagacgaatggaaaaaagggagcgtggtagaaggtgtgcaggtatatactgctcgtacagatgataaaatcaccaaaagctcatggctactaggtgtgaagcaagcaggattaattgcaatatctgataagaatgatcctgcatttgagagtatttctgtattagcctcatgttacaaactcgtaaaaggagtattggggcgtgatgataaagacgatttcaaaattgttgaggataccttcagaatggccatatcatctgaacctatagacaatacacgtagtgacacaggtgtgattgatgggtatcggtttaaagtgcagatgggaccagtcgctgcgaatttaaattcatattcgtgctcaatcaaagaaaaatag

SEQ ID NO: 205891 - DNA, 555 bp, Klebsiella oxytoca
atgacccgctcaaatgcaatacagattatccatatcgccaaaagccagctggcgcttgacgatgatacctaccgctctctgctgggggcagtagttccgggcaaatcgagctgtcgtgaaatgaccatcatcgagctgcagaatgttattcaggcactggaggctaaggggttcaaaagcaaacctatgcgccgttctaagcgccgcatgtctgccccgtctgacgtaagtctgaaaatccgctcgatatggaaaacgatgtttaaagagggttttatccgggatggtagcgatattgcgctcgaccgttttgtccagcggcagactcgtatccgtaatggcggcgcaggcgtctccagccttgagtggctgcgcggtgatgccgaagcgaactttcttgagagcctgaagcaatggcacatccgggcgatgagagaggctatgttagcgcaccacgtccggctccctgaaaacccggtcaccggcgaggaaatccgggactatgacacaatctgcagcgcttacgctgacgcagccagaaggtggataaaatga

SEQ ID NO: 205892 - DNA, 1149 bp, Klebsiella oxytoca
atgcagggtaacgtcatcattgacgaagcggcattccagaaagacctcgctgccgtgctgaaagcggcgctggcgctgaccatgtggggctctaaggtccgcttgatctccacccataacggcattgaaaacctgttcaataccatcatcaccgacagccgcgcaggcaagaaacgttattccgttcaccgtattgatattgagctggccattagcgaggggctttatcgtcgtatctgtcaggtgacgaaaaagccgtggtcacccgatgccgaggcggagtggctggcgaatctgctgagcgataccgccaccgaggaagacgcccgcgaggaatactactgcgagccgaagaacggcggcggcacctatctggcccgctccatccgcgaacgagcggcgcgtggctccggccccgttctgcgcttcaccggtacggctgagttcaatgccatgccggaaatcatccgcgcactggatatgcaggagtggctggataaggtggtgctgcccgtgctgaacacgctcccgcaaaaccttcgccactgcctcggcgaggattttgcgcggtcgggtcacctgaccgtctttgcgccgatgaccgtcaacgatgacaccacccgtaccgtgccgttcctggtcgagctggccaacgttccctacaaacagcaggagcaggcgctgttctttatctgcgacaggctaccgcgccgcgacggtatcaagctcgatggccgggggaatggtaactacctggccgaacaggcggcggagaagtacggcgctgaggtggaggtggtcatgccgtccgtcgcccactaccgtgagaacatgccgcgcttcaaggcggcgttcgaagacgatgagctggtcctgccgaagcatgaagacgtgatcagcgacctcgggcagattgtcgttcagcgcggcgtgccaggtattgatgaccgggagaacaccggcagtgatggccacaagcgtcacggcgacagcgcgtatgcgatcttcctcgcctttctcgccagtaaagaggactgccagcgctacgaactgcaccggcttaacactccccaacagcagcgcaacagcgacagtcatcgtcagttgcgtatcacccgtggtcttaaaaatcagcgaggactgctctga

SEQ ID NO: 205893 - DNA, 729 bp, Klebsiella oxytoca
atgtacgtcggcctgagaccgcgaactgccgtcatcggtggtcatggtctgccccagtacggccttactggtctgggcgtcgcaccactccgccatttctttaaagagagcaccaccgccgttacggctggccgtctcctgcatctcaagctgcatactctgagggatagcacacccggcatcagaagcaatggaactgatggcgtcaatgaggatcttaatctgctcatcggaggcattggtcccgtacttgccgacgacgatgggaatgccaaacttctcggcaaacgcccaccagtcacggacggtgaaggacttcagcatatacatcaccgccaccagacgggccagaccgttacgcaggggcagaccggacttgaggcggggataatggataacatacttacccggtgtcagcgggataccatcgaccggttgctcatcggtcagcaggcggaactggcgaagggtctcgcggtcagttttgaggaaacgcgggtcaacccattcgtagtcgcggggtttccagccgtcacgggtgtcccagaggatttcgcagacacccacgcccttgccgagcccgtcaagcaggtcaaacagcagctcaggtatctgcggctgctcaatcagatcgcgtacggcatcagccagcatcacatcatgttcatcgtcgctcgccgcttccactgccggaggaataccggcgacggtcagcttgcgggtacgtaa

SEQ ID NO: 205894 - DNA, 756 bp, Klebsiella oxytoca
atgtatcacctggataatgcctcttccgtacctgatatgcccgccatcaagccggtattatttactgagcgtcgctggtttaccgaaggcggcgacggcattcagccgagttatccgggcgcggactggtttaatgccattcaggcggaaatgctgaacgtgctggcgctggcgaatatcacgccggacaaaaacgcactggatcagttcgctcaggccatccgtattttctcctcggactatatgctgcctccgggtattcctctggcgtggccgggtgcaacagcaccgacaggttttatgctgatgctgggtcagagcttcgataaaaccgcctatccgcgtcttgctgtcgcttatccctccggcgttctgccggatatgcgcggccagaccatcaagttcttgcccgcctccgggcgtgcgctactgtcctatgaatccgatggaataaaggctcacgctcataatgcgacgattagcagcactgacctcggcaccaaaacaaccagcgacgacaacgagcactttcatcaggggggaatggttgctccgggtgaggtctgggacagcgattatgtggtcgggtcagataatgattctcaccggactcgcaacaacaccagtaccgccccggcgcatcaccatacggtctacatcgggccacatgctcacacggccacggtggccagcaccgggaataccgaaaataccgtcaagaatatcgcctttaacgccatcgtgaggttagcgtaa

SEQ ID NO: 205895 - DNA, 282 bp, Klebsiella oxytoca
atgtcatttacaaaaaatgttgaattcacattcaataaaacggcagcaaacggtatctctctaggagaagaaacacagattattgaaacctctttcatagtaagaactgtatatataaccaaagacggtgctacagccgatcttttcagcagtttcgatggggtctcatggcagctctataattcgtttgagttcatacccagttatacatctggtgtagacatcctcgaacaggcagaaaaacagatccaggctgctcttgataccccacctcaggattag

SEQ ID NO: 205896 - DNA, 1728 bp, Klebsiella oxytoca
atgtatcatctcgacaacaccagcggcgtcccggagatgccggaaccgaaagagcagcagtctattaccccacgttggtttggtgaaagtcaggagcaaggcggcgttagctggccgggagcggactggtttaatattgtgcaggcagagttgctcaatgtacttactgcggctggcataacgccgaacaaaacagcatttgatcaactggccaaagccatatctttacttggtgattcgaaaataaggcaagaccttaactctgcgaatctacctggtacatcactaatcaaaacagatacggggcgtgatataggggaaacgctacgtggagcctctggcgtatctcaggctcattttccgcttcttatgaacaaattcacccagtatcgtcatggcgtatcggggtctcaggcacaatatcgattttatggtttcggttcgtctgttggtaagggggctactttgccagacccttcaatacaagcgccgattgctaagttttatgaatattttcaatctacggtcaatagaacaggcatttatcctgtttcgtttacgaataaatcggtaaacggaagcacaatcaataactttcttgccgaccagtggccggaagtcgtcgccgagggagtttatcccgatttggcactttttatttacggtatgaacgatttcccgacggcgcaatataacgcgggccaaacattcaacgaaaacgggtttaagcagcgtcttagaaaagctatcaggctcatacgagatgcaggcggcgatgtggttctaaccacctctccacatccttacattgcaaactactcatggtctatgcctgatggcgtatcacaggtatggcctgagtttgttgcatcccctgtccccgatgagtctcttgatccaccagtgtcccaatcggttactcagttcgtgtggaaagggcgtcctataaaggcaggtgtccgtttccttcggggtaatgatgcaatccgccaaatagctcttgagctgggatgcgtgttgattgatgttgaaaaatattggtttgatgcggttgccagatatggcgaggctgcactattcaataaaggcgaatttgttcaccctaatgaatttggtcacgagcagtcctacgggttagccttccgggattacttcgcgaacatggacggcaatggctggattgcgcccagtgcgaatcattacgatgtgtttgatgttggcggaagcgggttgtaccctcagcccaaaaaagctgacattgatttaatggctaatggtcttcgcgatatcgcttttattcttcgggataagtttgctcgtattctggaatctgtagaccagttgggggcagctacaaggtggtcatacacttcacaaaatcctacaacaggttcgcctggatatagtttgcagtggtatgagcatcactccaggacaggaggtctttataccaccggtgatgtaatcgccattcctattccaaacagactatcaatgaagctttttattgatgtatggacctcagtacagactggttgggcccagactatcgagattattgcagttaaccgcgaaggtgtagtgtcgttcaccatcctgggtgcccacgacaatactccaggcagtaacagattgttcacgctttctgctggctcaggtgtgttaaatatcaatgtattacaatcaaattcatcggtgaagtatcacatttgtggtttcaattcttag

SEQ ID NO: 205897 - DNA, 168 bp, Klebsiella oxytoca
atgcagtctgccgcgtctgagcagatttcactgctcagctacgccatcagcagcggtcaggccactgacgcagagaaagcgctgctggccacctgggaagaataccgtcttgctgtaagccgcattgacaccaccgaaaccgatattgtctggccagagaaaccgtaa

SEQ ID NO: 205898 - DNA, 696 bp, Klebsiella oxytoca
atgccggaaatcatccgcgcactggatatgcaggaatggctggataaggtggtgctgccagtgctgaacacgctcccgcaaaacctccgccactgcctcggcgaggactttgcgcggtcgggccatctgaccgtctttgcgccgatgaccgtcaacgacgataccacccgtaccgtaccgttcctggtcgaactggccaacgttccctacaagcagcaggagcaggcgctgttctttatctgtgaccgcctccctcaccgcgacggtatcaagctcgatggccgggggaacggtaactatctggctgagcaggcagctgaaaaatatggcgcagaggtggaggtggtcatgccgtccgtcgcccactaccgcgagaacatgccgcgcttcaaggcggcgtttgaggatgatgagctggtattaccgaagcatgaggacgttatcagcgacctcgggcagattgtcgttcagcgcggagtaccgggaattgatgaccgggagaacaccggcagtgatggccacaagcgtcacggcgacagcgcgtatgcgatctttctggccttccttgccagtaaagaagactgccagcgctacgaactgcaccggcttaacaagccccagcaacagcgcaacagcgacagtctccgccagttgcgcatcacccgtggccttaaaaatcaacgaggactgctttga

SEQ ID NO: 205899 - DNA, 924 bp, Klebsiella oxytoca
ttgctcacggttgagtgccggtgccgggctgaaggcagagaagctgttggacggcgagagcactaccgcgccggtctccggctcagccagaccaaacttgtcccggacctcagattcctgcacccgcagaccacgatcaaccaggggaataagcgcatcgacaaaggctttgaggtcctccggctcgctgatagccagcttcacacgcgggtacttttcctgcgggccgtagttgaactgaataaacggacggaccagaaactcattgagggtgttttccagctgacgggcatcccagcgggcaatatccatacgcacccggtcatgcacgtcggcctgagatcgcgaactgccgtcatcggtggtcatggtctgacccagtaccgccttactggtctgggcgtcgcaccattcggccatttccttgaacagtgcgccgccaccgttgcggctggcggtttcctgcatttcaagctgcatgctctgcgggatggcgcacccggcatcagaggcgatggaggcgatagcatcgatgagggttttaatctgctcagggctggcattattcccgtattttcctacgacgatgggaataccaaatttctcagcaaaagcccaccagtcacgcacggtaaacgacttgagcatgtacatcaccgccaccagacgggccagaccgttacgcagcggcagtccagacttcagtcgcgggtaatgcatcacatatttgcctggcgtcaggggaataccgtctaccggttgttcgtcggtcagcaaacgaaactcacgcaacgtatcgctgtcgggtttcagaaaacgcgggtcaacccactcataatcgcgtggcatccagccatcacgggtactccagaggatttcacagaccccgacgcctttaccgaggccatcgagcagatcaaataa

SEQ ID NO: 205900 - DNA, 411 bp, Klebsiella oxytoca
ttgcgcggcaaactggtgtatcgcctggccaccgatactctggttgtcgtcgataaactcaaattcgccatagccagaaaggtgctctttcatcgcttcaataaacaatgcgctaggagagaacggcgcgcccaccacacctccgccagtggacccagcccccaggcctatggaggagccgggcgtggttataattatgcgcttcttggttacagttctgacgccattgctgaacgaaattttaccgaatggcgaggtattggcctgagttccgtcaccgataagctttttgctcagtttaacgtaggggtcagtgattgcaccctgcagagtggtgacatcgcttatgagattcagaatgtcggtagtcgggtccccggcatacagcaatttaaagttattctgtggtga

SEQ ID NO: 205901 - DNA, 1092 bp, Klebsiella oxytoca
atgactgaagagttaacccttaacgttgacggcaaggtctggggcggctggacggatatgaccatcaaccgctctctcgacaatatcgccggagagtttgatttgaccgttaccgcccgctggtctgctgcggctcctcgctccatcaagccggggcagtcctgcaccgttgatatcggcagcgaccgcgtgctgacaggctacattgacgactttattcccagctatgactcggagaatgtctccctgcgcgtcatgggtcgcgacaagaccggtgaccttgtggacagttcagtggtcgataaatccggtcagtggaaaggtcagaagctggagcaactggcagccaccatctgcaaaccctacggcatcgaggtggttaacgagaccgacaccggcgacgcctttggcagcatcaccctcgaacagggtgaaaccggctttgaactgctcgaccggctggccaaacagcgcggcgttctggtgacgtcagacgcttacggtcggctggtcatcacccgcgcatccacccaacgggccggagtggcgctaactctcggcgacaatattctggctgcacgtggacgcttcagctggcgcgaacgggccagccagtacatcgtcaagggctccgccagcgcgggcggttcaacatgggacgaccagccggtgaagatgatcggcggccgtcagacggtagtcagcgacccggaaataacccgctatcgtccgaagattctggtcaacgaggacagcctgacggtcggcggtgccagcgcccgcggcgaatggcacaaggctcatatgatgggtgaagccaataccaccgaaatcaccgtcgcgggctggcgtgagaacggtatcagcggtccgctgtggcagaccaaccgactggtgaaggtaaccgacgatatccagcagctcgacgttacctggctgattaagacggtttcctttatggaaggcgatcaggggcgtctgaccgtgctgacactggtgccgcctgagtcgctggatatgcccgaacagaaagctaaaggtaagggtaaaaaagcgaagtcaaaaacgtctgtgggggtcacatgggactga

SEQ ID NO: 205902 - DNA, 447 bp, Klebsiella oxytoca
atggccttcctgatgataaagaataacgtcgccttcttcgccgccacggggacggctccctttatcctcgacggcgatggccaccagaccgccgcgacgtccacccacggcgacaactatcgcctcagagcccgcaggtggaacgctggaaaacccgtagttctggaagcgctcgacgtcgtcattggtctcatcggccagcgactgcacctgcaggttctgccgcccgaggctgtccgtcacaatgcgcaccagcgcccggtccaccatcaggcgcaggcggcgaccgatagcggcgatagagcgggaaaagttagcggcattcagtcccatgtgacccccacagacgtttttgacttcgcttttttacccttacctttagctttctgttcgggcatatccagcgactcaggcggcaccagtgtcagcacggtcagacgcccctga

SEQ ID NO: 205903 - DNA, 255 bp, Klebsiella oxytoca; identical to SEQ ID NO: 78625

SEQ ID NO: 205904 - DNA, 345 bp, Klebsiella oxytoca
atgcagtccggaaccacgatcactatcccggtggcgggttgtgtaggtgatctcgtgattgacaccgcgagggttaccgaccccggcaactacggctttgtcctgaccggggccactatttcttcggtagccgttagcggcagcggaacagcagccaaaatagttatcaccaagaccgactcgacggcggcgacagcgatatcttatgcaagtcagggggttgcaggacaaaaccccgggcctgtgaccggttcgcggggatgtattcgtgactcgcaggctggtaattcgctgtccggcctgcctctctataacgacctctgcgttttctcaattcagctttag

SEQ ID NO: 205905 - DNA, 360 bp, Klebsiella oxytoca
atgccaggcgtcggcaattgcggccacatctgcctttttggttttgttaatagcgacacgcttggcgatacgggagaacagacgggcgaactcaacggtacggttaccgccggtcatgttgctgtagacgcggtggttacccatcagcaccagtccgacgcgggtagcctcctgcaacagacgcagctcttcgagcgtttcagcacccagatggtcggcttcatcaatgatgacaaggccctgagtgccatcaagacggcggcgcagtgcgcgggccagcggccccttacggcgaggcgcatcattcatccccagttcataggccagctcggtcaggcactccagcacactggcacatga

SEQ ID NO: 205906 - DNA, 252 bp, Klebsiella oxytoca
atgtccgccgtgaacgttatccagctcctgctggccaaaacctatgtcaaacgcgaggagctggaattattgcgtacccgtctgcagggcatcgaaaacaccattgcaggacttcccagccagaaggacctgcatcagctgcagctggaaatgagcaacctgcggggcgatttgcgcgaactgggcccggcgattcgccaggtaaaacacgtcagcgatctgcttctggaaaacgagctgaaggaaaaataa

SEQ ID NO: 205907 - DNA, 744 bp, Klebsiella oxytoca
atggtgaaaccgcaacagctacagcgttttgaagacgggaaaaaccggtcgattgcgaccactgaacgcccggcccattcgcctttgtaccggagctggcgcgtgaattcaccccagcctgcgtctgctatcgctttggacaacgacgggttgcggagcatgttcttcaccttcagagattcgacgcaaacaacttggttctcgtttatcagtttgcgggatgctttgtgcagggcatccagacggcaatcggctattttcgcgtggagtcgggccacctttaagcgggctttggcacggttctttgagcctctggcttttttgcttaaacggcgctggagctgcgccaggcgggccgcgtatttagcagtatggcggggattgccggatttaaatccggtatcagtgacgaacaaatcttttaaacccacatcaattccgaccgttttagcggtgatcggcagtgatacgggctcaagctcgcagagacaggagacgaaatatcgcccggcgacgtctctggaaagggtgacggtagatggagtagacggcaattcacggctccagcgcacgtctaaaggcgctttactctttgccatatacagcttgccattgcgatatttgaatgcgctggcggtcaattcagcggcttgtttatggcgcttactttttcgccgggtatgcggcacgcccggcgaaaaagttagtaaaggcggtctgttggtggcgcagcgactgctgtag

SEQ ID NO: 205908 - DNA, 813 bp, Klebsiella oxytoca
atgaaacttaacgattacgctactatcatttcttgtgctacagcaacagtgtccgctatggctgcaatatatgcgatcatccaatcgatattacaaagaagattatcatacaaaccacaattgtacattgaagattatcatcaagaattaaccatgtctaaatacccaatatttgacgaaaaaataaatggtcatgccagtgctagttgccaccgctcaccaataataaatatagggagtgggtccgcacaaaacattaattacaaatggaaatgtaacgtatctaattggttagagaaaacatcaatactacttaaagaattaaataacaattcaaatataaaaaagtacagtccaaactatacattttcatatgatattgatagtacaatcataacaacaaaaatcaatggcagagataatacattaaaattggatttaacaaaaaatttaaaatatatcacaccacaatccaacaccaataaaaaagaagaaatagaattgccatatgcaattaatacaattctatacaatatgattaatttaaaaatactttcaggggaaaatatcacttcattctttggcccaacattaattcttacataccaagatgccggtggtacttttatcactgaccgttttgaaaccgaatttgtccttgggccggcagggaatacaacgcagcatagagaccaacacttaactatcaaattacagaagttagacaatagactctctatgagattacttcagaagatacgtaaagggtacgcggaattcatgagtaaaaatgatttcaataaaaatagatag

SEQ ID NO: 205909 - DNA, 129 bp, Klebsiella oxytoca
atgaacgaagaaactgattaccggggattctggcgcgctgccgttgtgagctgtgttctttgcattattttgttctggctcccggcaatcatcatttcagcttactactacctggaggcccacagatga

SEQ ID NO: 205910 - DNA, 426 bp, Klebsiella oxytoca
atgagctttattcaaacgtttactggcaaacactttaactatctcgatatccagcaggatgccatcgagatagaagatatcgcgaacgctctctcgaatatctgccgctttgcaggccatctgcctgagttctatagcgtagcgcagcatagtgttttaacgagcaaccttgtgccgcaggagtttgcgctcgaagcgctgctacacgacgccgccgaggcttatttgcaggatatcccggcaccgcttaaacgcctgctcccgggctaccgcgccatcgaggatcgggttatcgacgacggcacccactggccgatgctcgagggcattattcccaccgaccaatttgtgataaatcccgtccgcccaggtcagtcttacggcatgttcatgaaccgctttaaccaactgatggagcggtgctaa

SEQ ID NO: 205911 - DNA, 258 bp, Klebsiella oxytoca
atgattcagcaacagttagtacaaatcgtgttttggttgggggtgctcgtctgcctcccgaccttctatcgctttgtgtatgccggatcctctttattatggcgtagactgtttcctacaagagttgttgaaattcgatttttgggctcaaatcacaagattaagaatatcgtaacaattcaattagatagaaaggatggaaaaaaaatcgttgatctcattgaagaggcgacccttgaggataatgccaaaaaatga

SEQ ID NO: 205912 - DNA, 882 bp, Klebsiella oxytoca
atggagaagactacttccttcaaggtattttacgatgccgatgataaagaactggccgaacatgccattgatgctgaagttttaggaaagtcgattctttccatggcaaaccttataagcaaagcagatgatctcctaaatgacgggaataaatcagtaaaagttttggttactagcccggcagagaaaggctcattgggtatagcctacactgttgtacaactgttaccgcaagcagttgatgtacttcagaccattgggattgttggcgcagtaggagccgcagctcatgcatctgctttatcactgataaggcaactcggaagcaagaaagttatttctataaccagaaggcagggtaccgataaagctattcttgagcttgaagatggcgagattgaatgcccggccgcagttgcaacactggttactgagcctgtgattcgtgatgcattaatatctgttgttcaaacgcctttagaaggaaaggattcccctgttttcaaaattgttgacgataacgatcagatcgtattgaagcttgaagatgagcagactgaagagataaaacctctgccacgcggcaccttacttacaaaaactgttgaaactaaagaggttaacgtcaagtttactcaagtcaactttcataacgagaaaggatggcgcatggattacaacaatgaagagccctctgtgctacttacagattatgaatttttagctaaagtaaggcaggcagaaggtacgatcactagtgaagatatgttttctgtccttttagagacaacaagaacggtctcagcgcgtggtaggtcagagaaatacgtaatcaaaaaagtacttcgccaccgggtggcacaaggtaaaaaactcatttag

SEQ ID NO: 205913 - DNA, 849 bp, Klebsiella oxytoca
atgactaaacattctgtagttccattcacattcgaatctcacagcattagagcgattaaccgtgatggtgagccttggttcatcgctcaggacgtatgctctgttcttggtatccagaacgttacgcaagccattgaaagactggatgacgatgaacgatctatgtttaacatagggcgtcagggcgatgttaacatcgtcaatgagtcaggtatgtatacgctggttcttcgctgtcgtgatgcggttaagaaaggatcagtaccccaccgattccgtaaatgggttactgctgatgttttgccatcgatccgcaaaacaggaacatatgccaagccgaaggttcgtaaatgtacagcaaagcaactcactccacttcgccagaccgcagaacggttgatcactactggcctaggcaaaatctatcccgacatctggaagctggtacatcaacgcttcgatgttgagcatatccatcagttgcagcccgagcaggtcggtgaagctattgagtacctaaacgtgctggaaggtgaataccttggcaaacaatctggtcccccagcactatcgcttagtaatgattacagcatggggttcttcaaaccgtatctttggctcattaaagaaaaatcaattcgcgccccctggacttaccctgctgacttactcatccctaatggtgattaccctaacccatgcggtaggttattcgccgagcttgagcagaatggcttcatcgtcgaagctgcacgttttcagctactggctttacagcatcaccttgaggtgtataaaacgagaattgacaaaatccagcaagcgcttgggcaattaacatatcgctaa

SEQ ID NO: 205914 - DNA, 699 bp, Klebsiella oxytoca
atgtttgatattcttatatctcatattgaacaatggagtacattcataagtgcagtcgcagcagtattaacagccgtagctacatttttcctttggcgcgtaacaaaattacttgcgagagagactacccgaatggttgaagcctcatcacagccaaatatcgttgtgactcttgaacctaatgcttggtctgtatattattttgatattaatgtagcaaatacaggtaatgcaccagcttacaacatcgaagttaattttgacccacctttgaccaatgcagaacacagagaagccagacagcactctataccattcagaaaaattagcatattgaagaatggtcaggttttatctagtaacctctgtgattacaatcagataaaaggaaagacctatactgtaacaatcagttggtcaaagaaagccaactcgtctgaaagagaggtcaaccaatacgaatatgacatgacctcatttgagggagttacttatttaggtgcacgaaacccactgacgcaaatagcggaccagattaaaaaaattagagatgactggagacctattacacaagggtctaaaaaaattaaaacagataactatagttcaagtgatagagaaaaagaaagaatagcatatgacgagtggtgtaaaaatgctctagaagaaagagagaaaagaaaagtgagaaagttataa

SEQ ID NO: 205915 - DNA, 357 bp, Klebsiella oxytoca
gtgagcgacaaagatattgagcaggaaattcaggccaaaggcaaaacggcaccgcgcgttacgccgcagcatatcgatagcattattgctgagtgtcattactttacggctggcgaggctgtgcgcgctggctggcctgatcccaatgccgccgatccgattcacccaaacctagacttgcttactatttgcgttctggtgctgcgtaacggctttaccgttaccggagaaagcgcctgtgccagtccggataatttcgaccctgaaatcggacgcaaaatcgcccgcgataatgcggtgaataaaatctggatgctggaaggctatctgttgaaacagaaattaagcgaacagtaa

SEQ ID NO: 205916 - DNA, 3708 bp, Klebsiella oxytoca
atgatggacaatatcgataccgaggtaagtaagatggcaaatttacaagaaagcccaatttgggtagatgggatatatcagttgacagatgagacccccgtcctcggtaaacaagaaaatgttactggagatggcccagctaatctacaggcccagcaacttgcaaaccgtactcaatatttaaagtggatttcagattctcttcaaaatgccgtttatgttggtggtagtggcgtctctttatattctacagaggctgttctaagagcctcagttcctgcagataagcagtacctggccatcgaccagtctaccgggcgatatttcgtctgggatacatccgttattccattgcaagatgagacaacgacgtatcttgccaggctgacaacgcagccgactgcaattcagaaagcagccataaatcgcctctactatgacctgaagcgagcgggtatcctgtcaaaacttgatggtctctgggttggcatcagtacaagccgggcggatgcaacgctaaatctggtcggtcttactctgactctcaacgaaaatggcaacatttcgtataatgctgaatctggctggacatttcatggcaatgactggcttgatactggttttgttccggccgtggcggatgggcattttgtcagagatagtgcatcgtttggcgtactggttgccgggaaagataattcaggcgtatttatgggggcatatgatggctccagtggattaacactctcgcgaacaggtaatttattaaacggcaggattaacaatagccagcttttatctggtgccatatctccaacagggacaactttattctcattatccagaactgataaaaattctgcaaaactctatagtgggaacagggttgtagctattgaccagacgtcttctttttctctgattaattcacctgtaagcattgggcgaggtcgtgattcatcaggatggtacacaagttctaatatctgtgttgcctttattggttctggtcttggtgaaacagaaattttttctctgaatgatgctattcagcggtacatccatacatttcgtcagtccgtttcagctgacggtgtctgggttcagactcagttttctttgctgaaccccgactcggtggagagtatctcatctgaaattgttgcaaaaaaaacagcgctactcagtaacgttataattacctacagcaaatacagcgacatttctgccacaacggcagattcaccatatattcgtgcactggatgaatcgacgggggtgatttatgaaccgtctgatattcccgatgctgtcctcagtgaaaccacggcattcatagccagaatgacaaccatcccggatgccgtgcaacaggtggcgctgaatcagctgatttatttgctcaaaaaagacggcgtctgggacgcgctggaggggctgtggcttggcgtcagcacgagttatgctgattcattgctgaacgtggttaaaaataaatttaacctgaccagcgataatgccccttcctggaatcagtccggtgggtggacgttttcccgctcaggtatgacctggctggatacggggtttaatccctcacttgccgcaggaaagttcgcccttgaggatgcctcctttggtgcattgctttttcccccggcaggaatgacggcaacaggtcacatcatgggggcattcaatggcaccgacgggatggcgctggctccgcgcccgtcacaggcaaccagcagcccgatggcggtacgactgaaccagggtaaagcctacatgccaggtgattaccctgtcgccaatgctgtatacggggtttcccgtcttaatggtgagcttgccgtatatcgtgaaggtctactgctgggttcaacgacgcagacagcgacagccctgacaaattcgaatgtattgctgggatgctctcagaaaacagccgggtatcatatgtttgatggtgctatcggtgctgcatgggtcggggcatccctcaccgcaaaacagatgctgaccctgaccaatgccatcaggcgctataacgatgtatttcgcagtcgcatgtccccggacgcctcctggtggtcgccgactgaccggcggatgtattcacaggccgatatcattgctattgccgggagcaaaacaggaagttcagtgcttgaaccgccagcctctgaggccaccgtgagcgccgatatcagcctggcactcagtgagcaggggcagacgtaccggggcgggtatatcgaaatccagcctgattcctttatcggcggaaccgaacccgcgaccgacagtaccactgagctgtgggggttcccgcactcgcttaccctgtcagagcagaaccgtctgcggagcatgatgctgcccggcaacgggtatggtattcattatattcgtctccccctcggctttgcctatcgtggttttcgcaacatcgataccgcgaccgggctggcgaaaaatatcggtgagcggtatgcggggcaaaatgccggcctgaaaagactgatggctaacattgttgatgcggggggcggtctggcaccggaatactggtgccctgcaccctactggatgaccaacggcaaatacgcgggtacaccgtcagcgtataaccagccgtgggccgggggttcgtatccccgaaaaacgaccctggattcaattaaagggtcagacccggagcagtacgcggcgcaaatcgacgcgatgtcagatgcaatgctgaatgacttcgaatacctgcatcagaatgttggcccggtgcgcatgtatggcctgcagaatgaaccgcagtacggccacgagttgtatggcgtgtgcaaatacaccgaccgcgtatacagcgacctgctggcagcactgcaaccgaaaatcgcagccagcgctattctgtcggaatgggaaggccaggaaaacacgccgctgttacacgtggcgtcagataatgactggcatatcgggcagacttatatcgaagcacaccccgcaaccatctggggatacagccatcacaatattaccgccattgccacggacgccgactggttaaagtcttcgacgtttattaaccagaaagggggcaagaaaaacgttttcgtgaacgaaacggaatatatgcacccggaaaacagcagcaatgcgtggaagtgcgccaacaatatgttaagggatgttcataacctgacgtttggcggtgcggaagttgtcatgccagttattcacctttgcaaacaactgggagaaagcaccagttacacctcaaacactgacggctacgccattatgcgctgcaaccttcctcagcagtatggcgtcgctcccggcgcgtcaggtaatgaggatttcatcggttacggtggttttggtgaaaatgcctggaactataacgcctaccgtctgacggccgacaatctgcctgtaggttccattcgcgtgggaggtcagccgacgatatcggcagcgggaattggtgttgcggcattcagggcgggcggcaaaattaagctgttcctggttaaccgtaacgctggcgcggcagcaatcactgtgtcacttggtacagcaaaaaccctggcgggcagacattatgacctgtcacatgccggtgatgctctgacgtccagaaccggcagtaccattacatttgtgctacctgcatacagcggccagtgctggtctgaaaggtga

SEQ ID NO: 205917 - DNA, 798 bp, Klebsiella oxytoca
atgagggaaaactattattatggtcagggtaaggtgttcctggcacccagagataataaacgcgcattccgttgggtcggcgatgtttcatcattgaaaatagcgttttcgtatgagcaacaaataacaaaagcatcacgtggcggacagctctatcagaatcagcgaatcattaccggagcaagtggttccatcagttcaacctggcataatttctcggttgaaaatctggcgctgttattgggtgctcaaccggtggatgaaccgttttcatttaatgagcagttcgccttacctgatgggatcgttaaaggggatattatcgcgttgccccataccacgatttttaacgtcagtattcatggcctggaacgcgatgcagattatgtcgttgaccgccagttcggcacgattgaatttctggccacacctgacgtcacgggtatgattgctgaatacgatcatctttttaaccagtggctcccgtttttctcagtgaaaccccaggagttttatttacgctttcagggtgtgaatctggcagaggattcaacaccagtactgctggagctgtacagagtctctgttgatcccctggcgacattagaaatgattagtagtgggatggacatcgcaggcatggatatgacctcactaatactccctgattttaatcagcaagcctcttctgtctttagttattttggacagattcagcttgtaactccgcaatctccatccctgacgtataacggacgggctgactatgatggacaatatcgataccgaggtaagtaa

SEQ ID NO: 205918 - DNA, 144 bp, Klebsiella oxytoca
atgcgcgccaatttttcccgccaaaaatttatcaccgctctcatcgttgctttaccctatctcgttcaccttactgaaaactctctcgattctgttactaacttcggctggatggtaattgcgctgatggatcgtttgcaatga

SEQ ID NO: 205919 - DNA, 252 bp, Klebsiella oxytoca
atggttttttatcaactaaactatagcaaactattcttggttatgtcaaccacaaagtctgttaatttattttgttgttataacaataagttaggtgggggagtgtaccgatacttgcatgtgaaaaaaattctttcagagctatttaacgaaatgtggctctccgctgatgaacaagatttggaagaaagggggcattgcgccccctcgtatcattcctgtaaagcccgtagccacatcataagcaaatga

SEQ ID NO: 205920 - DNA, 135 bp, Klebsiella oxytoca; identical to SEQ ID NO: 99797

SEQ ID NO: 205921 - DNA, 195 bp, Klebsiella oxytoca; identical to SEQ ID NO: 99800

SEQ ID NO: 205922 - DNA, 1854 bp, Klebsiella oxytoca
atgcttgagattaacacatctaaaattaataacacggtgacattcaccgttgatcgtaattcaatgaagcaagctatggacgctttcgaccaaattcagaaaaaagcgaaaggcatgaaagaccctactttgaacatgaaaaaattcaatcaggggctaaagtctgctgaaagggaattagatcgcattaataaaaaagcgtcaaagcctcgtgataatagccagcgtgaagcagagcgagcagcaaaggcgaaagcgagagcagaggcacaggcagcgaaagaggccgcgagaaacgcgcagcgccgtgaacgtgcagagctaaaacttttggatacagccagtagctttaaatcaatgcagcacctaaccaatgttgaactaacccaggccgcgcttgcagcgtcacggatcaccaaagcctatgccagcggcacgatctccttacagcgtcagaacagcgagattaagcgcttacagcagggttacagacgcattaacgctgaacgtaggcaagctgctaaacgaggcgctacggctcccgctggcggctctggagcgattacaggcggcttgatgggattaggcactggtgcgcttgctggcgctggtatcggtgcggctgcgtatggtgcttattcatgggggaaagacgctgtaaccgcacaggaagaacgtagcgagattgtacagcgtgccagattagggaatgttgacgttaacgcattagccgcacagagccaatacgctaccgctaacgggattgattcgggaatgggtattcaaggtcagcgcaaactccttgataactataaggacattcaggatcgcatcggtcaaactctcaatgaggctaaatacgataagaaatctggtcaatacaaaggtggtgatcaggggattctgtcagcagtgaacactgccggattcacgatggacgatttacgccgataccaaacaaacccgatgggctttacctctgcctatgttaacaccttggaaaaacaagggaaatcctcagagcaaatcctcgcatctttggaacagcttggtgatgacatgggtttgtatgtgggtgctttccgcaatcaaggtaaggcactcactgatcaggtggacgtgctcaagcgtaacgggcaatggttgaaccaggaacagcaagatcagcttgtagcctatcgcaagtttaatcaggaaatggacattcttaacgatagtcagaaattagccttctttgaaggtttcatggagtctctcgaccctgcgacggttaaagagtttaaggaagctatgcaggaggcgttacccttcttcaaaggcttagggaaagcggcgggtgatgtagtagacggcttaatgaagctaactaactggattacaggtaagctgaatctcctgaacggtgacaacaccactaaagaggcggtaagccagcattacggcacaacgtcagcacctgcacagcctggaagtaatccagtggctaacgcctacggagccagccagcctaaagccacacatgagcataatgtgtttgatacggtgcgcgaatggtggaacgggacaagcgacgctaaagacgtgagcagctacgcacagggcgctaacggtgattattctccagtctcgatgttgaaacaatccgcagcggctacagcaacaccgccagttaataatacagtggtgcagccagtgctattacaaaataatctaccggaaggaatgatctctctcactatttcccctgatccgacattcggaaacatgctaaatgctaccgttgatcagcgcatcaatcagaacaatcagcgtatggtgctggctgtttcatcgggacaagggacggggggctaa

SEQ ID NO: 205923 - DNA, 846 bp, Klebsiella oxytoca
atggacgagagtactttagataaagtagcagagtttatttgcgggaatggtgaacagtatcctgagtaccgttccagttccaggttgacagctttttttgctcgggtagggctccctcattttattcatgatggttctactcgacaaaagtgggtactggaatgcctcaaagcttgcagtcgtgaggagctggcatctgtgctaaaacgcctggcatccccaaaagaatatgcaggtgaacggttgaaaattaaaaatgcattggatctgctgaatgaaattacgtatgtcgaggggttcagaattaagctggttgggctggagccaacatttgaaaaaatagcgatagattactctgacaataatgatgaaagagcgctgacccctcaacctgcaccggatttcttgtctcttggtcttgagagtggtgtcggagaaatacttataaatcgatgggaagaagtgcagaaatgtgttgatgctggggctcatttgtccgcaattattattatgggcagcatgctggaaggattattactaggagtatgtcagcgaaaccctgctgtagttaaccgatgtccatcagcgcctaagcataaagataacggcaaagtgaagcattttgccgaatggaagctatcagaacttattgatgttgctcatcaggtagggtggctagatatggatgtcagaaaattttcgcattctttaagagacttccggaatttgatccatccctatgagcagatggtaacaaaagtttatccagatgaagatacttgtagtatctcatggctagttgttcaggctgcaattaatgatttagccagagtgatgaaagcatag

SEQ ID NO: 205924 - DNA, 549 bp, Klebsiella oxytoca
atgacaagaagtaaagtgaatctaaaaattctgttctggggcactattattgggggatttatgagttccttgataaagtccggaactgaagccaatatgccacctcgtatcgctggggagatatcaccaccagcggcccatatagacgcctggcttgggtgggcaggaatcaactcccattcactggattacgtttatcagggcgtaactattccgggtgcagtcatgctatatcactggttgttcagctttgcattcgccttcctctatgtcctcatctctgcatactggccaaaaattaggttatggtatggcgctgcgtacgggttaatcattactatcgttatgcatggtttccttattcctgcattaggctttagacatccagcttatttaaatggcgaaattggctggttatggaaccttaatggctatgaattatggagcgaaatattaggccatatatgctggtctgtatcgattgagatttgcttgattgccgtgctggcttacttcgcaaggccaatcaaagggaaatggatcatttga

SEQ ID NO: 205925 - DNA, 1002 bp, Klebsiella oxytoca
atgagcgaaataatggatttagtcgtcatcgagaaaaagaacgcgatggcggttttcaccaataacgatcagctcgacccgcttatcgaactaatcgaaaaagaggctcgcagtctggtaccggacgtgaccaccaaaaaaggccgcgacgctatcgcatcaatggctcacaaggttgcgcgctctaaaacttacatcgacaacgcaggtaaagacctggtcgctgagctgaaggctctgccaaagcaaatcgacgaaagccgccgcgttgtccgcgaacgtctcgatgctctgaaggatgaagttcgccggccgctgactgaatgggaagccgagcaggagcgcattaaggcagaagaagccatgaacgcgctgcacgccgaagcgctggaaatgaacatcaagttcgatcaggagttggcggccaagttcgaagcggaccacgaaatggccctgctgatggataaggatattgaccgcgaacgcgcagataaagcagccgaggcagaacgccagcgcattgcccgcgaagaagagattaagcgccaggcggaagagaaagccaaacgtgaagcagcagaaaaggcacagcgtgaaattgacgctgcggctgccagagagcgcgaggcgattttggcaaaagagcgcgcagaacgcgagcgaattgaagctcagcagcgggccgagcgcgaacagcgagaagctgctgaacgtgctgagcgtgaaaaacaggccgccgtggaagcagagcgccgcaaggctcaggaagaagccgaccgcatccgccgagaggcagagcagcgtgaacaggcccgactggctgaagagaagcgcaaaaccgaagaagaagcgcgccgcgccgctgatgttgagcatcgccgcggaataaatacagcagcggtacaggctcttatcgatcagggaatcccttatgaatgggctaagtcctgcatcattgctgtggccctcgggaaagtcccggctacaaccatcaaatactga

SEQ ID NO: 205926 - DNA, 777 bp, Klebsiella oxytoca
atgggaaatgtaacgtgttcaacagtaatatctaagctcgggtttgaatgtcacccaatgagcgacacgttgctgcgcgttgttagcccatttacttattatgacgatagcgagcacattagcgtctttgttcaagaaatgagtgggcagtacaggataactgattattgcgacacgttgatgaacattgaggctagaggcatccacctgacaaaaaagaaaattgacttgataaggacatcgctcgcatcacaggggatcacgttgaatgattctggcgagatatccgcttgggccgatgagatttctgttgggcaggttacggctagcgtcataagaggtggactgctggcatctgctcaaaccgcagattggtatgcggaagttaaagatgataagtttgaaaaatgcgtgattagttatctaaaatccgttggtcttggcacaaggttagccctaaaagagaaggtgcggggcattagcggacataacatcaccgttccattaaccttaagaaacgagtctccacttgtagctcctaagcggggatttacagtcagcttatccagcagtaaaggctggaatactgcacactcaaccgtaggtaagatagtagatttaagtcaggcggttccagaaatcagcaacagatttgtgattgttgatagtgatgggttaacacctgagttacagcagttatcattgcttttcaatgatacggctttggtgcttcctttccacagcagagaaacttggattgaatcgctagtagcctaa

SEQ ID NO: 205927 - DNA, 543 bp, Klebsiella oxytoca
gtggctaaaaaaggtgactttaagcctactcagaaagaggttgatcaggccctctctcgtccaaaaaaagtaacctttaacggcgttacttggaatgggagcgagggtcgcactccgatctggtttaagttggatctcaaggcttttgatggtaatggcaacccaataacaggcgtaagattcatgttgcattggcgtgcgcctatcgttgaaggcgttgatatcgtgaaactttcttttgttatgttttttcatgataagcgaatttatgctctagacccttacccagctgacaataagcctcaccgcaatagatctatcattaaccatccggactttgttgaggttgctcgcggcccgcactatcacatgtacttcgaagaggttggtgaggagatagcactaaaactcgatactgacatcaacccggatgactttttgggctactggaattatttttgtcggacgcttaatatcaattatgaaggccaaccgcctttaccaaatcaagataaatcaggtcaactatcatgggaaatgtaa

SEQ ID NO: 205928 - DNA, 318 bp, Klebsiella oxytoca
atggctgagttacgcgcaggaggcatggcgttaatcattgatagcgccacccctgaagaggttgggcggtgtgttagcctcatcaagctaattcctgttcgcggttcattcacatccccgcaagggcgccctacaaacaatgctggagaaaatccagcgtggcttgtaactggcgacgttaaagcgcgcttgggaggtgattcacctatatgggccgggaatggctgggcgctttacccgtcgcagtatctgatgcccatcgacggagacgacttcagcaatgaagaccagcaccagaaggagcgggagcatgcctaa

SEQ ID NO: 205929 - DNA, 693 bp, Klebsiella oxytoca
atgattaacactcaatacctccagtatgttcgccagcagctgatagtggccaccgccgatctgagcggcgcgacgaaagggcaactggtagcttttgctgagaatgctcaattcaccgctacggcgcgcagccggggaaggaagaaagtttatagcgaggtcaaacaacgcatggttaacccggatgggccgccgatggccggcagccagtcccgcgccaaaggttccgcaatcgccctcgttatgcccgttgagtactcgacagccagctggcgccgcgcgctgctgtcgctggaagagcatcagaaagcctggctgctctggaactacagcgacaatatccgctgggagcaccaggagacgatcacccggtgggcatgggagcaattcagcgagaagctggccggtgcgcgtgtcgcaaagaaaacggttgatcgcctgcgtcaacttatctggctggcggcgcaggatgcgaaagcggggctggctgggcgtaaccagtatcagtatggtgacctcgcggcgatggtaggggtgacacccaagaattggtcagaaacattcacagctcgttgggaggcaatgacaggcatcttcatagcgctggatagcgatgctttattgcaggttacgcgatcacgttcacaacaaaaggcgacaaatttagactcaagtcttgcaaaactggattaa

SEQ ID NO: 205930 - DNA, 327 bp, Klebsiella oxytoca
atgatgagttattttttactgagctactcagtcatcccccagactgaatactcaggtgatattgataaggcaaacaaagtcaggagagccatcgctgacattaacgtttggaacaagtcggaaaaaaatgaaactacctttatgggcattctaactatcgaaggtgataatgatagcgcgctccgccgtagttcaataaaaaatattgaggcagttttcaagccaattttgaggcagtacaatgcttcatcttatgatgttgtcatctattgctcgataatggttgaaggcatagcaaaatattttgagtttgatgtttcaaactaa

SEQ ID NO: 205931 - DNA, 582 bp, Klebsiella oxytoca
atgaaagaaatcgatattggttatcttaagtgcattctagactactgcccttcgacaggagtatttacttggaagaaaaggtcgagggaagaattctcgtcacaaagagcacatagtacttttaacgctaagttcgcgggtaaacagtgcggctcattaactaataaatatctgacaatcaggataaacaatagcctctactatagccatagattggcgtgggctatgcattatggcgagtggccagttggtgatgttgaccatatcaatatggacaaaactgataatcggatctcgaatcttcggcttgccagaaggcgagataacatgaataaccttactgccacaaagtcaaataatagtgggtttattggggtgtactgggctaaaagagagcggaagtgggtctcaggaatcaccatagactataagtttcaccatcttggttactttgatgaccctgtctcagcagcaagcgcatataacgcagcatgcgaaaaggcaaacgggcgattctctaaagagaaaataaagcacaatttggagcaatccttgttatataaagcgaacggttctaattga

SEQ ID NO: 205932 - DNA, 2613 bp, Klebsiella oxytoca
atggcaagcgctgaacaggttggcaatatcgtttacgaagtagagatgaatgtcgccagacttatcgaagcccagcagcaggttaataagcgtcttgaccaaatggacgccaagtttgaacaatcatcacgatctgccgggcgcttcgaaggtgctttaaataaagttggcgttgccattgcagcagctttcaccattgatgcagcgaagaagcttatcgccatcggcgacgagatggttactctacaggcgaggatagctaggttaagccccagtattgatgcagctaaagatactttagcctctttatctgctattgcatcacaaacaggaagcgggctttatgagacggaaaaattatgggaatctttaacaacctctctcaaggaaacaggggcaaccaatgctcaagttctatctttgacatcaactcttcaaaagattgggacgataggagggtcatctgctgaagagatgagtaacgctttgcgccagtttggccaatcgatggcgaaaggcgttatacaagcggaagaattcaactcagtaattgagcagatgcctgaacttgcgcgccagattgcagcggggctggggatatcaatcggcgatcttcgcaagagaatgctggaaggtaaactgacggctcaggatgccctgaacgccattcaacgtcagtcgcagtcggtcaatgaagagttcgataaaatgccggtcagcattgatcgcgcaaagaacagcctcgatgtggccttcaaaaatgccattaacgacctgaaccaggcaataggcctgactacgacccttgcaggattgatgcagagcgtcgcggataacctcaattactacaacaacaatgtcggcgattcttcaagaatgccgaagctgatcaagctccagcaggatctgaacaatgagctgaaagacggccagagatggtatgaaactgactcagtttttcaggccagaagggcgcaggcagcagtgcagctgaagcagatcgagggggaaatagcccacattcgagcaaaggctcagaaagacgccggaagcaaccagtttaatgcgccgccgaccaaaggcgatgacgccgcaaccaagaagctggttcaaaactctgaacgccggcttgcattggccaaacttgaaggcgaggcgcgagccaggcttcaggcccaatatgatgcagctgatgctggggtgaccgatccgaagcgaatcaaagcgctgcaggacgaatacgccgaaacctaccgggttacggaggccaggaaggaaagcgacaaagccgggaagcagtctgcttccaccgctgagtctatagctcaaaaactagaaaaccttcgccagcagtctgagcttgcagcggactcaactcaggaattgagccgtgagcaggcgatattgcgtgcgcagcagtctctcggtaaatcggctactcaggctcaaatccaggaagcaggcaaatatgcagcagccgcatgggatgcagccgcagcggcgaagggggtaacagaggcgcttaatgccattccggaacatgcggagaataaatcctacgctgaatccatgcagaacctgaaagcggcgctgaacgccgggaagattgatcttcaggagtacaacgcagccactgagcagatggagcagcagcatcaggccaaccttgccaaaatacgctcgcagcaggtggttaaccccacccagcaggcacttgccgaagttgacccggtgcagcaactcgctaaccagcacgcgcaggagctggcgctgattcagcagtttgagcagcaaggggttctcgctcatgagaatgcattggcgctgaaaaatgccgctgaccggcagtatgagcagcagcggatcgcagctcaatgggaaatcctcagccagcagagcctcggttataacatgctgacgagtgcggtggatgcctttagcgggaatgcctccaatgcaatcaccggcctgctaaccggcacaatgtcagcgcaggaggcgatgcggtcgctcggcaacaccatcctgaacagcgtgatcaacagcattgtccaggtgggcgtagaagcgctgaaaaactacatcctcggtcagacgctcggcgctgcatcggtggcgacatcagtcgggctggcggcaactaccgcatcggcctgggctccggcggccgcgatggcatcgctcgcctcgttcggtgctaacgctggcccggctgcagctggtatcagttcgacagtagggcttgccagcgggcttgcgcttgccggcgctcgctacaacggcggcccggtatcagctggcggcctgtatcaggtcggcgagaaaggtaagccagagatttaccaggccagcaccggcaagcagtacatgatccctggcgataacgggaaggtcatcagcaataaggatatgcagtcaggaggagggatcagcgtgcaggtgaacgtcatcaaccagtctaccggcgccaccgttcagagtgccaacggctacatgcaggacggtagtgcggtggtggacttgctgatcaccgacatggaaagaggcggcccggtatcctctcagatgcagcagacatttggactaagccgcaaagcgcaaggtgcttactaa

SEQ ID NO: 205933 - DNA, 573 bp, Klebsiella oxytoca
atgcgcgcgtctccctccatatccacttttgctcccgggggctgcgctcaacgcgccttgcccgggctacagattcaccgccatctgcgaatcggtagcccggacagatgcgcagcatcgcctccgggaaattcagctactctgcgctctgttcccgggggcggcgcgcaacgcgccttgcccgggctacagattcaccgccatctgcggatcggtagcccggacagatgcgcagcatcgcctccgggaaattcagctactctgcgctctgttcccgggggcggcgcgcaacgcgccttgcccgggctacagattcaccgccatctgcggatcggtagcccggacagatgcgcagcatcgcctccgggaaattcagctactctgcgctctgttcccgggggctgcgcgcaacgcgccttgcccggtctacaggttcagtgccgtctgcgggccggtagcccggacagatgcgcagcatcgcctccgggatcggtctcttacgccagcagtttctccaccagcgccgtccacagcgccacgccgtgcggaatcagctcatcgttaaaatcatag

SEQ ID NO: 205934 - DNA, 189 bp, Klebsiella oxytoca
atggctcctctgactgggatcgcctttgccattaactggctaaaaaataagctaaacctaaaaccactctctgtcaagaccaccagaatgaccaccaataggtgtgggttacataaatcttgtttgagcattccgatgtacataacgatcgttactatgcttctacataacctcatgagcaaaaaatga

SEQ ID NO: 205935 - DNA, 777 bp, Klebsiella oxytoca
atggctcgaccactaagaaaattaaccagagaaggtgtggtttatactcggcgagaaatcgttgagggtgagatcaatgaacttgaaaagctcagtgatgatgatgttgcaagcaggggtgttgtttggcctaaaaacacccctggttttatctcgagtgaagctttactttattttgtacgtaatacgggtaacccttcacttcgtgaaaccttgcttaatgctttgctggaaagaattcatcggaacctccctaagcccaatagcctggatggaaaaacagcgtcgatgagcagtatggcgatccgggacaaagtccgtgatgatttcatagacctactattgatagatcaagctgattacgatgatcgacttgactattttgaagtcaattttaatggcgcgttggctagagatcgagttgatgcgaaaagacatgttcagtctgaagaaaaccgaactcaagagcttggttgtgaagacgaagagatctcgccagaggttgaaagagcgatagaatcctacgatcccttcgaagcatatgaacttgacaaagaaagttaccgacgaaggttggatgccgcgattaatgcactaccaccacttcaacagcgcatcgttgagatgtggcgtcaagaaatacccattatctcaaaagatccaaatgaaatgacaataagtaaggcattaaaaaagtcggacaaaaccattcgtactcaccgcgattatgcatttgcaacattgcgtaaacgccttaaagaaaaggagaaggtatga

SEQ ID NO: 205936 - DNA, 567 bp, Klebsiella oxytoca
atgaaaaatcagactatttctcgtgaagatgtactgagagatttctcagttgaattcgacgctggcaaagaaactttactaaggtatctgactgaattccctgaatatgcggaagaattggtcgacctctcgcgcgaactggctcgtgaagttggcgatgatatgctgcttactgcgactgatgtgttgagtgttgaatcggcgatggagcgtttccgtaccggtcttacccagcagatagtacaagtgaatatacctccactgcgtttctcagccgcagcaaagctacttaaccttccaaaacaggttttaattgcttttggcggaagaagagttgatttagcctctattcccttacattttcttagtagccttgcggaatcgctacaggtgacaaccgtgcaactaagaaattttttaacacaaccgccacaaacacctgttagccgaagttataaatcggatgttaagcccacaacaccaaccagaacatctttcgaaaaaattctacgtgatgcacaagtttctgaagagcgtattcaagaaataataaaaggagataaatga

SEQ ID NO: 205937 - DNA, 3384 bp, Klebsiella oxytoca
gtggatgctatcgagattgcgcgccagcgtgctgagcaactacattatgctgctatcagcagaggtttagatccctggaagccttatgattttgttgttggtgaagctaattctcgaagtatcgatgtagaaaaatgtttacaaggttctgatgagctaaatggtagccgtgcatttttcgatagtgcttataggttaattacacatgaagactctggttcattgttcgagcaagcatttctggttgcacacgaaattgggcatgttgagttaggagacgatacgcaggatgaatatgtcatcgatatcgaccctgcgcgtacagcagaacctacgccatcgggaatagaccgtgttgtagattatagccatcgacaacggcgcgaagttcagatggatcttttcgccagggagtttctgctaccgcgttcggttgttaaaaagttacatcttgaatgtggtatgagctgtagtgatatatccagcaaacttggtgcacctttcgatgttgtcgcccaacagatgcttgatgcaatgctacttccaatggttgagcttaaaccacgccagcccgaaccagatatgtcgcttaatgacaaacaaattgaagcggttaggcacagagggaaagctttcttgctccaggcggggccgggtacaggcaaaacgcgaaccctcgtagcgagagtggaaagtctgtttaatgatggaattgatccccgacgcatacttctgttgacgttctctaataaagcagcagcagagatgtctgagcgtatcgcccggaaacaacctcatgcggcagcggcactctgggtgggaacttttcatggctttggtcttgatttgctccggcgtttccatgatctatgtgatttacctgcggagccccgcttaatggatcggtcagaagccgtagaatttctggaagaagaatttttacgtcttaatctcgtacattatcgtaatttatacgacccttcccaaaatattgttgatattctgaacgctatctctcgggcaaaagatgaagttacagacgcattgcaataccgcacccttgcccaggaaatgctcaatagtgccagtagtgctgaagaacgtgaaactgccgagcgagcgttggaagttgctgctgtttatgacacctacgagaagataaagaaacagaggggatgtctggattttggtgatttggttatgcgtccggtacaattgcttgaaacaaatgaggaattgcgccagcaattgcagcataattatcaacatgtaatggttgatgaatatcaagacgttaacagaagtagcattcggctattaaaagctctcaaacctgatggtgaaaatctttgggtagttggtgatgccaagcaatcaatttaccgttttcgtggagcatcatcatttaatatatcgcgtttttgtgtggatgactttcctggcggagaatctcaatcacttgagattaattaccgttctgtttcagagattgttacagcattttctgagtttgcgtcagaaatgaaaacggggggaatcaagagccaccttgcggcaaatcgcccagcgtcgggattactgcctgaaatacaaacagtagaaagcggagatttggtaagtcccgctttagttgagtctattttgcgaatgcgagaaattggatttagttatcgtgatcaggcggttttttgtcgtggaaatgaaaaactctctgcgttagggcaggatctggaacgattaggtatcccggtattatttctgggcagcctttttgaacgtcaggaagttaaggatcttgtggcgctagtttctcttctgactgataaacgagcaatggggttaattcgcattgcatgttggccggaatttcagatgccgatggaagatgttactcaggtgctggaacatttccgtataacagataatgagcccggaaactgggacatatcgtcgctgtccttatcgccggagggattgtcctcgtttgagaaaataaagaatgtactacatggctttagtagtgcttctcatccatggtccgtgcttgctacggttttgttagatcgtacgcgcgtagtggctcaaattgcaacgtcggaaacggttaatggacaggctcgcggtattgctatctggcagtttatgaattttgcccgacagcagttcagaggcagtggttttccggtaataaaaatgatgacgcggatacgtcgtttactcaagcttaacgacgatcgcgacctcagacagcttccagcagcaactcaaaatattgatgcagtcaaattaatgacaatccatggtgcaaaaggtcttgagttccctgttgttcatttaagtggggtgaataaggatacgatccctggttcatatagaggagtgaaatgtcctccgcctgagggtatggttgttggtgggaacggttcgtctgaagatatagccaaagaagcccatgagaatgaacaagaatgtcttttttatgtggcaatgtcccgtgcaaaggatcgactgtttttttacggtgcaacgactaaaggtcagaacaaatccttgcgtcgactttccgactttttggacagaatggggcctgtttcgcacaatgttacaactcccatattaaagctgcctatagcgccagaaaagacgcctctacctgttgaatttcagggggacgtgaatttcagtgctaatgctttggatttatataataactgtcccagacgttttctttatacacatcttctgtccatcggtggtcgtcgacaagaaacggcatttatgcagatgcatgaagcggtacgcgatgtgcttcagaccataaccagactgggtaacgctcacgcgcttgactggcaacctattctggaaactgcttttgtaaagcaggggttgcataaacatggttacgtagacgactatcgcaatattgccgaaaagatgctcaccttctttacccagtccagaaagggtgcatcagttgaaatgttggatgagttcgtgttgagccttaccgatgcgaaggtaacggttcgtgctgatgaaatgctgatacgagatgatttgcgtacgttacgttgcatatttacagggcatgcccccggagcaggcccgaaaggtatcagacatgaagcgttttcacttgccacaaagaacttttttccaggttcatcagtagagttggtctacttagccgataatacggttcatcctctcaaccttaagccgcaaacactgaacaaatgcgaaaataaattgcgagagatcctcactcgcatacgtagtggcgattttaaaatatctgactctacgtttagctgccccgggtgtcctgcgttttttatctgcggtggcgtccccgcaggtctactcaagaaaaaattctaa

SEQ ID NO: 205938 - DNA, 756 bp, Klebsiella oxytoca
atgaattctgttcaaaatgattttgatgatgttggcgatgccgttcgtgagaaccgtccgttaagggctgcacgtgaatatcgcatcagcgtagccattgaaagcgtagattttcagccagctttcgtttctgatccggtacctaccggtcggcagattttgtctgcggcaggtcttgacgaccgtgatgaaattactctttgtgcgatattgcagtccggtgattttgaagatatccgacttgatgaaacctttgatttacgtggacggggtgctgaacggtttattgctttccgtaccgatcgggacttcaagttaacgcttgatgatcgccagcttgtatggggtatgcctgctattaaaggccatgttttgtatgtattgtccggcattgggcctgagcaggccgtctttctggaggttcggggagggacagaccgtattattgaacctgatgatttattggatcttactgcaccgggcattgagcattttatcactgctaaacggccggatcagggttacaccattatcgttaactctcgcgaggaatcggtgtccgataaatgggtaacgttcgagcaggttgtgcaactggcatttcccggcgctcccgtcgagtcaaacgttatctattccatgacttatcgccatgcagaatccagaccacatgctggtgagctggctgagggcggtgtcgtcgaagttaaacatcaggggacgattttcaatgtcacaaaaactgttcagtcttaa

SEQ ID NO: 205939 - DNA, 1185 bp, Klebsiella oxytoca
atgtcacaaaaactgttcagtcttaatagtgatttacgccagcttcgcgaagctggctatcatgttcaggttattggtgctttcctggtgatgcgggaagtcccctatgtcaatgcacaaaaatgtgtacgcaaagggactctcgtgacatctctggatctggcgggtgatcacacccgcaaacctgaaaatcacgtaatacactgggatggggaatatccttgcaaagcaaatggagttcctttaaatgaaatccgtcatgtatctcaacactttgattttggtcatggccttactgccgagcatggtttttcaagtaagccagggccgcaagggtatccagactattttgctaagatgtcaacttatgcaaccatcctgtcaggcccggcggcagtattgcaaccggggattagccctaaaatattccggactcctgacgaaactgaaatagatagtgtttttaattatattgataccgcgtccgatcgtgcgggaattggtaagctatccgagaaattagaaggtgagattgtttctattattggtactggcggaacggggagttacattattgatttagtatctaaaacgccggtgcgcgaaattcgcttatttgatgctgatgagtttcttcaacataacgcatttcgtgctcctggagctccactattggaggaacttcgcaatgcaccgttgaaagttgactatttcaagagtatttacgaaagaatgcatcgcaatattattgtacatcctgtcaggttgaacgattccaacctcagcctgataaacggaactacgtttgcatttgtttgcatggatgctggtgaagaaaaaaaagcgatcatccaaaagctggagtcgcttagtatttccttcattgatgtagggatgggccttgaattggtgaatggtagtcttggtggcattcttagagtaaccaccagtactaaggacaaacgcgaacacgtacattcgggacgtatctcttttgctggtgggggggagaaagatatctatgcttcaaatatacaggttgctgatttaaatgcgcttaacgcagctctggctgtcataaaatggaagaaattgaaaggtttttaccgagatctggaaaacgagcaccattgcacctataccactgatgggaatatgttgctgaatgaggatttgaaatgctga

SEQ ID NO: 205940 - DNA, 1293 bp, Klebsiella oxytoca
ttgattattgacaactctgaaacattaagtgatagcccccaaaaaaacgctgaactaacagaatttttgaaacaagcaggaaaaaaattaggtcgtttaattatcacttcaagaaggcaagaaagtgttgaagttgagcatatacttgttgagggtttaaatgagagtgattctgtaaaactattaaataggcttgcagaaatatataatgctctgccaattgtccaagctggtgacagtaaactacgtgccacagcaaacaagcttatgaataaacctcttttgcttgaagcattagtagtctatatatcaagaagtagaatctctattgattcagcagtagaaaatatattcaggaaatctaatgatgatttacttgaatttctttatgaagatgcttgggacagactaaatgacgtgcagagaaaattattctatattatagtatccttgactagtcctttaaacagtacagctataagcagagcctgtcaacttgtcgaaattcagcacattaactttttagatagtttgaaagaaacacattttgcatcaacattagactacggcagtcattatgaacttgaattagtagaacttgctaaacgtttctttgaaaaaaaactatcagaactagatgaatctcaaaaacgtgaagtcattgaactatctaataatgttgacaaatacacccatgaaagaattaaaatagaaaaagagtataaagaagatagagtttcagaggcttttagaagtgaatttagcaaagtcgcaaaagttgcagtagataataacgacttcccaaaagcacttgagtactataaactggcagttgaagacgatccatttaactcagctttgcacgatcgtttttcgtggttcttatccaataaaataaatgacctaccgctagcattagaaatggcacttagggcggtagaattaaatgaaacgaattgtgatgccttggtaaacatagcattaatttactacagacaggccaatataacttcgggtgacgaatatatcgataaagctgagtctcggggtagagccaaatcattttgttgcttaagaaaagccatagctcgttatcactttacatttaatgaaatgaatattgaagagaaaaaattgactcttgatgactcagataggtttttgaaattagcagaaagattttttactcctgaaataccatacgcagccaaaacaaaaaaatcaattgataaattcaagcaacttattataaagagaagattaacccttaagaaacaaatgatgcaaatctga

SEQ ID NO: 205941 - DNA, 1131 bp, Klebsiella oxytoca
atgaaagaaatttatcaaaaagcaaaaaaacatgctgaaacgatggatgtagctgataaatttttatgtttaactaatatccttcgatctctccttcaaacaatatcaatttcggcattagaattatctaaaagtgaaaccagcaccgatcaaatagatatctcaggacttgtagacagattcaaaaaacccacagatggaatgccgatagatatcattgacaaacttacaccacacttacgttctcattatgacaaaagtatatttcccggttggtatgagaaagataaaacctcaggaaaatcactttctatgttattgcaggactgggttatcttcagaaataaaaaacctggccatggcgtattagataaaaaatcaatgcaagagtgggcagtaaggactgatgatttaatagaaacgtgcctaaaaaatttttcggccgtaattccaaaaaatcataacaacactttattcattgacataccatcaggaaagttaaaaattaactttcctttaatttttcaaggagaggcaatagccattagtgaagtcactcaacgacaaggaaattggaaattacaactacagccactaaactacgaatcatctgagttaaaaaccgtttctcttgatgaagaaaatatatttaatagtttcaacgaagccagaaatgaaaatcacaagatagtagaagttgaatgtgcaggaaaagaattcattattgaacacaatatcccaattagacaaacagaaacatttgagggaagacaaaaagaagttcagcttttagtagattggttgaatgacgatgactcaagaaggtgtttaatatatggcgatgggggttacggaaaaactactttagttctggaagcaatgaatcgccttttggaaggtgatctcaaaatcacaaaagaccttccttctttaatatgtttttatacagccaagatgacaaagtggacagaaaatggtttagagcgctttagcactgtacagcctgtaatggatgaatgtattagagagataattaaattctatagccctacattagatcgccaatggtatactgcaaacggattaagtttaatagataaagccgtacaattccttgcagagaaaaaataa

SEQ ID NO: 205942 - DNA, 1260 bp, Klebsiella oxytoca
atgtctcttaccgacgcaaaaatccaagctctcaagccatctgataaaccctttaaagtctccgattcccacggtctgtatctgctggtcaaaccgggcggctcacgttactggtatctcaagtaccgtataaacagtaaagaatcccgcattgctctgggtgcctatcctgccgtatccctctccgatgcccggcaacagcgtgaaggtatccgcaggatgctggcgctgaacatcaacccggtacagcagcgtgccgctgaacgcggttcgcgcatgcctgagaaaatgtttaaaaccgtggcgctggcgtggcacgggagtaataaaaaatggtcgaagaacactgctgaccgtctgcttgccagcataaacaatcatatctttccggttatcgggcacctgtcggtatcagaacttaaaccccgtcatttcattgacctgctgaaagggattgaggaaaaaggcctgctcgaagtcgcgtcccgcacacggcagcacctctgcaacatcatgcgtcatgcagttcatcaggggttaatcgacagcaacccggcggcaaaccttgacggcgtgacggtgcctcctgtcagacgccactatcccgccctgccactggagcgccttcctgagctgattgaacggattgacggttatcaccaggggcgggaactgacccggtttgctgtccaactgacgctgcatctgttcatccgttccagtgaactgcgctttgcccgctggtcagagattgatttcagaaaccgggtctggacgatacccgccacacgcgaagccattgcgggggtacgttattccggccgcggtgcaaaaatgcgcactgctcatattgtccccctctcagaacaggccatagccattctggaacggattaaggaaatatctggcgggtatgaactggtgttccccggcgaccataatccgtacaggccgatgtgtgaaaacacgatcaataaggcgctgcgtattatgggctgggacactaaacaggatatctgcggtcacggcttccgggcgatggcatgcagcgccctgatggagtccggtttatggtcacaggatgcggtggagcgccagatgagccatcaggagcgcaacaccgtacgcatggcctatattcatcgggcggaacatcttgaagaacgaaaagcaatgatgcagtggtggtcggattatctggatatgtgccgaaaaacctacgtccccccctatattcaggggaaaatcaaccagctataa

SEQ ID NO: 205943 - DNA, 1236 bp, Klebsiella oxytoca
atgaggaatcatccatccagaagtcttgatgatatctgtacggaatcaagaatatgtgcacagttgtccacaaatccatccatggatatcactcatttctggcgcgaagttgaatctgctgctcttcccctgatgacaaaaagcagcagcaacacagaaaatcgggaggtcacatttctgtggcgttcagaagaagtgctacaaggcgtatatcttcgcctgaaccgtgttacagataaaaaagatgtcaaaaaaggacttatgactcatatcccttcgacgaatatctggacactgactctggagttacctgcttcatatcgtggttcatactcgtttatagaaattccaccggaaatgccgcaagaagatatttctcagcttggaggtcgcttctcaccgttacccggccaacctgacccgtttaacaaaacatcagaaataaatatacgaggattcggggaatcagtcctttctcttgatctggctcctggacaaacggagtgggatgatacttcccacacctgttccggcgtcctttcaacatcatattcttttgttgcgggacaccaacgccagattcgtttatatttcccggggtatccaacgtcagttcctctgggattactagtattacctgatgcagaaacatggtttgaccgtataggtattacccgggcaatagacatagccattactactggacgtattgcgccgatggcgatccttggaatagacaatattaatgaatctgatcgtgtgaatattctggggggtaacaaagaactcattctcgatatcgcaggaaatttaatcccccgattatataaggattatcctgatatcgtatgggcaggtcgctcgaataccatactggccggacaaagccttggcggtgtcaccgcgctgatggcggccttatatgcaccggatatatttggcacagtaatcagccactccccttcaatgtggtggagtcccgacagaaacactcctctcatgtttacggagaatgatacctcctgggtaagtaaacaggtactttctgcgcttccgaaagatgtaaatattcagatgggggtcggttctctggaaggtgctacagtccctcatgttcagcagttacaccaatcgttgctcgccagtggtttgaaaagtaaactttctgtctataccggaggtcatgattatgcctggtggcgtggagcaattatcgacggattatcagatgtgtaa

SEQ ID NO: 205944 - DNA, 258 bp, Klebsiella oxytoca
atgatttttctctatttagacaaaatacccttatttatattaggtattggtcttcttacttcatttgcacttcctggcagttccgctttagactcgccaaaatttctttgtatttattccagcactatccttgctggtatttcattcatctatcaggtgtttcgtcatggaacaaatacagagttttttttagcgatgctgataactgtttcttttgttgttatgctccctgttatcaaaatgcattttgcttattaa

SEQ ID NO: 205945 - DNA, 345 bp, Klebsiella oxytoca
atgaatggcaacaaagctcacaaaaaaacacaaaacataagcattaataatgtaaatgaagtccaacatcagcagataacagaggtgagtaaagaggatggtgatttcctcactctcctctattccccccagcccctgccatccccagaaaacacagcattaaaagctaattattccatccggacaggaaatactgtttctgaatatcaggatattgcggatacagaatgcaaccagcatattatgcagatagattcagcccaagataaacgagagtatggggatgataattatatttgtggatgcggttgtgaaagttgctgcggctgcggtcatgacctataa

SEQ ID NO: 205946 - DNA, 768 bp, Klebsiella oxytoca
atggattttaacgggctcagctgtttgttcccgggagattaccccgatgattttggacatcagctcagacttgccgaactggtgaaagaaccgatggtactgatgcaggggctgtctgatctctgcttgtatatcggaaaatacatgtttgaccctgacttcacactgatggctcgaatgaaggttgaggagacctttcagaaaactttccatgaagcatactattactgttatctggaacagctgggtatccccacagagtttctaccacaggaagggatacccgatacgttgaaacaactggtcaacagcctcgatgtactggtcaataaacacagcgatcgattgtgctgtccagatacagcctgtggagatgattcaccactgcaaagcctggtggtggaactgattcgccagagccaggcccaaacccacccagtggataatgacgctgagcatgatattcattttatcgaagcacaacagtgtttttcccgggctatccactggctgacgcaggacagtatcagacgtcagatcaatgtttcatccctcctgaaagaaatggaaaatcatgtcaggaagagactgcaacccagaaaatggctgggaaaggcgtgtctgtctgaggggattgccactcttctggatgaacacagcgataacccatattacctgcgtgaggcactttctgatatgggaacccgaatgcaggcattttccagagaagcctttggccatgtaaaccctgtcagaattgcggtgtaa

SEQ ID NO: 205947 - DNA, 486 bp, Klebsiella oxytoca
atgatgtcgcatatacgagaatccatcaggggcagagaggaatggaccgtctatgagcagattggttttgcagtcagttgcatgcttcataaccgtaactacagtctgtatccggtgttaaccattcaatactggactgaatatgcgatacagcacaatcagataaagttcctgtttgattcgcgcggttttccactggcgtatattacctgggcgtatcttgaggcagatacggaagcacgcctgctcaacgatccggagttcagactacatccttctgaatgggatgaagatggaaggatctggatcctggatttctgttgtaagcccggttttggccgaaaggccattgagcgtttatttcagcttcgcccatggggagagggagaagtgcgctggctgagcaggaggaagaaaatcatgacatttcggcccatgcggcgacataaaataccgatggccccggaaacacagaaagaactttga

SEQ ID NO: 205948 - DNA, 213 bp, Klebsiella oxytoca
gtgaaggaaggaggtggtagtaaaaaagtggatttaaaaacaaccataattgctttcgttatcaattatatgtttttttatatccctgcgtcattatatcttagctgttgttatgggtatggtttttttaatttgtatatgttgtttttatccctcgtggttacatcgttatcactgtggttaaatgtaaagttttattttttacagatttaa

SEQ ID NO: 205949 - DNA, 693 bp, Klebsiella oxytoca
atggaaaccaacaagtataacggtgagtatataaaaaagaacagaaatagcaccggctgtttttctatgtttgtattgttttttgctattaccttcactccactatttttcaaaaatagtccggaatttatgtctcgaggacttcttgcacccatgttattcatcctcgaatttattattttagttccgttgtattatttattttttaggaaaagagacggtcttggtattggtaatttcaacttgaaactatttttaatattgttttttataattatatccatccaatttatggtgccatatttattgggtttcaggaaggctgaatcatggagcacatcccaaatatcttatgaacattatattttctggatcaatattcttcctgctatttttatagtgcccatatatgaagaaattgtgttcagaggttgtctgtttaattcctttaaattctggttcaacgggaatgtttatggttcagctgttgttacttcatttctatttgctgtaatgcaccttcagtattctgacatacgaacttttgttatgctatttttagtttcattaacactcattgtggcgagagttaggtcaaatggtatgctaatgtctatattgcttcacatgcttatgaatgttgtggttattggagtgcaatacttagtatatatcaatcacgctcatcaatag

SEQ ID NO: 205950 - DNA, 528 bp, Klebsiella oxytoca
atggcaagactgagaacgcggatgagtaaaattaaagaactgctgcgcctgaaatttgactgtcacctgcccaacaggagcatctcggcctgtctgaatatcgggtgcagcaccgtctctgatgtggtcacccgcttcagggggagccagctggcgtggcccctgccggaagagatgacggaatcacaactcgaagcgttgctctataccggacgggccagcgacagccataaacggatgcccgacttcccgctgtgccatcaagggatgaccaaaatcctgctctggcaggaatatcaacaggaagccggcgaaaacgcctacgggtacagccagttctgtaacctctatggtgagtggctgaagcagcaaaaacgcagtatgcgtcagcatcatgtcgccggtgagaagctgttcctcgacttctgcgggccgacaatcccggttatcaacccggatacgggggaggtccggcaggcgcatatcttcgtcgccatactcggtgcctctaactacacctatatctga

SEQ ID NO: 205951 - DNA, 318 bp, Klebsiella oxytoca
atgagtaagttattgaatttttttctgctgtttgtcctggcattttcagcattcacttatgccggtcagagtgactcaggggacgggtacagactgcagtttacgaatgatgcgaacggtggagccgggcttgccgggaaaaaggcccagcggggcatggatggttgccctggaggcacctctccctcctctaatggaagtactatctccccggtacacatgaggaatgcaatcccgggcataaaagctccccgcaccagaacagtcgtttatccgtggcgcagaattatgaaagggcctgaggtggttcaatgctga

SEQ ID NO: 205952 - DNA, 372 bp, Klebsiella oxytoca
atgtcatacaatgaagatgagaaagtgctagacggtattgattcaaatacgttagttgcggggcttgaaacgtttggcggtaccagtcgagttttggaggttctgtgtgatgccacaaatttactcgttgaaaataacaagcaagaagtgattgaagtttcgattgatttttgtgatgaccctctctttaagaacccggaaaatttacttgaggatcaccttgttcaactgggggatgattaccaagcgtacgctaatgaagaaactggcgtatacaaatcgcacaatggagaagtggagcgggacttcaagtctgctgaagaacttcgtgaagatattgaacatcatttttctaccaaaaaggggcgttag

SEQ ID NO: 205953 - DNA, 552 bp, Klebsiella oxytoca
atgacatcaatcatcggatatgtgcgtgtgtctaccaacgagcagacagtagagaaccagaagcagcagattgctgatgcaggttaccaggttagcaagtggtactgcgatgaagccacaagcggtagtgtgaaggcggcagagcgtaaagggttcggtgaccttctggcttacattcgtgaaggtgataccttaattgtggttggtatagaccgcttaggccgtaacactatcgacgtattatccacggttgagactttacgggctaaaggtgtgaaggttatcagcttgcgtgaaggcttcgacctatcaacacctgtgggtaaattgatgttaaccatgatggctggactggcttcactggaaaaggatttgatcgcagagcgtagaaccgctggcattaaacgtgctcagtctgagggggttcactgcggtagacctaacaaagtgacgccagaacaggttcaggagctaattagctccggtttaccaccaaaggatattcaaaaggagttgggtatcagcaaggctactttctatcgtctgaaatga

SEQ ID NO: 205954 - DNA, 372 bp, Klebsiella oxytoca
atggaattcatccaaggcaaagactgctttaacgagatggcaactggaatcttggtgaaactgtttgcggactatccggcttactcttctttcgaattttcagacttcggctggaagcccagaggagacagaactcagattgacctgctttgcaacacactccaggctctcagcgatatgggttatatcgaaataatctcttcaaccgatatggacagcgccgccaagttaacacctcgtggtttgaatttacttcaacagcaggctccaggcgtaggcgatactgtgatcaacattctgaaaggtgcagcaggtgaaacccggacagcgctcatcggtgccatcatcggtcggattttcggcgggaaataa

SEQ ID NO: 205955 - DNA, 429 bp, Klebsiella oxytoca
atggcaaaaccagtcctgttcgacttctcgaacgctaccgcatctgagattgtttctgcaatcgacaacaagatcacctctttagtaaatctgagaagtttcagaactcgcgttggcggctccagagttgccgatcggcgctatccagctactcgcgaagcaatgaacatcatcaaacgcctgcgtcagcaagcgaaagatgcaaaaatcatccgtgatattttgcaaccatactcagcagagttggcaaaaggtcgtgatgttatggaaatcatcaagcctgttattagtgcctggaaagagttctacttctccaaaggcttcggtctggctgatgagcaagttttgattctcaggatgattgaatgtggtagtgaacttgagagcttgaccggacgaactaccccggatatgacaaccccagcttaa

SEQ ID NO: 205956 - DNA, 315 bp, Klebsiella oxytoca
atgacactgaacagcattcgaaatgctctgtgcgccgcgatgcatggcatgacaccggaggaatacgaacttcaaaaggcacgggataatctgaagggcgtcaccgataactttctggatcaacatcctgaatatctccgagggagatttgccgaaggcaacccccctaccgagttagaagtgctcaaatccgtcccggttaatgccggaacgtttacacctcacattatagatgagggcgctctcgaacgtgctcgcgttaaatgccgcgaggttgtagcctcagacccagaccgctattcacatattatctaa

SEQ ID NO: 205957 - DNA, 210 bp, Klebsiella oxytoca
atgaaattagctttgatcggtactggcaacatgccgcttatgcagtggattctagatggcaagggcgatgatgcgattatcaacatgtcagcgctggcgcgtcggcttgagtgtagtcgttccagcctacttgaccgcatccatacgcatggattcgacagcgctatcaggtactacctgagcgagaaaagaaaaagaatgattaactaa

SEQ ID NO: 205958 - DNA, 174 bp, Klebsiella oxytoca
atgaaatactctccaacacaaaaagagattgttgagattttgaatgccgcccgtacaagtggtagtgttcatttgactggctcgagagaagcccgcaaagcgcagttgcaggctctccgccgtaaagatttaaccgaggaaggttatcaagttgtccaacagtacatcggataa

SEQ ID NO: 205959 - DNA, 1047 bp, Klebsiella oxytoca
atgcacgaatttttcactctgcgtgagcaactcaagcctaagccgcaaggaaattgcgttgagcgcgtcctgaaggaactacgctcaatccaccagtatgtaaaccagaatgcgggaatagacttcgcaacggctcgtgtttgtccttcacttgtccagttacgtgatgaatttattgttcagcacaacgacaggcgtaagctgtctacgctcagcaagtacattaaagcggttgaagtctttacggctcatttccgatgcaaggattttcgcttgcacgacatcaacagaacaatggtgactgattggctcgacatggcaaaacaagagaaagctagtcaaacgctggctaattaccttggttgtctgtcccagcttgtgacactggctcaaaaccgttatcacgacgcgccaaaagagaatgtttttacaggccataaactggacgtgcgccatgatcgggaaagctacgaaccctttagcggtgacgaactggctaaagtgtatgcgatgcttgatgaagagatgaaagccgttgcgatagtgggaatgtatagcggtatgcgtcttaacgaaatctgctctctgcaaatcagcaatatcaaaaccgttgagggggtatggtgtttcgaggtgacggaaggtaagacacgcaatgcggctcgcttggttccaattcatagccgattgacgacactcgttaaagacctcgtccagaacaaccacaatggcttcttattctaccatgccagcatcacagaacgtgcagatggcaagcgctcaacgtggcatacgcagcgatttacacgggctaagcgtatagctttaggagagcaggggacagagcgtaaggtgtttcatagtctccggggaatgttcgtcagccaacttgatcggcatggtgtaccagaagacaggatcgccctaatcgtgggccatgagcgaggcaaaacggagagtttcagaacgtacagcaagggcgcggggatgatggagctatcaaaatacgttgagttggtgagttataaatcgttagatatcaattaa

SEQ ID NO: 205960 - DNA, 150 bp, Klebsiella oxytoca
atgccggccggagcgcgtacggactcgcagcagatcacactttttgattattacgatttccatataaaaactacgtgttatcattccgctggtaaataccttttcaactctcaccgaggctttatgctggagaatgtcatcatcagataa

SEQ ID NO: 205961 - DNA, 315 bp, Klebsiella oxytoca
atggggagtaattatatagaaatgcgtcttgaagattgtatggatgctattattgattacagaggtaaaaccccaaaaaaagttgataatggcattcctctgatcacagctaaaataattaaaaatggtagaattcaagaagttagtgagtttattgctattgatgattatgacaattggatggttagagggttacctttggaaggtgacgtggtactaactacagaggcgccactaggcgaagtagctcaattagatgcgcgcaaggtggctttagggaaggtgcgaataagcggggaaattcttctcggctga

SEQ ID NO: 205962 - DNA, 537 bp, Klebsiella oxytoca
ttgcggtcttctccccggctcgcgctgcgtttagccgggctacggattcatagccgtctgcggtccggtagcccgggtaaggtgcgcagcgccgcaacccggggaatgcgccggaatgaatgcatcggtgcggcttctccccggctcgcgctgcgcttagccgggctacggattcatagccgtctgcgggccggtagcccgggtaaggcgcgcagcgccgcaacccggggaatgcgccggaatgaatgcatcgatgcggcttctccccggctcgcgctgcgcttagccgggctacggattcatagccgtctgcgggccggtagcccgggtaaggcgcgcagcgccgcaacccggggaatgcgccgggatgaatgcatcggtgcggcttctttccggctcgcgctgcgcttagccgggctacgggttcatagccgtctgcgggccggtagcccggacaggcgcgcagcgccgcctccggggaaggtgcacagcatgaggttttgttgcggtcttctccccggctcgcgctgcgcttag

SEQ ID NO: 205963 - DNA, 963 bp, Klebsiella oxytoca
atgaaaaaaattttatgttttctgctgctgatgctggtggtttcacccgccgtccgagccagttgttccttttacagcggcgtgtccggagaagtgcccggctatctgaacttcggcaacgtagttgtccagcgtgatgtgccggtcggcagcgtacttgcgacagcagtaaccggcgcttataacagcggtaatcccatcgcgggatgtacccgggaagcctggacggcccgctgggagctaacgcaatgggggacgctgagcggatatggtgacggcgtttacaataccaatctgccgggcgtcggtttacgcttaagctctgcggtctcgggaaaaacattgccctacgaggggagctacccttataacgctggcggctcatgggcgtcccttcccggcgacggtatcaaaggggagcttatcaaaaccggcgacatcaccagcggcacgttaaccgacggcacgctggcgcgcgcctcggtggtgaaccagttttatttcgctaacgtcacgcttaacggtacgaataccgtcaccgcagccgcttgctcagtgacatcgtcgaatgtggatgtcccgctgggcgactatgataagggggagttttcagggcagggggcgaccaccgcctggcatcctttcaatatagatcttgagtgcgataaaagcgccagtattaatgtgcagattgatgccactcaggatccgtcgaatattgccggggtgatgaagctggataatgccggtagcagcggaacggccagcggcgtggggatccagctctggtacgtgcccaacggtggcacggcggtgcagtttggccagcaaagccactactacacctccccttacggcggccatgaaacggtgcagcttcaggcgcgctattaccagacagcgcaaactgtgacggcggggcaggcaaatgccacggcgacgtttacgctgacgtataaatag

SEQ ID NO: 205964 - DNA, 921 bp, Klebsiella oxytoca
atgaccgcaattgcatgttggtttaatagagaggaaagcgatagtatttgggcagtcagcgactcaagaatcactcagcaaaatagcagactaactgaccattgtccgaaattattctcaatccccgtatcagttattcgctcttcggacgtttatcgaattcacccgcaaaaaatattcgaatttggcttcggatttgcaggaagtacaatgattggaattaatgtcaaagaaatgcttgcagtatcattagcaagacttcatgagatagcgaacaataatccagaacaacaaatatcgaccgaagcattcccaagtcttaatgaaatagctttattagcaaaaaatattgccgagcaatatatgtctgatatcggccaatcctttccccaagcagtaagaatacagatgataatttttggtttttgctggagaacacaaacctacaaaattataaaactcaataactctattgagcacccagccaacctccagattgaagatattcaagatttatcaacaggcagacctgttttattaggtgataacttgcatgaacttaatgagtttatagagaataccaggcaacaatttacgcctaacacaataaattggtggcgtaccccgtttattgctttgaataattggattaaccaagaaacagtcaatactattggtggatacatccaaatggtaaccgctcacccacttggtactcgaatatcatttttgaccaatttgaacgaaaatattatcagaacaagctatgcaggaattaacactactgagtcatttgggccaactattggtggttttatcctaatgccaatggatgggatgtcactcccagatgaaaacggctgggatgttggaaatcaagttacccgtactgctgcggatagagttgctactaatagataa

SEQ ID NO: 205965 - DNA, 309 bp, Klebsiella oxytoca
atgcgacatagccaattatttctgttactgactttgcccatgtggtcgctggcctgggcctccccggaatccacccagctcgccctcgcgctgaagcaactcaacggcgttaaaacctcgctggaacgcgcccggaccagcgccagcaccgacccacagtcgcgctacttcttcgactacttacaggcgcagcaggatatcactgccgttgaacagggcattcgccactaccttaccccggcaagggcacaacctcgcgcagtccaacccttgagcgccagctaccagcgagagaaccccgatgactga

SEQ ID NO: 205966 - DNA, 1086 bp, Klebsiella oxytoca
atgctgtttacttacacttatgtaccacatcaaatggaaagaatgcagcggtttatcaatttcattttctatcaagtgtggtgtagagcgaggaaattaggtccgtatgacttgactctatttgatgctaatccgcctctcaaagagataatgacctcttttgcctatgaccacactgcagcaggggatcgtttttcaagtcaagttcaatctatttatcaaagtttcgcccagctttcgcgagagcaaatagctcagtttaaacggtggtaccaaggtaacaataatctggaaaaggtatgtgccaatgcgccggatgcacgactagtccgttacgctgacatcgcggtgaaccataaagatctatcagagcagctcggtacgtttttcaaaggattatactcacagtcactactggatcgcgctgctctgcgcgccaagattggtgatattgacgatcattacaagaacttcgtgcaaatcaataaagttgggaagtgcccgttttgtggtatcagcgacttatttagcgaataccatactaaacgcgaagcttacgaccattatctgcctaaggcattgtatccttttaattctatgaactttcgtaatctcgtgcctgcatgccactattgcaacagtagctataagaccagtaagaacccagcctacacgccaaaagaccctgcaggagctgttcatcgtcgcgcggttttctatccatataaacctgtgacacattccatcgagttacaagtcacactgcaaacttcagatatagcaaatttggcgccgaatgatatcgccctgcaatttgggccagatgctgttgccgaagaaatcgatacatggaaggatatttacagtattgaagaacgctacaaagctaaattctgcggggaaaatgacggtaagtactggctgacacaagtgctcgacgaatggagagaggatggccgaaatccttctgattttctgacagctttggcgcggcaaactcggagtcgaccatacgccgactgcaattttcttaggaaaccttttcttgatgcatgtaaggctcggggtctttttcaggatttgtaa

SEQ ID NO: 205967 - DNA, 1791 bp, Klebsiella oxytoca
atgaaactactacgcctgaagatcaccgacccggcaggctttcgcagcctgccctgcggttttgagcaccattttcgcactgaatggaacttgccggatgaactcgcaaaagttgaccactttgcccccttcgtctgcgctggaccgaatggcagcggcaaatccaacttgcttgaagtcctggcagcaatattctttcagctggaaattctgcgtgtgcgccggagttttcttcctgaagcattgcaagatgagactctggatctttcacccatttcctttgagcttgattatttgattcgagtccttcctgaataccgtagctctaacagtcccgaatgggcaaaagtgcatgtatggaaaaatgctggtgaatcggtgcgctttctttgggaaaaccaaagtgactttggtacagacataaatgaaccattcactagtagccatatagacatgctgttaccccagtacgtgcttggttactcttcaggcgagaacgaaatccttagtcttcctttttttaagatgcgttttgtacagtttgacgagtactacaacgcacttacccagcaacttccatatcccggtcacccagaaaccagacttgcatatcttgataacggattcagccaagccatcctgctgtgcaacctgctgtttctcgatgaggataatttgcgacctttccgcgaggatgtgggtattaatgcattgcaggaattccgcattatcgttcgtcgtagcattggactgcggccagaacaacttactgcttttgccaatgaagatgaaaatcaataccaattacctgaagacatagtcaatagtaatcccgctctacagttccatatcgacgagcagggatcactccattatcgtctaaatattctccatttactggaaggcgacgaaagatcttcattaatgattaacgccttacagcgatgcgctaccttgagttacgtcgatgatgacactgatactctaattttagattaccgggttaatgaggcaactaagcaagccttccgtgaaaacttcgacggttcaccattggctctattccaagcatttcaggtgttgttagctcttaacctttatgttgtaagtgatacgcttaagtcggatttatacacttcaaccagtcactatgttagtgaaacagtaccgacgctagcatctgatgaacgaatcatgcgctttaaacatttctatttcagaaagataggggtcgagaagccgatgcttctcaaagagctatcggatggcgaacatcagttattgcatagccttggtttgtgtgtgctattccgtgacactaactgcttgcttctgctcgatgagcctgaaacccactttaatccaaattggcgagccagttttatcacccgcttgcgtcagtgtttacctgatcaaagagatgtggggcaggaaatgttgatcacaactcatacaccgtttctgatttcagatagtaagccagacaaggttttggtattcagtaaagatgaaaccactggcgttgtcagcatcaaccacccggaatacaacacacttggtgcatctatcaacaagatcactatgaacacttttggtaaacgtgaaactatcggtggctatgcacaggccctgctggaagatttgcgccaacgctttgaggctggtggagaggagagggaatctcttattactgaaattcatcagcaattaggcgactcggtggaaaaactgttattgatcaatgcgattcttggactaaacgcacaagacagcgaagaggtgcagggctaa

SEQ ID NO: 205968 - DNA, 1491 bp, Klebsiella oxytoca
atgatattcaagccactggcttcaatagcaaaaatagttgcaggtcaatcacctgaatcatccacctacaacacgattggtgatggattaccatttttccaaggtaaggctgattttcaggacatgcaccctacagttcgtatgtggtgtaccagcgagaagcggaaagaggccgaatccggcgatattctcatttcagttcgtgcgcctgttggcgcagtcaatatctgcaatcagaaatcaatcatcgggcgtggtcttgcggcaatccgtcctttatctgaaattgatggaaaatttctctattactggctcaaagctaatgagaggaaaattgatgctctcggaacgggatcaaccttcaaggctattacgcaggacacactaaagaaaatagaggtccctattcctccgcttgatgaccaaaaacgcattgctcatctgctcggcaaagtagaaagattaatttccctgcgtaaacaacatctacaacagctcgaggacctgctcaagagcgtgtttttgaagatgtttggtgatattagggcaaaaaaatctagacacccatgggtggcgttaaggccctatctgaaagcgagcagcggtaaatccagcaagaatgtaatttcagatacggaaacgacaatcccaatttttggtggcaacggcgttaatggttgggcaaccaaggcgttatatgaatcacctataattgtggcaggccgtgttggtcagcaatgcggggttattcatatatcaaaaggaccttgctgggttactgataatgcgattgccattagtatctcggatgattcgcgactgaacatagtctatcttgctatggcatttcactacgcaccaattcgggagcgagtaaagcaactagatctcccattcattaatcagtccatgttactggactacccattgccattgcctccaatcagtcttcagaataaattcgctgctatagtcgaaccagtagaaggtctcaaactccgataccagcaaagcgtcgccgacttggagcaactctacggtgtattgagccaacaagcattcaatggcgagctggatctatcgcaagtgccgatgccaataccacccactcaagatgtcaccattgtttcccaaggagagcaaaccaccattataaaaaccgtgcctgccattcatttgcccgataccgataatctgctggctgccttgaaaaatactgaagctcgcaagacattgattacccaatggctgaaagcctattgtacacaacttgctgacgcatcattttcgttacaacaatttatggagctggcacaaagtcggctggcggagattcatccagacaacgactttgagctgggtacaagcgattttgaacatatcaaagcttgggtattcgaggcgctggcgatcggcaaactgacgcaggtgtttgacgattcagctaactgtatcgaactcaaatccgccattgagcgaagtctgacatga

SEQ ID NO: 205969 - DNA, 1665 bp, Klebsiella oxytoca
atgttacaaaacaatcctgaactaaaatctaaaatcgacctgctttggaacaaattctggagcggtggcatcagcaatccgcttactgccatagagcaaattacctacctgctattcatgaaacggcttgatgagttggatcaaaagcggcaggccgatgctgagtggacgaatgaagaatacacttccaggtttgaaggtacctggattccgcccgaggagcgcaactggcctgtgacggaacagcgtcccattgacaaacgcacgttgcgttggagcgaattcaagcgtatgcaggcagaggatatgctgcagcacgtacagggcaaggtatttcccttcctgaaagacctgaacggtacggagtccaatttcacccaccacatgaaaaacgccgtgttcatcattcccaaaccgacgctgctggtagaggcagtgaagactatcgacgacatctttgcggtgatggaaaaggactcgcaagagcatgggcaggccttccaggacatccagggcgatgtttatgaaatgctgctttcggaaatcgctactgcaggtaagaacggtcagttccgcaccccccgccacatcatcaagctgatggccgagttggtgcagccgcaactgggccaccgtattgccgacccggcctgcggcactggcggctttctgcttggtgcctatcagtacatcgttacccaactggctatcaacgctggtaccaggaaccttgtacccgatgaagacggttttatccgcacttcagttgccgcaacatttgatgaaaagcgccaattcgtcctgcaagaaagcctgtacggctacgatatcgacgccaccatggtacgcctggggctaatgaacctgatgatgcacggtatcgatgagcccaatatcgactatcaggacactctgagtaaaagctacaacgaagaatccacctacgacatcgtgctagccaaccctccttttaccggcagcatcgacaagggggacatcaacgaagccttacaactgggcactactaaaaccgagctactgtttgtcgaaaacatctatcgcttgctgaaaaaaggcggtaccgcctgcgtgatcgtgccgctgggcgtactgttcggctccggcaaagccttcagggatttgcgccaaaccctggtggaacgctgcgatcttaaagccgtcatcaccctgcctggcggcgtattcaaaccctacgccggagtcagcaccgctattttactgttcaccaaggtttggggagcaaaagacaagattacgaaacctgctacggaacatgtctggttttacgaaatggccactgatggctactcgttggacgataagcgttcaaagcaggaaggctatggtgacctgcaagacatcatcactagataccacaaccgcgatgcgaggaccgacacagatcgaaccgccaagtactttatggtaccgcagagcgagattgcagacgagaagaacaacttcgatctctctctttcgcgctacaaggaagagatatttgaagaagtgaactacgacgcgccagatgtgattttaggtcgactaattcaggcggaagtaggtgatgtggatgaggcggaactggctaaagtgcaaaacggtattgtacgcgagttgctaacgttaaaggagatggtgggatga

SEQ ID NO: 205970 - DNA, 2799 bp, Klebsiella oxytoca
atgcaaagttctgagaaagaaactcggattgctgttatcgatagtcaattgtgcattgctgggtgggatgtacaagatccaaccaaagttgtgcaagaatttgatatcctcacgaatcaatcaaaaggtgtagctgaacctcaccaggagtatggtgggcgccagtacagtgactatgtgctcttagggaaagatggcaaaccacttgctgtagtcgaagctaagcgcactagtaaagatgcagctctgggccgtgagcaagcgaagcagtattgctacaacatccagaagcaattgggtggtgagctacccttctgcttttacaccaatgggcacgaactttttttctgggatctagaaaacgcaccgccgcgtcaggtcttaggtttccccacgcgagacgatttggaacgttttgcatacatccgtcgcaatcgaaagcagctgacgcaggaattcattaacacctcaattgctggtcgtgactaccagatccgtgctattcgttcggtgcttgaaggtattgaacaaaaaaggcgtgactttcttctggttatggccactggcactggcaaaacgcgcacctgcattgccatggttgatgctttgatgcgtgccggacatgctgaaagggtactatttctcgtggatcgtatagctttgcgcgagcaagcattggcagctttcaaagagcacttgccgaatgaaccgcgctggccaaatgtgggtgaaaagctgattgctacgaaccgccgcatatatgtcgctacctacccgacaatgctcaatatcatccgggatgacgtgcagcacctgtcgccgcacttcttcgatttcatcgtcgttgatgagagccatcgctcgatctataacaccttcggcgaagtactcgattatttcaaagccatcacgttgggactaactgcaacgccaactgatattatcgaccacaacaccttccagctatttcactgcgaagacggtattcccacgttcgcttatacctatgaagaggctgtaaaccacgtgccgccttatctctgcaattttcaggttatgaagattcagaccaaattccagatggaaggcatcagcaaacgtactatttcgttggaagaccagaaaaagctgatcctgcaaggcaaggatgtcgaagatatcaactttgagggtacccagcttgaaaagcaggtaattaacaagggtaccaataccctgatcgtccgcgagttcatggaagaggcaattaaagatgccaacggagttctacctggtaagactatctttttttgcgccaccaaggcccacgcccggcgtatggaagaaatcttcgataaactctatccgcaatatcacggagaactggctaaggtgctggtatcggaagacccacgtgtctatggcaagggaggccttctcgaccagttcactaacaatgatatgccgcgcattgccattagcgtggatatgctcgacactggtattgatgtgcgcgaaatcgtcaaccttgtgtttgcgaagccagtctattcctatactaagttctggcagatggtcggccgcggcacgcgcctgctggaaaccagcaaacccaagccctggtgccttgaaaaggagatgttcctgattctcgactgctgggacaacttcgaatacttcaagctcaacccaaaaggcaaagaactcaaaccgcaattgccattgccggtgcgtctggttggtctgagactcgacaagatcgagaaggcttatgatagcaatcatgccgatattgccagtcgtgaaattgccaagctccgcttgcagattgcagagttgcccaaagagtcggtcgtaatcaaggaagccgccacagctctggcgcggctggaggatgacaatttctggattaatctcagccacgaccgactggaattcttacgtgctgaaatcaaacctctgttccgtactgtttctgaggtcgacttcaaggccatgcgctttgagcgcgacctactcgaatattcgctggctgtgctcaatgaaaacaaagaacaaaccgaaatgctcaaagaaggcatcgtcgagcagatcagtgaattaccgctatcagtcatctttgtgcaacaagaagaagctctgatccgcacggcacaaactaaccactattgggtcaaagccgatgaggatgcgttcgatgttatagtcaccaagctcggccctttgatgaagttccgtgaaaaatccagaggcgaggagcaaactcaacttgatttagccgatgagctttataagaaagaatgggtggaattcgggccgcagcacgaagccgtcagcattacccgttaccgtgaaatggtcgaaaccttgattgccgagctgaccgagcacaatccggtgctacagaaaatcaagaacggtgatgcggttagtagtcaggaagccaatgaactggctgagctgctgcatgaagagcatccgcacattaccgaagacctgctgcgtcaagtctataagaaccgcaaggcacgtttcgttcagttcatccgccatatcctcggcatcgaagtactcaaaagctttcctgatgaggttagtgcagccttcgaccagtttatccgtgtccacactacgctcagcagccgacagatggagttccttgaactattgaagaacttcattgttgatcgcgaaagggtggagaagaaagacttaattaacgctcccttcacggtcatccatccaaaaggcatccgcggcgtgttcagcccggctgaaatccaagagatcttacagcttaccgaacggttagctgcctaa

SEQ ID NO: 205971 - DNA, 633 bp, Klebsiella oxytoca
atgaataagcagcgtccgcctccttcacgtccgccacagggaccgatcggctggctgctgtcgctggccggacggattatcgggctggttattggtgcgctggtattacgggtagtgctggaactggcgggactctgtttctggtggccgcaggaggggagcaggcatgtttttcaggtgatgaagcgggaacaggcggaactggttagcgcgttgcaaccacatccgctcgggaatgacattgtaacgctgttggaaaaaggggcaactcacgtgcttatggccaacaggttcctgcagaaaccgttcaccgccctggcttatacgctggtgagttttatgcagcgcctgatatggcttgccactatactccccctgctctgcctgtgtgcgataaccgggctgacggaggggctggtgcggcgggatctgagacggtttggctccgggctggaatcggtttttctccaccgttatgtcatcaggtccggtagttcagtcacctctacggtttgggtcttgtatctgacgcaaccgctgtttcagccttcaacgctgatttttctccctgccgctttatggcttgcgttaacggtatggatggcagcagggagttttaaacgttggctgtaa

SEQ ID NO: 205972 - DNA, 1317 bp, Klebsiella oxytoca
atggtacagttttttcttccttacataatgttttgttatagtgcaggatatgcattactacaaactctagatggtttggggatcgttcctactaattttttagaaattagtacccaaggataccttattaacagctattggtctcctgatgaatttgctacaaattttggtgctctctttctagagtttatcattgtactgctaccctttatatttctgagctcatggattcttgcacggaagaaaggtgttattatctgcttcttgcttctcattacacctgggttattatcattttttcatcttttaccatatattcaatggttgccattgacatataattttaggggaacaggggcaactggtaatgcttctggaatcggaaccttgatcttcataggattaggttgtggatgggttttcactgtactcattgtggatattttttccacaggtgaaaaattcagacaatggatagatgtattgcttattttgacagcacttaccaacggtgttttttgggtttctgacagagaagcttctgaaggcaagaaagcatacgaggaaacaataacagatataaatgattctgcaaaatatcttctttctcaggtcaaagattatagccgtatgtgcaacgataataacatatctatgagtgtatcttgccagtgggcgtcatccattcaggaaaaacttgagaatattgctagtacaaaatcatctgttattaagtatgaaataccaaataacctatctgatttttatcagattcctgtttatggcaaagtagttaactctgaggaggaaattagacaagaatttgatgattataataagaaggtttgcccatacaaaataatttcaaaaaagatggggataataccaccaccctcacaatggtgccagaccccaccaaccgcttattgcaatgcaatacagacagggaagtttaaaacagaaatgggggggcgttttgctgtagcgaatgaatgtgtacttacatccatcatgagataccgtgatgttttgttaaaagaagaaaatcgattatcattaagtaaaaataatccgcattacagatggatgtggtatattattatgtcattttttattggcgggaaaattgccaatattatgaccaagatatgtgatatcgataaccgccatgagtccgaaaaacgcaagataaaacttatatcactaaagttatttggttgttttagaaaggcattttttcaatttcttattttatctgaggtatgtttttcatttgtttattctataatgaaaaagattctaaggaataaaatgtaa

SEQ ID NO: 205973 - DNA, 2226 bp, Klebsiella oxytoca
atggcgaaaactaattttctgattggacggggggagttattaaccaatgatatccccggtcctaaaagagcgccagggaaagctgaggtctattctctctatgaatcaaagcggcgcttattgccgcaaattgcatctactattgaaaattttgctaagttacccaatcgggcgtgtcctgatgattatgctgtagcaaagttgactataaatccaagctatatagcgcgatctttttttcctgcgaaaatgcttaagtcgaccgggttgacgtcaattggcagcaagacagttagaattacgcctcaaagttggaagcgtaaagttgctgtttcagaagtctctacgacacaaatgttcatcgcaggtaaaagagaatcgttcgaagagttgcctcattgggtggcaggacttaaagagctaactgacgaagcgattgatttcgcgcgtatagaaaagtttgaagcctatttgcctgaagaacgcatagttaccgcaggtgatctagatacgtcgtattttgaggtaggtatacatctgctggcagacgatggtcaagatttgattcagcaacaatttgttcggttcgcgtcatcgctgaacattaaagtgcatacctcattagcttttactgctggtacattgtggttcgtgccaatccaagctgatcgaatggctattgataagcttgcaaaatttacattcatacgcgtaattagaccagtgccaaaattacgtgggattaggcctatacaaagggcttccggcccattagctcagtgtaaattgccaactgaaggaccagtatcttcagaaataaaagttgcaattttggatggcggtttgccatcagagcatgctatatcaccatggttaaaatcatatagagtattggacgatcatgcagaagatgatcctgatggtttagagcatggcttagcagtatcttcagcgtttttatttgggccgattagtaacaaatcagaggtgcaaagaccatactcttatattgataatttgagagttttagacaataaaacctgtcaggaagatccgcttgaattatatcgcacattgggttttatcgaagaagtactattgtctcgtcagtatcagtttattaatcttagtttaggtccagatttacctattgaagatacagaagttcatgcttggacttctgtaatagatgatctattgagtgatggcgagacattgatgaccgttgctgtcggaaacaatggcgaaatggatcgtgagtccggaaatgcccgaattcaagttccgtccgactgcgtaaacgccttggctgtaggcgcttgtgattctgtcagtgaaacggaatggaagcgtgcttcatacagtgctattgggccaggtagaagccctggcgtaatgaagcctgatttagttacgtttggtggtgatattgaagagtactttcatgttttagggaaaggagcaaaacctgttattacgccacaacgaggaacaagttttgcctctccttacgcattacgttcagcagttggagttcgggcaattttaggaagtgatttgagccaattggctattaaagctttattgattcatgcttcaaaaccacttgatcactcatgtgccgaagtgggttggggaaaacttcctgaagatctgaacgacataattgttagccccgatggtgttgcacgtattgtttatcaaggggagttgaagccggggaaatatttacgtgcttcacttccaatacctgagggcggattaaaaggtaaaattaacttaactgcaactttctgttatgcaacaacaacagacccgcaagattcggcttcgtatacaaaggctggtcttgaggtgacattccgcccaaatgatactagagttaaagacggtaaacaaaatgcggaaactaagggattttttgaactagcaaaatatgcaacagaaagtgagcgtcgctctgacatgggtaagtgggaaactgtgttgcatagctcaaaaaacatgctgggttcaactttaaaaaatccagtttttgatattcactataatgctcgcgaagcgggggctagcatagccagccacaaggcggaaaagataaagtatgctcttatcattacggtgaaagcagcgaaacaccaagacctgtataacgaaattttacgtgcttacaatcaagtattagttccaattcagccacaaacatccattcctattcgttcataa

SEQ ID NO: 205974 - DNA, 1134 bp, Klebsiella oxytoca
atgggcgacttaagtggtattcagtcagatttagcccagctagttagactggtaatagccgaacaatatgatgacgttcggttgtatgtcgctcgcttggtgcgcaaatatcgggaaactatgcctgctctatctgagcagcttgatctttatttacggagcaaaccccagaagcctgcccaaggtctgcgtaaggctacgacgccaaaatccactcaatcgcaggtcatgcctgtggatgaagattcaaggttaaccttactgaaagcaccaagtgaaaaaattactagtaagccactgctttctagtcagatagaagactcactggatcaaattatccttgagcggaagcatatcgaccgtcttaagacccttggcctacaaccaacacgctctgccatttttgttggcccgccaggtgtgggtaaaacgcttacggcaagctggttagctcagaaattaggtgttcctttttatgtcctagatttaactgcagtgatgagtagttatctaggaaaaagcggaaataaccttagagcagctcttgatttcgctaagaaagggccgtgcgttcttctgttagatgaaattgactcaatagcaaaaaagagaagtgatgattctgatgtcggagagctaaaaagacttgttactgtaatacttcaggaagttgatgaatggccttcatcaagcttgttacttgctgcaactaattttgctgagttgattgatccagcgttatggagacgttttgatttagtcctcaattttgagaaaccaaatagcgaaagcattaaagaggctattaaacgctttttaggccctgactacgcaatttttgcacgttggatagacttacttgtcattatgttcaaagatgaatcatttagtaacattgagcgttctatcaacaaattccgtcgctcaattgctttaggtatatcttcagatgaagagttaatggagtcgttcattaaggatggtttgtcagaattagacagaaatgagcgaattgaaatagctgttaatctcaacaggcattctaaattatcccaacatgccatatcagacttaactggggtcagtagggatacaattagaaaatatagtccaaaaaaatctaacgcagcatag

SEQ ID NO: 205975 - DNA, 249 bp, Klebsiella oxytoca
atgactcaaagaacttatgttcgtgttgctgactatattcgtctgctggcaagagacaacaatgttacggctaaccgtgatggcatgagccgcatggctgtgaccattactgcacttgctggtgactctgttgagctggataatatcgagcaattactggtaaatcttaaaaagaaaggtgttctgagtaaatctgaaattctgcagcttcagggcctctacttccgcgagcaaaagcgttttctttaa

SEQ ID NO: 205976 - DNA, 831 bp, Klebsiella oxytoca
atgtcccaaaccctgttcaaatcttggtttgtggatttcgatccggtgattgataacgcgctggatgcgggaaacccaatcccggaagcgctgcaatctcgcgccgaactgcgacaaaaagtacgcaatagtgcagatttcaaaccacttccggcggatattcgtgcgctgttcccggctgaatttgaagaaacagagttgggctgggtaccagagggttgggaaagtgaaactttcgattcattctgtgatttaattcagagtgggggaacaccttcaagaaaggaaatatcattctgggatgacggtacaataaaatggctttcgtctggcgaagtgaaaggtaaaatagtattagatacaaaagaaaaaattacagatgctggattactaaatagttcagcgaaattatgggaaaagtatacaaccgtcgtggcaatgtacggagcgactgcgggagaagtgtgtatcatcggcgataaaatgaccgctaatcaagcatgttgtggattgtactcagaaaaatatccattttatgtctataattttgtcagcgataaagcatatgaattggcatcaaaagctacaggttcagcacaacaaaatcttaataaattaattatatcttcaacaaaatttatacgtccctcaaatgtgataattactacatttgaaaataatgtagctccattatttatgaaatggtttgctaattctgccgaaaataatagcttaaccgcccttcgcgacaccctgctccccaaacttatctccggcgagctgtccctggaggatctgccagatttagtaacccaaaccgaacccgcataa

SEQ ID NO: 205977 - DNA, 618 bp, Klebsiella oxytoca
gtgatttattcaggttttgacggaaagctgtggccggcgggcggtacccgcaaggtatacgaggataatcttgataacggcctgccttactggctgtccctgaatgccggggcatctttcacccagaatgccataggctcggtgggagggattacgctttctccggacagcagcggcgtgattgaccttaacgggccggaaattgaccttaataccgtgcgcggtatcagcctggaatttatctgcaccggcgcagcaggcggcaatgtggaagttcaggccggttttttctcggcatccgatggggtgctggcccgccagcgcagcagtgacaattacatgctgatgtccggcctggtgtccggggtgctgaacagccagaacgggtactacgagctgaacagtgcaaccaaacggtttaatccctgcgtcagattcgacacccggcagctcacgctgtcgattggcgacggagaccagatttctgccgtccgggcgctgtcggcatctgaattcacgaaagccgccgctgtccgtccgcgactgaagttcatcaacgctgccgggggattcacgcgccgggttcattacgtaaaactgactattgactggatttga

SEQ ID NO: 205978 - DNA, 903 bp, Klebsiella oxytoca
atgggattaatgattcgctccgacgcagaaattacggacgccaccgcacctgtcattaaggtttacgacaggatactgacgggtggttcactggtgctctttgacacggcaagcccgatgggggactgggcagagggcgttccggctgacggcggttacatcgataacctggcccgggattttatcggcgcactgattacggccagcaatgaagacgcttaccgggggccggtctccaaatcagccaatcttttcaccaccaaagcgcggtttgagagaacggctcgcggcggtctgcacggcattgtcagccagacacagaccatcaattcaggcgagggatacgctatttccctgcccaatgccgcaaaacagtacgtggtgaataatccggggcatacatactttatttccgtctggaagcgtcagacgcgcagcataaaggggctggaccctgttgcagaccgcaatcctgcatttctctcactggcggcgtacccgtcaccggatgtgaataatctggccgtgttcagcaaaaatggtatcaacatggccaaccggacggggtatcggggaacgggggcggaaagtgaccaggtggaggactggcagggcatctataatgccgccgggtcagggtggaatggcactgcgcccacgtcaatatcttcgttctacggatatgtcacagagtttgcgcgtccggcaaacggcaacagcacggtttcaggacacccgtcattcatcttctatcgcttctatatggaagacctgaccgtatccggccgcagctacgctacggttgatgcgcttgaccaggcgctttttgatgaagcgtttaactcttcaaccgggcgttacagaaatgaccatttttcagcgccgaatgttgtccttctctga

SEQ ID NO: 205979 - DNA, 264 bp, Klebsiella oxytoca
atgagaggacatacgcaacgtgaatggataactttcgtccaagctaaccccatcgtttctggggccatactcctgagtaacatagacagtgccggttgcatagatattgatgtattcatcgtcaatggacgttattccaaattcttcaacctctgtgtaatctacatacgcatgattcgcgatagtcacaaggttttcaggcattgtgcttactgcggtgtcgatcactgcatctctgattttaccttcgagagtacggattaa

SEQ ID NO: 205980 - DNA, 1284 bp, Klebsiella oxytoca
atgattaggttcactaatggagacatgttttctgtaaatgcagatatattaattaatactgttaactgtgttggagttatgggtgccggtgtcgcattagcatttaaagaaagatatccttcaatgtacattgaatataaagaattatgcaataaaggtttaatcaagccaggtgaattacacgtatggcataacaatgataaaataatagtcaattttccaactaaaagacattggcgaaataaatctctttataaagatatagaatcaggattagttgcactaaatcattttttaaaaactaaaaataaaggtcgtgttgcattaccagcattgggttgtggtcatggaggtttagactggaatattgtatcaaaaatgattaaagatcatctttctgaaatcaatttagacattatggtgtttgagcctaatgactctcgcaatattacaaaaacaaaaaaaacagaaagcattaagcatttggatttagaacaacttaatatatcacaattgcaaacatcaatcttctttcaggagaaacaatatatacaaggcaatacggatttattaaaacgaaaccccaaaaatatttttattttagaccataagaaagataatacatctaaagcaacttctgcgttaatgaaatctttcatgaatattaactctcaaggcgatgtaagtgcaataatctatcgttctaacaaggatgaccatataataaaaaaaatacttaagcagaagcagtcaattataataattttacctttcggtatgttcgcttacaataacaatatagtgcaggaattaacaaccgaaagtaacatactttttatatccccatattctttacacgaggaatggtcagaaaataaattcatcaacatgctagtatctttatccactagtaactttaatataatttcttctgatgatcctccgctatggctaaaagatctttacaataacacaaaaaacatcaataacatttatttaataaaatataatgatacattatcctatttaagtgcgattggtattgaaaaagcgaatttgttgggaaaacaaagtaaaactggtgatgtaaacttaaaacctttatatcgtgaaagaacgcaacacgacaatgatttattctcactcaacttccatgaactaaagaaagttatttatgcattggagcaatctggaattgaaggtgaatttgaatacttgttaaaattcaaaagcgaccatcaaatatctaaagatataataaaaaacattctaaaaacaaaataa

SEQ ID NO: 205981 - DNA, 1317 bp, Klebsiella oxytoca
atgactctaccagctaaccactctcaaagatatgtttatcatttcacacatatagataatcttgaaagtttattttcaaataatatgctttcaaataatgagctcatgcgtagaaccactcccacacttagcattgcagaacccgacatccaggcaagaagagctacaatgcaagttacttgcggtcctggtggtgtggtgcatgattatgtgcctttttatttctgtactcgcagtccgatgttgttaggtgttgtaaataaaagaaatatcgatcagcttgatattatttatttagagtttaaattatccaagttaataaattatgatttcgtatttacagattcttctgcaaatgctttcaccccccccaatttttatgataatttagcacacttagataatttagaatgggacttaatcgactcattgaaatgggctcctcccacaaataaaaagcaacaaaaaatggcggaatttcttgtatacaatagagtctcaatatctgacattgagaatatagtggtttggaatgaaggaattaaggaaagagtaaaaaaaattgcagcatcgctaaatgtaacaatacccacaatttcatttgaagagggtcccagatggcattattacacaaacttcatgaataatggcagaaaatcatgctcgcccgggcccaaagaaactaaccaagccttcaaaaacgctttaacaaagatacactcgagaactcaaaaaatctcttacgaatttaattcgctggatgaattaataacaacacttagaacaaatattagcaatattaattatacaaatgagttagttgggttgcattctgaaaatgctctccatagagaaaccgtagcagaacacactttaactgttatttctaattgtgctataaacaaatattatttgcgcttaaacaatcgttcaaaaataattgtcgaattagcagcatttttacatgatataggaaaaggtcccaaaagtcgctggcctgacggtacgcaaaaagttgatgctcgtcatccactacttgcaatgccaatgcttgaagatttaattataaatagaattaaatatatcgataacagtgaaatagaacatcttttgaagttagtttgttatcatgacctgattggtgatatacttggccaaggacgtgacgagaaacaattattagatttagttaaatcagaaaatgaattaaatatgttattttgcttgtctgaggctgatgtcagatctttaaatccctactggtggagggagggtgaagctgatgcaatataccaaagagcactagccaatatttaa

SEQ ID NO: 205982 - DNA, 264 bp, Klebsiella oxytoca
atgatccctgtttttgttatatctatgcaatccgattacgacaggcgtaagattatatcggataaaatgaataagtataatatctattatgaatttatcgatgctgttgttggaaaagatttacctcagtctaagattgagaatattgatttatcatgcgctatagctagaaaaaataggcatgtatctctaggggaaatcggatgtactctcagccctgtctcttatacacatctgacgctgccgacgaatagagaggtgtag

SEQ ID NO: 205983 - DNA, 540 bp, Klebsiella oxytoca
gtgttgcatactctgttgattaaacgactcccctggctgcttctgccggcgttgctgaccggctgcggcctgacgcagagcgtcagcgacggcacatcatcggccatgaaatccattttttacaaacaggtgaaaaccctgcgtctggacgttaccgccaggcgcgaactgaatactgatgcacaggaaaacacctcgctctctgaaccggtcatggtgcgggtataccagcttaaggaccgcaaggtttttgataaaaccgtctaccagcaactgctgacgcagggcgacgatactccgggaacggaaatacttgccagccgcagcctggtggtgaagccgggcgaggatgccggtctgaatatgccgctggatgaacaggctcagtttgtcgcggtggtggcgctgttccgggcgccggatatggcgaagaacgactggaagctggtactcgcccgcgatgacctcgacccggacaggccgcgcatcattgaggcaggccataaccgcctgatcctgcagccgctgaaggacgactga

SEQ ID NO: 205984 - DNA, 1086 bp, Klebsiella oxytoca
atggcaggagaaccacaaccgccgtattcccggttaagcccccggcttgagcgggatatccaccgcatcaacttttaccgtttctgtcagttgctggaaaagagccgcccggacgcgccgccactcggcagcacgctgaacccggcggatgacccggtgcgctttcgtccgcatccggggatgggctttccggtcagcgagctgaaagccatcgaatacgacgaagataacccggacgcgccgccgacggtacgcaccaccttcaacgggctgtacggcgtcgattcgccgctgccgaccgcctggcttgatgatatcgcgcagcggcgcgaggggcacgaagcccaggaagcgtttctcgatatttttaaccaccgcatcctgacgcagttttaccgcatctggcgcaagtattcgtacccggcgacctttgaacccggtggccaggaccgtacctcgcagagtctgctggggcttatcggactgggtattcccggcactgacaaacatattactgcgccgctgtcgcgctttctggcgctgctcagcgtgatgcgcctgcccgcccgtactgaagaggggattcaggcgctggtcgggttgctggcgccccgcacgcaggcgtcggtgacgccgcacgacccccgaacggtttacatcgataagccgctgggcttttacggtgacgaggattttttgctcgacggttaccaggtgctgggcgatgagacgacggaagtcagcagccagttgctgattagcctgtataccgaagaccatacggaggcacagggctggctgccggaagggctgatttatgcagactttctggtgctgctgcgggtgtatctcggctggcgctataaggcgcgtattcagcttaccgtgccgacgcagctgttaccggccccgctgctgggtgaaacacccttcattctcggcatgaccggggtgctgggcatggagggcgatgaggtaccgccggacctgcctgcgacattcaccattgaggcagggagctactgcggtatgccgcctgccgtgacaccacaaggacaccgacgtgttgcatactctgttgattaa

SEQ ID NO: 205985 - DNA, 1761 bp, Klebsiella oxytoca
atggatgatttaaccctgcgttattttgacgctgaaatgcgttatctgcgcgaagcgggcgaagaattcgcccgcgcccatcccgaccgggcagcaggactcaacctcgacaaagccggggcccgcgacccgtatgtggagcgcctgtttgaaggcttcgccttcctgatgggccgcctgcgggagaaacttgacgacgacctgccggaactgaccggcgggctggtgagtatgctctggccgcactacctgcgcaccatcccgtcgctctgcatcgtggagttttccgctgactggcgggagatgaaagagccggtggccgtggagaagggttttgaggtgctctcgcaaccagtcggtgaaaaacgcacccgctgccgctacaccaccacgcagccactgaccctgctgccgctgtcgctctcccgcgcgggcgtcaccaccgacccggacgggcgttccgtcatcaccctgcgttttgagtgcgggcagcttgccgactggagcagtatcgatttaagccgcatcccgctgtatctcaatgccgatgcgccgctggcctgcgcgctgcacgaagcgctgaccctcagtgtggcaaaaacaggcattcgcttccccggcgataccgaccgcagggcgctggacgcgcgctttgccgtctgcggttttggtcaggaagaaacgctgctgccggaaagcggcagcttcagcggctaccggttgctgctggagtatttcaccttccgcgagaagtttatggcggtcagcctgcgcggtctggaaaacgtggcgtttccggaggatatgtcctggtttgagattgatgtggtgctgaataaacagtggtcgcatgagtttcccttctctgagaaacacttgcggctgcactgcgccccggtcattaacctgtttcccctcgaatccgatccgctgcatctggactcgttacagacggagtacctgttacgaccgatgcgtattcaggacggacacaccgaaatttattccgtcgattcggtcacctcatcgcgccattccggccatcaggtctgggtgccgttcaccagcttccgccataagggcgggatgatgcgtcacgacgcgccggaatattactaccacacgcgggtaaaacgtggtccctccggtctgcactacacctggctgatactcggcggcgaggcctttgataaccataccgtgccggacgatgaaaagctgtcgctcagcctgaccggcaccaacggccagcttccgcgtcgggcgttacagagcacgctgctggatacggtggtgaagtccaccgcctcgcgcatccgggtgcgtaatctctgtgcgccgacgctgccctgctatccgccggaccaggaccgttttcactggcgggtgctgagccaccttggcagcagtttcctgtggatgatggacaacgctgatgtgctgcgcggggcgctgtccctgtataactggacgggcagtgagatgaacatccggcgtctggcggcgattgttgatgtgaagcaccgtgaaatcgaactttttgtgcagggacattttctgcgcggcgtgcagatagaggtgaccctcgacgacagcggttttgccggacacggcgatatctgcctgtttggcgaaatgctcaaccgtttctttgcgctgtataccgatattcatctgtttaaccatctggccgttattattcagtctaccggagagcgtctcgaatggcaggagaaccacaaccgccgtattcccggttaa

SEQ ID NO: 205986 - DNA, 1581 bp, Klebsiella oxytoca
atggcatccattgataccctgctggcagcctgccagcgacaaccggacatcctggcgcagcaggcacagtcccgccttgccctgtgggagaactggctgttacccgtctctgatgacagtcccaccggcgacgaccccggctatgacgatgattttcagcagatgcgcgaggaagttaacaaactctccggcgcggataccgaccagatttgcaccctggccgaaaaactgctcaccaccgcgacaaaggatatccgcgtcgccacgtactacgcgtgggcgcggctgtgccgggagggtgaaagcggactggcggacgggctggagctgctggcaggcttaatgcagcgctttggcgcacaacttcatccgcagcgcgagcgcagccgtcagggcgcgctggaatggcttgccagtacccggatgcttgacagcctgtcgcggtatccggaagtcaacaacgcggagaccctgcgtatcgccggcgcgttactgctggcggagcgggcagcggaaggggctattcccggctcgctgtatcaggcgctggaaatccgcttacagcaatccggcggcccggatgcggtggtgccgcagaacgtcagcggggagagtcacacgtcgcccgccatgaccggcagcgtaccgtcgctgacgggtattgcttcaggccaggagctgctggcgcaggcgcgggtactggcggaatatctgagaaaccagccggacggctggttatccgcccaccggctgataaaaaacctgcgtcatgacaccctgcgccagttgcctccgttgtccgccgacggcaaaacccgtactgagccgccgaagccggaccagcgcgcgctgctgaaacgactgtacctgcaacagagctggcgggaactgatggaggaggcggacagtctgctgtcgcgcggcgcgaaccacctgtggctggatgtgcagtggtatctgcaccaggcgctggtgaaatccgggcaggagcacgaggcggcgattatccaggccgacctgaaagggctgctctcgcgcctgacggggctggagacgctggcgtttaacgacggcacgccgtttgccgatgaagtgacgctgaactggatacagcagcaggtgatggcaaacgccgcaggctggcaggacgaccacaccgccagcgccaccaccgcatccggcgacgacgatatcctgcaactggagggtgaagcgctggcacttgccgacagtgaaagccccgatgcagcgctggcctggctgcagaaccgtcccggtctcaccaccacgcgaagccgctggctgttacggctgctgatggcgcgcattgccgaacagaccggcaaaaatgagctggcgctgcatctgttgggcgaactggacaacaacgcaacctctgtcacgctcacgcagtgggagccggaactgctgtttgaggtgaaagcccgccgtctgaaactgctgcggatgaaggccgggcgcggtgaagcagagaaagtccggttacagccggaaatggaacaactgctggccggacttatcactatcgatccctcaagagctgccgtattgtgcagctga

SEQ ID NO: 205987 - DNA, 825 bp, Klebsiella oxytoca
atgacgacatttcatccggcgcagtgggcgctgactgagtacagccgccagtgccctggtgtgttcagcagtgcggatacgttcagaaagacagacccggattcaccgtggtggtttatgacctcagggcattgccaggcctggctgaaggattacctgcggacacatcccgtcccggcaacagggccgctgtcgcgggaggcgctgaagacctacaccccgctgggcgagtttattgtgctggcggcctggcgcacgggtaaaaccatcatccgctgcgatgaggcgctgctggaggcgctggagaaaaccggcctgcacgacgcgctgcctgccggggtgctgctccgtctgccgttctggggattttatctggagtttccgtcataccgggtggcgatgccgcatcccgacgtgcagggcattcccgcccacggcgcgtttatcaccctgacggatgcagcagacggacggggaaccgacctgctggcgctggtggtgggcgacggagccatctcgcaggagggcaatcatccggtgatgacgaccttcctgcctgttgccggaacgacaggagaggcgctgtcggcgctgcgctctgagctggcccggcatttctggcgcgccgtgctgccggtgctgttttacctctgcgcggaaaataccgactggggcaacgcaggcattccggttcgcccggaaccaaaaaaggtgaagcgcaggggcgagcgtttttttgagccgccacaggttcaggtgctggatatgggcgtgcgggtgggcgctgcgccagttgcaccggcatttcctggagcagactgctga

SEQ ID NO: 205988 - DNA, 3396 bp, Klebsiella oxytoca
atgaaaaggtttttatacatcctgggggcgggtctctgtgtcctggttgttttgtcggcgctgttgtttattcaggcccagacaactcacttctctgaaggggcgggtgaacgtgcaccctggatttcgttgctgggtgcggtttttgtgaccagtctgttgagcgtgctggttttttttcttatttctttccagaaaaacgacaccctggtgactccgccgggtagtcaccgggcaggcaaagtggaagggatacaggaacaaaatacccccgtttcttcgctaaaaaaacacatcctccgccgtcacggctctttctggcgcagtaaagtccgcctgctgctggtctgcggcgaacccgcacacatcgccgccatcgcccccggccttgccgaaaaacagtggctggagggcagtagcaccgtgctgatttacggcggaagtttgtcatccacaccggacaccgaacgtctgaccgccctgcgtaaactgcgccgcagtcgtcctctggacggcatcgtactggcgctggatgagacgcaggcgaagctgaaaacgctggataaccatcttcgcaccctggagcaggtcggggaggcgctgcagtaccagccgccggtgtacctgtggcaggtatgtgacagccagtggccgcaggccacccgcgtcacccagaccgtgggggcgctgttcccggcccgcgccacgccggaggtgctggagcgccagctcagcgccattctgccctccctgcgtgcgcagggcctgcagcagatgtgcgctgacccggcccatgattacctgctgcgcttcggacgttcgcttgagaaagaaggcattgcccgctggcgcgcgctgctgaccccctggctgacggagcacctgaagcgcgttccgctgcgcggcctgatgttcagcccgtcgctgacagcggacaggaaaacggatgaggaccttcatccccacgcctggcctgccccggcagtctggcagggagtgaaggatgactgcgcgaaagcccgtggcgtgcgggtggggatgccctggcagcgcacgctgggcgtcacggcgctgacgctgattgccctgtggggcgcgggcagcctgctctcctttatggtcaaccgccagcatattgtgagcgccgctgagcgggcgcagcaactggtgaaccagcctgccgtcagtgatgagcaactgatggcgttacagttactgcgtaacgatatcgggcgcttacagacgcagcaggcgaacggcgcgccctggtaccagcgtttcgggctggaccacaatgcgccgctctctgccgcgctgatgcactggtacacgcaggcgaacaaccgtctgatacgtgatgcggcagcgcaggcgctgacccaaaagctgatggcgctggcgaacctgccgccgcgcagcccgcagcgggcgacccttgcgaaagcggggtacgaccagctaaaggcgtacctgatgatggtgcgtccggataaggcggatgcggcgttttacacgcaggtgatgaccggtgttcagccttcccgcagcggcatctctccggcgctgtggcagagtatcgcgccggatttgtggcgctggtatatgcagaacctgctgtcgcatcccgcctggaaaatcaccccggatgcggcactggtcagtcaggtgcgtcaggtgttgctggagcagattggccagcgtaacgccgaaagtaccctgtacgaaaatatgctgacgacggtgcgccgcaactatgccgacatgacccttgcggatatgaccccgcagaccgatgccagccgtctgttcgccacgcaggagtcggtgccggggatgttcacccgccaggcatgggagggcggtatccaggatgccattgacaaagccgtggcttcccggcgtgatgaaatcgactgggtgctgagcgacaaccgtaaaaccctcaccggcgatgtctccccggaggcactgaaacagcggctgacggaccgttatttcaccgatttcgccggggcctggctgggctttctcaacagtatccggcttaatccggcgcacaatatcgctgatgtcaccgaccagctgaccctggctggcgatgtccgccagtcgccgctgattgccctgatgaacacactggcttaccaggggcagaccggacagcagaaagaggccatcaccgactcgctggtgaaatcggcgaaaaacctgctgagcaaggacgataaaccggtaattgaccagcaggctgccgggccggtcagcccgctggacggcaccttcggaccgcttctggcgctgattgggaaaaacagcgcgcagaacgtgatggcggcggacagttcgttgagtcttcagacgtacctgacgcggctgacccgtgtgcgtcttcggctccagcaggtggcgggtgcgcccgacccgcaggcgatgatgcagcagctggcgcagacggtcttccagggtaaaagcgtggacctcaccgacacccgggaatacggcagcctggtggcggcaagcctcggcgaggagtggagcggtttcgggcaggcgatgttcgtccagccgctgacccaggcctgggagacggtactgcaaccgtctgcggcgagcctcaacgacgcgtggcagcgctcggttgtcgttaactggaactcggcctttaaggggcgctatccgtttgccgccggcaaaaatgacgcctcattgccgatgctggcggcattcatccgccgtgataccgggcgtatcgaccgctttctcaccacgcaactgggcggcgtgctgcaccgggagggcagtcgctgggtggcggacagcgcgaacagccaggggctggcattcagtccggcgttcctgaaggcgattaatcagctgagcgaactgtccgacatcctgttcaccgacggcagtcagggcatcagctttgagctgcagggcgtggcgatgccggagattgtcgaaacgcagctgacgctggacggtcagaaacttcattacttcaaccagcttgccgactggcagagcttccgctggccgggggtgatgaacaaaccgggcgcgatgctgacctggacctccacagcggcaggcgcacgactgtttgcgaacgacagcggtccgtggggcgttatccggctgctggagaggatgaagcggcagaaggagaacgacggcctgtaccggctgaccgtgaccgcgccggataaccggcagctccagtggctgatgcgcacagaactgggtgacggcccgctctcactgctgaagctgcgtaattttaccctgccgtcgaagatattcagcgtggatgccgccatactgagcggaaacgaaccgtctgacggagaatatgacgatgacgacatttcatccggcgcagtgggcgctgactga

SEQ ID NO: 205989 - DNA, 2652 bp, Klebsiella oxytoca
atggaacaccattcagccatcctgttacgccgtcttaatccttactgcgctcgtgcgctggaaggggcggcctcgctgtgccagacgcgggcgcacgccgaaattaccccggagcactggctgctgaagctgctggagcagggggagggtgatatcaccgtgctggcgcggcgctatgagtgggatatggatgcgatatggcaggatttactggcgcatctcgaccgtctgccgcgttcggtgcgcagccgtccgcagctgtcggacagtattcagaccctgctgcaggaagcctggctacgggtctcgctggaggatgaacaacagatccgcagtattcatctgctgatggcgctggtggagaaaccgaaactggctcgctgtgacggcctgtggccgttgctgacgctggcgcagagccagcttgagcgcctgcgcgggcttctggatgcgcagtcagacgaacgtccggaggtgcagcaggaggaaagcctgagccagtcgccctccacgctgacggatgagaaaaaccgtgacaacggtatgtccggcaacggcttaagcgatgcgctccggaccgcgctggataaattcactctcgacgtcaccgcccgtgcccgggaagggaaaatcgacccggtatttggccgcgataacgaaatccgtcagatggtggatatcctctcaagacgccgcaagaacaacccgatactggtcggtgaaccgggtgttggtaaaaccgctctggtggaagggctggcgctgcgcatcgccgaaggcaacgtcccggacaccctgaagccggtctccgtgcgcaccctcgacctcggcttactccaggcgggtgcaggcgtgaagggcgagtttgagcagcggctgaaaaatattattgaggcggtacagcaatcacccacaccggtactgctgtttatcgacgaggcgcacactattattggcgcgggtaaccaggcgggcggcgcggatgcggccaacctgctgaagccggcattagcccgtggagaactgcgcaccattgcggcgaccacctggagcgagtacaaacaatacttcgagcgcgacgccgcgctggagcgtcgtttccagcgggtgttagtggacgagccggatgacgacaccgcctgcctgatgctcaggggactgaaatcccgctacgcgcagcatcacggtgtacacattaccgacgaggcggtacgcgccgccgttacgctctcaagacgctacctgaccggacgccagttgcccgataaagcggtggacctgctggacaccgcctccgcccgcgtgcggatgagccttgatacggtgccggaaccgcttacccggctgaaagcggccattaccgcgctggagctggaaaagcaggcgctgctggaagatatcgcggtgggcaataacagtcacggtgagcgtcaggcaaccatcgaacaggacgaaatccgcattatcctgcaactcgacgaactggaaacacagtacggcgaagaactgaagctgacggaacagctgctggcctgtcgtgccgatatctcccgccaggcggagattgccgacctgcaacaacaactgggcgaaattcagcagggcaatccgttgctggggctggacgtcgatgcgcgtaccgtcgccaccgtcatcgccgactggaccggcgtgccgctctcctccttaatgaaggatgaacagacggaactgctgagcctcgaacagaacctcggcaaacgcgttgtcggtcaggacactgccctgaatgccatcgcgcagcgtctcagagccagtaaaaccggtctcgccccggagaacggcccgcagggcgtgttcctgctgaccgggccgagcggcaccggcaagaccgaaactgccttagctctcgctgacgaactgtacggtggcgagaaatcacttatcaccatcaacctgtccgaataccaggagccgcacaccgtctcccagctcaagggctcgccgccgggctacgtcggttacggccagggcggtattctcaccgaagcggtgcgcaagcgaccgtacagcgtggtgctgctggatgaagtggaaaaggcgcaccgcgatgtgatgaacctgttctatcaggtgttcgaccgcggctttatgcgcgacggtgaagggcgggaaatcgatttccgtaacaccgttatcctgatgaccgccaacctcggcagcgaccacatcatgcagaggctggacgaacagcccgatgccacagacagcgattttcacgaactgctgcgcccgctgctgcgcgaccactttcagcccgcactgctggcacgtttccagacggtgatttaccgccctctgacacaatcggccatgcgcaccatcgtacagatgaagctgaatcaggtgagccagcggctggcgcggcattacggaatgaaaaccagcattgatgagtccctgtacgacgcgctgacggaagcctgcctgctgccggacaccggggcgcgcaatatcgacaacctgctgaaccagcagatattgccggtactgagccagcagttgttaagccatatggcggcgaagcagaagccgcagacgctgaccctcggctggaatgaggacgagggcattgtgctggccctggacgaaggagaaataactcatgagtga

SEQ ID NO: 205990 - DNA, 492 bp, Klebsiella oxytoca
atggcaattccagtctatctgtggctgaaagacgacggcggcgcggacattaaaggttccgtggacgtcaaggaccgtgaaggcagtattgaggtagtcgctcaggagcacaacctgtacatcccgaccgacaacaacaccggcaagctgaccggcacgcgtatccacacaccgttcctgttcaccaaggaaatcgactcctccagcccgtacctgtacaaggcggtaaccaccggccagacgctgaagtctgctgaatttaagtggtacaaaatcaacgacgcgggtcaggaagtcgaatatttcaacacgaagctcgagaacgtcaagctggtgaaggtcaatccgaagatgcacgacatcaaggacccggcttttgagaagcacaaccatctggagcagattgaactgcgctacgagaaaatcacctggacttacaaggacggcaacatcattcattccgattcctggaacgaacgcgccaccgcgtaa

SEQ ID NO: 205991 - DNA, 1080 bp, Klebsiella oxytoca
atgaaccagataatttctgatgcggtttactttattgagcacgaattttttatcaatgcatccataaaggatgacattagcgatattcttccttttcaattaaagaataaagcacatgcttatacagttctaatagaggggaaccccttcctgtttataactatccaaaatgatgaagttctaagtgttaatagccaaatccatttcaaaagactacatgcaaggctgggttatccaattgttcttgtagcaagaaatctaaagtataaaacgagaaaagaactaggcgattttcttgcaggatatattatacctggcgagtttctttcgataccttcaatgtttatcaagaaaaaggctaagcctttcgaacttgaaaatactattgtcgataatgaaaagccatttggtgttattccatcgtatataataagttattacttatcaggttattatgacgattggtttaatagttttgatattatgagcattttcgatgtatctaaaatggctatatcaagggccttacgtgagttacagagtaatggactgataattcaagatggtaaagataggtataagtcctataggtttattattagtaaatatgatatatggaatatttacaggtacagaataaccccactatcaactggtttcattcccgtttctgtggatggtctacataatagaaagtacttcgcctccggcgaaactgctcttagtaattattctgatttatcaccaccgaacaaagaacaattggggatttatctaagttcgaacgaacggtatcttcgaactatttcacccgctacaattgaaggtgaatcattgttcaaagctattggattattgggagatagtagtaataacatcggtattgaaagctattactccgacggtgaagcgcttgttcaggtttttccatatgagccggttattataaacaattgtttaaatgatgtttttcttgctctttcaaggtttaataaatttgatgttagagtaagagcatcttatcaagagcttgagaaaaaaatatctttaaatctatctggtaatgaaaggaatacatga

SEQ ID NO: 205992 - DNA, 768 bp, Klebsiella oxytoca
atggttgattttggatttttatctgattatatgcgcgattaccaagatgactatatattgatcggtggtaatgcttgtgcattaaattttaaagaggagggttcttctttcagggcaacggtagatttagatgtcgtcctgattattgaaggtgataatcagaaattttatgaacatttgagagcttatttatcagagcatgattatatcgggaggacatataatggaagtaataccggagggtcatcttatcgatttgttttaccagaagataatgttaaaagtgatttacctaagcaaatagaattgttcactaggaaacctgattattttgatacttctaagtcatctaagcctcatattacaccaatacaagttgatggtaatatttcaaatttatcagcaatccttctggatgatgatatatatagttttatacggggttctaaaatatcaattgatgatgttagcacagttaatttagaatgtttattggggcttaaatcgattgcatggcatgcaaatcaagagttgtttgaaaaaggtatagtagaaaatgaaattacagtatggaaacatgctgctgatattttaagtatcgttggtattattgaggataagcaatatatttatcctagtgtaatctttgatagcctgcaatattcaaaacagagatttaaagaatctgatatatataagcatatcacggtttctcaagatgacgtagaaaatgcgatccactttatcgaaaacaatgttactaaataa

SEQ ID NO: 205993 - DNA, 462 bp, Klebsiella oxytoca
atgacaaactcatttcttgacagcttgagcctaccagctcctaaggaaattgaggcggcagtccgtggacagagagaacttgcaacctacctgtcaaccaagcttgaaacacaaaaaatttctattcaggatgcagacaatgtatctcaccagattgaattaccaacatcctccctgacgttgctaatggccatcttgggtgagttggctgcgggtaacgcagtacaagttgttccggtacatgctgaattaacaacgcaggaagcagccaatattctgaatgtttcacggccccatatggtgaaacttttggaagacggcgagctgccattccataaaacgggtcgccatcgccgcgtactttttgctgatctgatgaagtataaagagttacgtgatcagaaaagccagaaagccatgcaggagttgtccgaccttagccaggatctaggactgtactaa

SEQ ID NO: 205994 - DNA, 576 bp, Klebsiella oxytoca
atgaaccactctccatatcccgtagttttagacgcatgtgtactgtacccatcgctactgcgggatctcttgatgcgtttggggctaaaaggattataccagccaaaatggactgctgaaattcaggatgaatggcagcgcaatttgcttcatgatcggagtgatttaactccagagcaagtaaagcgcacagatcaactgatgaacgaggctataccagatgcaatggtcacgggttatgaaaacttgatcgctagcatcgagttgcctgatctagatgatcgccatgttgttgcagctgcagtgcgatgtaatgcagaagtgattgttacggctaatctgaaagattttccaagggaatgcatcgcagaatttgatgttgaagctcttcatccggatgagtttatttcagatctgtttgacttaaaccacgcattagcgctgcaggctgttgcagagcaacgcgctaacatgaagaaaccgcccaagagtgtggatgagtatctagaagcgttgttacggcaggggctacctatgaccgtgaaagcattagagaaatacaaggctattttataa

SEQ ID NO: 205995 - DNA, 159 bp, Klebsiella oxytoca
atgaccatccgcatctccggcggcgtcagtcgtagtccggtggtagaccatctgttctggcaccgggacggccagcagttattcctcccttatgacaaaacgcagtggcctgctgaacagtatgtcggctggcaccgtaaacagattttcaaagcctga

SEQ ID NO: 205996 - DNA, 1248 bp, Klebsiella oxytoca
atgaatgattgggtagtacattctcttagtgagcttgtttcttttcagaagggaaggaaagttattaccagcccgtttcctttaagtggttatgaaccatatttgggagcgggagcgttatctggaaataatgatggatatgcttgttctacatttgctgtaaaggcgaatgaagaagatatattgatgctttgggatggcgaaagaagtgggctttgttgtagtggattaaatggtgttgtttcatcaactgtttgtaaacttacaccaaaaaaaggtattcgcagtgacttattatattatttattagttaataactatcagtggattcaaagtaggagaaccggcactggggttcctcacgtcccaaaggatttaggaagaatattacatataaaatatcctaagtgtttgaaagtacaaaaaaagattgcagatatattgaaaactgttgatcaagctatagaaaacactaattttttgataaataaatatcaaaaaataaaagcggggatgatgtacgatctatttacaagaggtgttgatagtaatggcagattacgccaaactcgtgctcagcaaccttatttgtataaaaagacaagtattggttggatcccaaaagaatgggatgtacagcagtgcagtcaactttgttcaagaataaccgtgggtattgttattcagccaacgaaatattatgttgaagagggagttcctgcgtttcgctcagccaatgtgagggaagatggtcttgattcttataatcttgtatatatatcacctttttccaatgcacttttgagtaaaagtcaaataaaaacaggtgatattttatcggttagaacaggctatccaggaacaagtgcagttgttcctgatgaatttaatggatgtaattgtattgatatattaatctcatcccctaaagattctgtagataaaaattatctatgtttttggattaattcttcgtttggtaaagaacaagtcttacgccttcagggagggatggcacaacagcattttaatgtcggagagatgcgtcagctattagttgctgtcccctcaattaatgaacaaattattattagtgataagctaatggcgtgctcatcaaaaataaaaaatgaaaaagagatattgaataaattaattagaactaagtctggtttaatgcatgaccttctaaatggtaaagttagagtaaggttagcagatactagtatggagtccagccatgtctga

SEQ ID NO: 205997 - DNA, 249 bp, Klebsiella oxytoca
atgttttttccggggcgaaacgatccgaataagccaatgagtgaggctagcatcaatcaagtgatcaaacgtgttggctatgctggaaaattaaacggtcatggctttaggcatatgatgtcaacaatattacatgataatggatttaattctgaatggattgaaatccatctagctcatgtagataaaaatgctatccgtgacatatataatcatgctgtatactttgaacaaagaaaaaaacactga

SEQ ID NO: 205998 - DNA, 597 bp, Klebsiella oxytoca
atgtacttctggtctcttagtgatgcatgcgggatgaaagcgcgctctaaaccttttgcgtgcccttacggcaagcctggcgacaaaatctgggtgcgcgagacgtggggagtcgtcagccacgaacttgatgatgatggtcgaattcaaccttggaagccagaccgaccggctacagccattcacgaaatgccgtttggcaatggttatttctctggtcacgccatttatgcagctgatggcgattttacctggggtgatgacgatggttatgaagatggccgttcgtgctggaaaccttccattcatatgccgagagcagccagccgtattctgctggaaatcaccgacgtgcgggttgagcggctgaacgctatcagcgaagaggatgcggaggcggaaggaatcgacatggaggcactttatgactctcaggactgttacgactgcattgcagaccacaatatgaccggaaggccaacggtaacaggcgcattcaagtacctatgggaatccatctacggcgaggaaagctggaaggctaacccatgggtttgggttatcgagttcaagcgcgttgaaggcggtgcagcatga

SEQ ID NO: 205999 - DNA, 771 bp, Klebsiella oxytoca
atgacaactatttattcatgttcatcattctcttttcccaagagcttagataccatcagccaggatagcatcctgcttcccaagaagctagatggtggatatattttctctgttgctgatggagttggtggatacaatggaggaaaagaagcatccaatctagccatcaaagaaatatcaaaactacaacataaagtaaaaccatctgatattgatcgcatttttaactccatcaaggactcgatatcagctttttcggaaaacaatgaagaatattcatcagccgctacgacacttacctttggttatgttagtgatgaaggtttattgataggccattctggagattgccgtttatatataaaagaaggttcaaaacttaagcagtatacaaaagatcatactcagcaccagatacttattgacaaaggtctatttacagctcgacaactcagaaaacttcaagggggaaatgtcctgactaccgcaatatcatcaaaagttactctggaatttcagtcaatatttataaaaaaagaagacctacctatagaaaataatttattaacaatataccttatgtctgatggtgcacattattactgggaagaccgccctagattttccttaaatacgctaaataacgtcaatcgtttttctgctagcttaatgaggagaatagagagtaaaggtccacatgatgattattcattaattggattaaatatccattttgaaaatgagagcactattagtcctgatgctcattag

SEQ ID NO: 206000 - DNA, 729 bp, Klebsiella oxytoca
atggaaggaagagcgaattatttaattgaccccattgaagaaataggtaacggtgggtatggtgttgttgaaaaaataaagttattcaacacatcacatcatctatgcggactttatgcaagaaaactactaacttctgggaatagtgataaggatgtatatcaaagatttataagggaaataaaagctcaatgcgattgtctacataataatattgttcaaattttcataaccaacctcgaagcacagaaaccttggtttattatggagctagcaaagcacagtctagacgatgaaataaaatcaggcacaatgactacagaagacaaaattaaggtcctcaaagatgttttaaatggtttattatttatccataataaaggttatttacatcgggacataaaaccacaaaatatattaaaatttaacgatgggacatacaaactatcagatttcgggttggcaaaaagtatgacaccatcaaaaagccagtttgtaacaagagttggtgaattctacggctcccctgaattttttgactatggcgtaatggcacatggctactctaaacaatcagacatttattcaattggagtgcttattgaacatttaaacattgacgaaaccgaaagtataataataaaatgcaaacataaacagcttaacaaacggtatataaatgttgagcaagtcataagccaaatttctttgcttgaggaaggattataa

SEQ ID NO: 206001 - DNA, 3417 bp, Klebsiella oxytoca
atgaccacgggtgattcagcatggcgcggagtctggggaagactgggcttctctgcgcttttatcaggcggaattgcctggggtatctggcactttggtgatcaaatggggctgcatactccgttacttaaagggctggtcattgccggtgtcctggttttattgatgctgttgcgccatggcaaaacaattacacttgccatcaaacagggctggcatcgctttcaggcaaaacgcaaaaatgttctgcccgtcgatgaaggccgcgtcaagcagaccgcgccccgcaatgtcaccgtcgacaccatccgtgacgccatgcgtaacctctacggtcgttgctgggggcgtaaaacacgcatcctgctgataaccggtaccgcctctgaggtggagcaactgacccctggtcttacggctcagctctggcaggaagactgcggcacgctgttgctgtggggcggcgacctcaatacgccggcagacagtgcctggctgaccgcgctgcgaaaactgcgccgttgtccggtagatgggctggtgtgggtcacttcggcctttgaccagctctcagcaccagggctggggcagccgctgccggtaccttcagacagcaccatggattcgctctcccacgccatcagcaaccgaatggatatacttggctggaaactcccgctgtatgtctggtccctgcacccgcgcgccggtaagccggaagggcgcattacgcaggcaaccggctgtctgttgcctgccggttgccgtactgaagggctggcagagcaactgtccgccctgacgccagatttgacttcacagggtcttcagcagacctgcggtgaggtgaaacataacttcctgctgacgcttgccgaccagctcattcgtgagccggaaagcgtgaccgcaccgctgtcggtgatgcttaatccgtaccgcccgctgccgctggccggtgtggtgttcagtcagccctctgccggtaccgaacgtgccgtgacgcaccactggggcatggataagcgctgggatgttttacctgagtctgtccgcacgcttgctgccggactgcgtccgcgcaagccgggcattccatggcgcaaagtgtttgcgtctgtcgtcgccctggcgatggtgagctgggctgcatggatgggcatcgcgtatgtcaccaaccgcagccagattgacggcgcgaatgcccaggccgcacttgccgcccgacagaatcagccgctggagcagcgtctgcacgcgctgtctgaactgcagaaaacgctggcccgactgcagtaccgttcagaacacggcgtgccgtggtacgagcaggccgggctgagccagaacaatgcgctgctggccgcactctggccacgctatcaggacagcgtattgccgctgttgcgggatgcggccgcagagcatctgcagactcagctcactgcctttaatgcgctgccgccgggcaacccgctgcgcgagcagatggcaaaaaacacctatgaccagctcaaactctacctgatgctggcgcgtccggaacatatggacgccgcctggttcagcgctgcattgctgaatgactggccggtgcgtaacggtgtaaaaaacggcgtctggcagggtatggctccgtcgctgctgtcgttctatggcgcacagctggtcactcatcctgagtggaaactgcgagccgatgaaaacatggtcagccaggcgcgctccctgctggttcgcctgatgggcgtgcgtaacagcgaatcgaccctgtaccagaagatgctctcccgggtggcgcacctgtatgtcgatatgcggcttgaagacatgaccggggatactgatgcatcaaggcttttcagcactacggaaattgtacctggcatgtttacccgccaggcctgggagcaggccgtgcagcccgccattgagaaagtggtgaaggcgcgccgggacgagcttgactgggtgctgactgacagcaagcgtccggtcagtaagcaggatgatatctcccctgaagcactgaaaaagcgcctgacggagcgttactttgcggacttcggcggggcatggcttgagttcctcaacagcctgcgctggaatcaggccgccacgctgtcggattccattgaccagctcaccctgatggccgacgtgcggcagtcgcctctggtggcgctgatgaacaccctgaacgtgcaggggcgtaccgggcagaccggtgaagccatttcggattcgctggtgaaatcagcgaaaaacctgctcggcggtgacaaggatgccattgaccagagcgccggtgttcacggcccgctggatgcgacctttggtccggtgctggcgctgatggacaagagccgcacggggggtcaggaacaaagcctgcagtcgttcctgacccgcgcgacgcaggtgcgcctgcgcctccagcaggtgaccaatgctgccgacccgcaggcgatgacacagacactggcgcagaccgtatttcagggtaaggcggtcgacctgaccgaaacccgcgactacggcagcctgattgccgccggtctgggccaggagtggagcggttttggccgtaccgtgtttgttcagccgatggagcaggcctggcagcaggtactgaccccggcggcggaaagcctcaatgcccagtggcagcaggcagtggttgctgagtggaacagtgccttcggtggacgctatccgtttactcattccagcagtgatgtatccctgccactgctggctaaatacctcaatgcggattccgggcgtatcgcgcagttcctgcagacccgcctcaggggcgtgctgcacaaagagggcaaccactgggtgccggacagcatcaactcgcaggggctggcgtttaatccggcattcctcaatgccatcaataccctgagccatatctcggatgtggccttcaccgaaggcaatgccgggatgcactttgagctgcgcccgggtacagccgatggcgtgatgcagaccgacatgattatcgacagccagaagctgacgtatgtgaaccagttgcctgcatggaagcgcttcgcctggcctgcggataccgaagcacccggtgcagccttaagctggataagcacgcaggcaggaacccgccagtacgccgatatccctggcgcctggggctggatacgtctgctcgataaagcttcggtcagtgcttatccgggcgttgacagcagttacagtctgagctggaaagcacaggacggacgcacgctcaattacaccctgcgtaccgaggcgggtgaggggccactggcgctgctgaaactgcgtaacttccgtctgccggaaactatcttcagcacctccggtgcagcatcaccagaccaggttgccagtgcaggctatgatacagaggacatatattga

SEQ ID NO: 206002 - DNA, 186 bp, Klebsiella oxytoca
atgagctacgccctgatctacctacgttattcccgcacccatcggaggtgtgacatgtcacagcaatcaaccgcaacgccagatcctcgctacttccagaagctgctaccacgcagcattcgttacgacccgataagcggggtttattacctgatcgctaaaaccaatcaacaggagaaagtatga

SEQ ID NO: 206003 - DNA, 1356 bp, Klebsiella oxytoca
atgacacctgtctggaaaaacgaagatctggaaggagcagtcattggcgcattatttctgcgcggggctgacgctgaggtactggatattctttcccggctaccggagaccgtgttctctgtgccgcagtatcgtgaaatctatagcaccatccgccggcaggcgcacgcaggcagcgttttcgaccccctgctgatttgcgagctcctgccgcatcaccagacgaccattctggaaagtacgcgcgtagcctgggcgaaatcagctctcgctcattacactggattgctgcgtcgcaatgccgggattcgtgatgcacagacggcgctggagggcgccctggagtcgatcaggctcgccagcaacggtgatgccgctttgtccgcactggacgtcgccaggcaggctgtgaccgctatcgatatttcagaggatgctgtgaacccggtccatatctctgacctcctgacggccgttgcggatgaagttgaagcgcggaaccagggaagggaggatgcccgtagtctgatgacagggatcgaggacctggacgccaaaaccggcggtatcgaaccaacagatctggtatttattgccgcacggccttcgatgggtaaaaccgagctggcgctggacattatcgagaaggtctctgcgcaggggcatggcgttctgtttttcagtatggagatgtccgacacgcagatcgccaaacgcatggtttctgctgctggcggtatgcctgtatccagactgaaggcagtcgaaaaattcgaagatgaagactgggcgcgattctttaacggcatggagcagctggttaaccgcagcgtttggatcaccgacgcaaccaacctcaatatcgaccagattgtacaaaccgcaacccgctataagctggagcatccagaaattgccctggtggtcatcgactatctcgcgctgatcaaaattcagagcacggcccgctatgacctggcggtgggggaattgtcaaaggggttgaaacgtctcgccaagaccaacaaaacgccagttatcgccctgagtcagttatcccgcggggtggaatctcgcccaaacaaacgaccaatgaactctgacctgaagaactccggggagattgaggcggatgcggaccttatcctgatgctgtatcgggacgaggtatacaacccggagtcgccggcaaagggtatcgccgaaatcaacgtcaccaagcaacgcaacggcgaactggggacaatttatcgccggttctataacgggcatttcctgccgatcgaccaggacgaagcccgccagcgctcaacccccaaacctaaaccgcagcaacgtcgctacgctaagccctga

SEQ ID NO: 206004 - DNA, 390 bp, Klebsiella oxytoca
atgagccgcttaaccgccattatcagcgcagtggttatctgcctgattgtttgccttggctggctggcaatgcactatcacaatgccgcttctcagcaggaataccgggctgataatgctgagcagcaggtaaccagcgctcagaccattaccgcaaacgtcctgaccaccatgaccatcttcaactccatcgcagaggctaaccagcatgcaaaagagcagatcgcactggacgcatcgggagcctcggctgacatccgggttgctgttgcgaatgatgattgcactaatcgccctgtgcctgctggcgcaattaagcggctgcaacaattcgcgaacggtttacgtcaaggtgccggcagtgtcgctaccggccagcctgacagctga

SEQ ID NO: 206005 - DNA, 144 bp, Klebsiella oxytoca
atgagcaaaacagaattactcctgctggctatcctgttgattattttgaccgctgctctgtggtttatttttagcggacaaatatggtttctggtgagctttctggaaacatggctgtatccctcttttgtggcgccagaataa

SEQ ID NO: 206006 - DNA, 1617 bp, Klebsiella oxytoca
atggatggcgacacgcttcgccaaagcctggcgtcaggcgcagtgggtgtggcgtcagtcaactacatccacgtgttcaatgttcccaccaggccgtttgcttactatctggctaaaaactctggcgatgtcatgctggccataaaagaggcggcagcttcaggtgagtctgtcatcttcgagtctgggaaaacatatgatattagtcagaacgatatcccattcgctcaacggacagaatttaatggcccggaaggaagttacgttaatttcaatataaccaatcccgtgggggcttacggtacttttgatttacgcgccagcaacgaattaagtggtgggagatacaacagatttcgtaatctccggtttcgatacccaaatcaggtaacagcactgaacgagacgataaccgcgcctgtcgtgtacccacctattttccacggtggagcattcgagtcacgctttgaatgtctggatgttggcaacgcatattacgcatttagactcggggggattgttaatagtgctgactcagggtcttcgtcaagggttgtactcgaccagataattggcgcacctctttatattggcgtgtcattaactcaggttctggacgttcctgttatccaaaatatccggtggaattataactacgttgcaggtagtacatctccatataactatgacataacgctaaagcaatggatgcatgataatgctgtggcgttcaggtttgggcgtattgactgggcgaccatcaccaatctgtttgcatacggctattgctatacattttttatgcaggcgtggggttttacgggttctgcagacaggcttaaattcgtcggttgtacagcagatcattgcgtatacccagtttatgcgcaaaattttaccaattacctgacgtttattgcctgcggcttcactggtgatcgcggttctgagttttcccgcatcgcacctaacattatttatattaacgatgttggcgatccagatgcagtcgtttcattcatcggttgcacatgtaataacttttcaggttcggtattcagaacaaacgggacgacgctagagttcattggaggaaaaatctggggctttggttatgactctagtgcatctctaatccgaaacgccattgaattaacagcatcagcgacagtaaaaattaacggcaccaaaatctatgcgtcagcgggattatatacacgttgtgtgtatgacggcgggcacggtaattctgaactgcatataagtggcggcgctgagcttaagggcgcgacatacgaatcctaccgctgggatggcggcgttgatggggggaacaaagaatacattgaccccggcgtgacgatcgagggagctacaacctctgttaatattcgcggcgtcgtttctttttaccagcagaaatatgaatacccgggcaactccatgcctgtttccggcacataccaatccggggatgaagttaagaacaagttcttaacaatacagggtgttgcgggttctcgttacgtaattaagagctggctacgtgtaactacgggtagctcacacgttctgaatgttgactgggttgcgcagaaagtaccgaccggggattaa

SEQ ID NO: 206007 - DNA, 405 bp, Klebsiella oxytoca
atgagcattactgtttcacgaacaatatcgcaacaaaactcagagtcagcgctggggattcagattgaagagactgacggtgctgttgacgtaacgtacacagcaaaatcaatcgtcttcatctccggagacatagccacggttgagtttgaaacatcagttgcaggatacgtacagaccggtattcgccatatcgactgcccatattcaggtggtgacagtccgcttgaaaaggccgaagagtttctcaagcaggcaatcgaagagttagacgctaaatctgctgaaatcgctgcgaaaaagaaacaagaggcggagcaaacagaattagccgaagaaatggcgaaagctgttgaggaggctttgaaaaaaaatcaggaggatgaatctgatgaggagaattaa

SEQ ID NO: 206008 - DNA, 189 bp, Klebsiella oxytoca
atgaggagaattaacacccggcagttaaaaaaaggtcaacaagtaacgatcaggattcgagatggtcaaaagctaagcggcattctggttgataaatgcgactggtcagttggttgccctgtagttgaagctaacgggattaaatacggcattggatatcaggcggaaattgcaggaacttcacagtaa

SEQ ID NO: 206009 - DNA, 216 bp, Klebsiella oxytoca
gtgttgtgcaggatgccgttttccccgggggcggcgcaaagcgccttgcccgggctacgggttgtgcagcccgggcagatgcgtagcatcgcctccgggaattggttatttgggagattatttctgcgcggccagcgcttcgttcacccagccgtcaaactgctgctggtgggctttgatccagccgtcgacgtggctctggatatctgcttctga

SEQ ID NO: 206010 - DNA, 879 bp, Klebsiella oxytoca
gtggctgccgttcaggtagagggtcgcagtacgccccagctgttgggtgatgctggcctgtactttgccgcgcttgttgtaagcgaggttgtagtagtcggtgaactttggcttcacttcaatcaccccgtcctgggtcgcgacgttgtagccgctcatccggctgtaggtggtatcggcgaagctgaaatagccgcgggtggagtagcggtagcccaccagctgaatgttggtgccggtatccgtcagcgacttgttatagaggaagcgcaccgactgcccctgacgatcgctgtcatcgggcagggtggcgttggcctgggtgacatccagcgacagtgcccccagcttgcccatgtttttccccacgccgaggttaaaggaattgtagcggtccgccagctgggtgccgccgtacagcgtccagcccgccgggaggccgtgcagcaaggtaccctggaaaaatttcggctcttcctgctgattgttgccgctgcggtactccccggcggtaacggcatagcgggtatggccctcgcgctggagcaccggaacggaggagtaagggacagagaagacctggctgctgccgtcggcctctttgatggtcacctgcaggtccccgccgttgcctgcggcgtagagatcgttgatggtaaacgggccgggcggcaccgtgctctggtagatctcatagccgttctgtttgaccgatacctgggccgtgccgcgggcaatcccgtgaatgaccggggcgaaccccttctggctgtccggcagcatattgtcgtcggaagcgagctgcgcgccgcggaagttgatgccgtcaaaaatatcgccgttggtatagctgtcgccgagggtcagacgcgagcgtaa

SEQ ID NO: 206011 - DNA, 1767 bp, Klebsiella oxytoca
atggcggtggaaaaactgattgtcgaccatatcgatacctggaccacggcgctgcaaacccgctctacggccgggcgcggcagttcgggtaagattgacctgtacggcattaagaagctgcgtgagctgattctggagctggcggtgcgcggcaagctggtgccgcaggatccgaacgatgaaccggcatcggtgctgctgaaacgcattgcggcggaaaaggccgagctggtgaagcaggggaaaattaaaaagcagaagccgctgccggagattagcgaggaagagaaaccgtttgagctgccggaggggtgggaatgggcgcgtcttgtagaaatatatgatgtaagagatggaacgcatgatactcctaagtatcaatcagaaggctatccattggtcacaagtaaaaatttgtcctctggaaaactgaattttgatgatattaaatttataagcaaagaggcacatgaaaaaattaaagagcgctcttttgtagaattcaatgatattctctttgctatgattggtagtattggaaatcctgctattgttgatactcaaaatgaattctcaataaaaaatgttgctttatttaaatactatagcaaagatctatctgttccagaatatttaagatgtgtgctggagtctttatccttagtgttgagaaatatatcttctggtggagttcagccttttgtatcactaagcaccttacgtaatacggttatggcacttccaccgttggcagaacaatatcgaattgttgtaaaacttactgctctcatgtccctctgcgaccaactggagcagcattccctgaccagtctggacgcccaccaacagctggttgaaaccctgctaactacgctaaccgacagccagaacaccgatgaactggccgaaaactgggcgcgtatcagcgagaattttgacacgctgtttatcaccgaagccagcattgacgcgttacaacagaccattctgcaactggcggtgatgggcaaactggtgccgcaggatccgaatgattcttcagcagagattttattagaacaattaagcacatcacgaaataaaaagctaagacaacaacaagctgataataaagaagctgaaacaatgcttcgtaaaataaataaattaaaaaaggcaaagccaccattcaggttaccgaataattggacgacagttcatcttattgaactttgcgaatacttagttgattgtcacaataaaacggccccatatacagatacgggcataccaataattcggacgactaatatccgtgagagaaggtttctggagcaagacttaaaattcattagccaggagacatatgatttttggtccaaacgttgtccgccatcaccgggagatattatatttacccgtgaggctcctatgggcgaagcattgatcataccaccaaatgttaaatggtgtttgggacaacgaacaatgcttattcgagttatgcatgaatttgtttctaatgaatttctcttgcttgcacttacagagcctcatttacttgaaagggcatcggtgaatgctgttggtttgacggttaaacatctacgtgtaggagatgttgaaaatctaaacatccctcttccaccgctaaatgaacagtatagaataattgataaagttaatattttatttgaatattgcaacaaccttaaatccaacataaaagcatcccaacaaacccagctccacctggccgacgacctcactgacgccgccataaattaa

SEQ ID NO: 206012 - DNA, 1632 bp, Klebsiella oxytoca
atgtctattaaaccccaggccatcgtactgctggccggctggctgctggctgcgccggctatagcgcttaccgcaagcagcagcgggacgggcaataacacctatatgtttatcgacaacggcgtggataatgaattttttattacctctagctccctgtccccgcgcttcagcggcgccaacgtctggacaagatataaaacaaaccagcgtagcctggggtatataggcaactcaggctggaattacaccaaccgctattttgacctgtggatcgcgaactcgcctattaaccaaccgtttctcggtatccgctgcatgactacgggtgatacctgcccggcttccggctatatcactcccgatgtcatcgagaaagaaggctttgctcacgccatgtccggtagcaaattcgaaaacggtagctatggcgccggcgcgctgagccagtccgcctatgaatatttccgcaaccagtcggtgggagccatagatgcaatacaactcaatctttgctatatggactccaaagccgactatgactttgcctccggccttcgctgtaaagatctcaccagcggaggaaagtgggtctactatacgatgaacctcgaaaaggtctcgcatctgactttaaatagcaccggcgcgatggcggaagtctgggttgccagcgacggtacgccaagcgtcagccacggtactgatttatgccagatgggcgtggttgggagcggttcgtcggccgtgtcgggagtcatctgtaaaatggtgtcttacaactttcaggaaaacaagactctcactactcaactgacttttcgcatgctgattgacacagtattgttgggctttacgccctccgcttccgacataaggtacagcggtgatggggtaacctggactaacttcagcactaccaacgtctataacaagatcttcaaaccatcaggcgaatacgtctacgtgttcctctccaacgcctttttcaaaaaaaccctcgcggcgggaacggatttaacaaacaaggatgagcttttcaccttctattttgataacggggtcactccacagtcgggttattatcagtttacgccatcaacattaattaacattgtcccgcgagaatatggcatcagcattattcccagtgacgggcgctcccatccccaagaatccggaaagatcggtagcgaagaaccgattacctttgagtatagagtgacaacctccgcatcgcgtcaggccgatagcatcaccgcccaggtcatcggcgacgccatcaacatgtatggcttgccgttctgtctgtttacctccgcggacgagacgctaaaagtgcccgtcccggcctacctcgagtggacgtccgctaccggtaaagccgtaaaagtacgtaacagctgcggcgaagatcctgtcgatatgaccaatgccgcctgggttcagacggcctggaacgccaatattaacgatggtttcttttttactaccacgctgaaactgctgtttccgatggatgacccgcattcacagttcaccaccaatggccatgactggatgggtgtcgtcagcgccaccgggaacgtaaaagtgaccgccacgtggattggcgtcgatcggggggtatga

SEQ ID NO: 206013 - DNA, 954 bp, Klebsiella oxytoca
atggcggaaataaaagaagtactatcttctataaaggaaatcctaatcaccccaattcaagactcaatcgagttcagggccaagaatgctttttttggtagttttgtaatttcatggattgtttggaattggaaggatatattctatttcatcttgtctaaggatgatgttctttacaaaatatcattaattaaatcatctctacctgtaaagtttgagagttgcaccttatttccttactcttatattgtcatcccgatcatctttgctacaatacttactttgtcatatcctttatttatgtacggcatgttaaaagtacatagatggatattcgataaaattgatttatttaacaatcaaattagcacaagtaaagtcataagaaggaaaaatctaactgaagcagaagaggaaaatgagggaattaaatctatagcaaaagcaagaatagccgtgcgaattgcattaatgcgtcaaaaggaggctgaaaagatctcaagcgttgattcactatggaagaaagagtctgacttgaggacgtcaatattcacactcgagtccaaaaagaaagaggctgaattacttgttaatagtctaacaaccgaatcatttaagctgcaaaataaagtagaaaaattaaatcaagataacatggacttgttaaagatcaatggaaagtatgaagcagcatcgagagagctaatggaattaaatatcgagcatgataagcttaggaaagaaaaaatacacctcgaagatgttgttcgagatttacaatctaacatatcctcaatgaccaataacgtaaaaaaattagatagagtgatagtcaagcttaataaaatcgaagaattaattaaagaaagagcgggtagatttgatgaggaggaccgtcaggagttattgaacttgtgtcatgctgcgattttatcatcccgttcagattactaa

SEQ ID NO: 206014 - DNA, 150 bp, Klebsiella oxytoca
atgacggttggcggagctgacagcccgtttgcgctgcagtttcggggagacttgtcgacgttaattctgatacctggagcaatcactgtcgaccagaaaaataccgtgtatcagtatctgtctggcattaagagcgatctcacgtcgtaa

SEQ ID NO: 206015 - DNA, 171 bp, Klebsiella oxytoca
atggaatggtatttctccatcggtcttgttttgtggattttggctcaaataacaagggctgatgaaaccactggcattaagaataacattctgtgcttgctgatctttattgtcctgtggccgaaggtaattgcaatcattacttataaacttattgtgagggaggactga

SEQ ID NO: 206016 - DNA, 228 bp, Klebsiella oxytoca
atgaccaaatatgaattacttgactcaaaaataatgaacaaaattggtggtcacccaacgccattttccaagctttacgtcagagatgtagcagaagaatgcagccgcattgcgaaggatgagagtaaaccagaaccctttcgcattctcgatcgccgactccaggcactacgtaaagctggaaaaatccgcagcacaacgaagggatgggtgagggctaacaaatga

SEQ ID NO: 206017 - DNA, 246 bp, Klebsiella oxytoca
atgagcaggcatgacttcaggagaccgatagctgagcacatctcaagcattcgctcagcactttcaaaagtaccagcggatgagcgccttcacgtcatcgctgaggcgttgtacgaaatgaacccgacaggagccgatgagattcttcaggcttcttgcggatgctatgagtgggatatcagcatcgactaccgaaacgccgacgtccgttacgcaaagaaaagcgaccaggagcgtgccgcatga

SEQ ID NO: 206018 - DNA, 198 bp, Klebsiella oxytoca
atgataccgttccttatcggcctgctttccccggtatttacccagtgtatgcgcccgttcaattccctgcttttgtcgctggcggcggcccagccagtccttatgcgacatcgcggccatcaggtcgataagtatgtcattgatgtcggttatcacggcgcgggttattgggtcagcctgcgaaggctccttatctga

SEQ ID NO: 206019 - DNA, 285 bp, Klebsiella oxytoca
atggatattagaaaattgctggaaagaattcacgaacttaaagaccgattagagcgagcaaacagaattatcaaaatttgtggtaacgaatgccattcctccgggatttttgcggatggaagaaacggcgagtgctatctcaaggtcgattcatcagagattaaagaactggcagaaagccaaaaggttcatctcgaaagcgaactaaagcagttggaagaagcaaaacaaacggcagaacgcgtgatcgccgggctgctccctgaaattaaacaaaacgcctaa

SEQ ID NO: 206020 - DNA, 195 bp, Klebsiella oxytoca
atgcgcttttgcttcgccgccattgtcacaatccgcaattcccgagctactgtttccgccttccccaattgcgctttgcgcatttcgggaatttacagaattaccagtaataatttcatcaagcctgtcagcatcaatgcgaaaataaattttgtgctcaagccttttatgggtctcaatcaacacaccacgtga

SEQ ID NO: 206021 - DNA, 249 bp, Klebsiella oxytoca; identical to SEQ ID NO: 17230

SEQ ID NO: 206022 - DNA, 327 bp, Klebsiella oxytoca
atgagcacgattacagcgcttccagtagagcgagatccggaatatggcttctggacccaccccgcatttgatgaactatgcggagatcgtgagggcgttccattttccgagtttagggaatggcttgatgcgaacggactggaatcagttaccgagtatatggatagcagcaatgataaatcggtgttggcggagcacgaactgtttgggactttcatccaatggcagcctgaatcaccacatggagacggttggtttatcggatctattcacgataccgaagatgggcctgtttgtgtctggttgcgcgaggtgaagcatggctga

SEQ ID NO: 206023 - DNA, 399 bp, Klebsiella oxytoca
atgaaaattaaagctttagtcggatatttagataaaaccgcgaagaaagctacccgcggccaatgggttgcgtttaccgatacagcttccgggactttttcagtccacacgccagatgatgcccgctgcgaaaatatcattaagtgggctgggtttgactgtcagaaaaacgcaaaagcgaacgctgaatttatcgctgctgctaaccctgaaaacattcgtcgtctggtcaaatacacaacagagctggcggctagtcacgctgagttacgtagcataatgtcagcaatccataatgctatcaaagaagaaggtggactgcgtgctgtcgcggtgatgaatgcagctaagaaagcgtatgacgattcgacagctattgccgaaggagccaaccaatga

SEQ ID NO: 206024 - DNA, 816 bp, Klebsiella oxytoca
atgcagagcgaaataattacgcagaaaaatggaaaaggtatctttgatcgtaaggcttggttaacagagtccaaaaagctgtatttatcagcaaagcttttgagaagtgaaggtgatcgaaacaagagcttgtttctggctacaagtaagaaatctcccgttgtgcatgaatatatcgatatcgcatcagcaacagataaaacaagcaggcttatgttggggtatgctttcgaaatgctgttaaagtctgcgattcttttaatgaatcttggtgcgcaaaaagacacgatagatcttaagtttcgcgattatggtcataagattgataggatggctattgatttggagttggcattaaccgttgacgaattgaagctattgcaaattgcgtcacaagatatagtacttcaggcacgatacccgattggaaaagttaatgatgatgggtatatagccgagttaaataaaagaaatattcagttagcagatggaaatatttttggggatatggttagcctctatgacaaaataaaaaatgtagttgctaagtttgataatgatgtgacaaattgcgcggagtttaatgtgtttagagggagtgattttattctctttatgcgaaatggtggcggactatcatcacgagcaatagtgaccttttcggctaaatttccagatggcagcaaacgtaagtcatatttaaaagaagttattgaggcacattctggcaagattgctttggtatatacatatcgctgggcttcattttcattcttcgaagatacgggtaaaaagcttatcccgcttgtggagtaa

SEQ ID NO: 206025 - DNA, 909 bp, Klebsiella oxytoca
atggctggtcaagataaaaataagattcccgactggaaagctctcgaacaacttgttgccatgatacaaaggcaactttctcccgatgctgtagtgcaacataatgtgatgcttgatggtatccagagtgaaaccaaaagacaggtggatgttctggtggaacagtccatcggtcaatacaagatgcgtattgtcattgattgcaaggactacgctaatccggtggatgtcaaaggtgttgaagaatttcacgggttagtacaggacgtatgtgcgcatcaaggggctttagtctgtccggctggttttactaaatcagctttgcggcgtgctcagaaattacagattgcgctatatcgtccagtttcgacaggtgaccataaatggcgggtggaggtgaatgctcctgtattgtgtgatttcagaaacagcttcatgagttttggaattcgatgttcgtctcctaaacctctgctcataccaaatgagttttacaagttgccagtctacagttccgagaacgagctattgggtacggcgttagggattgctcaggctcgatgggataatggtgctctgccgagtgaaccgggggaacatgaagagttgctgatatttgaggaggctaaaactcaaattgataatggatacggtgacaaggtggaagtaactttaactctccgactttttataaaacaaaatctatatctcggccgtgtacccattgaagatatcaacggcttacaagatgaacataccggacacattgttactaatgctttcacgctgggtggacttaaccctgatgaggtcgaacgagactggcaacgggtcgaagatatgagcgcaattgaatttgaaccccttctgaaagtggttggctataattgctacgggattggctcctga

SEQ ID NO: 206026 - DNA, 861 bp, Klebsiella oxytoca
atggcgttgcacctactgtccgctgaccaagtcgcgtcctcatgccgccagaggatcgaatcgtgcgaactctggttacgctatttaatccacaatcaactaagcatgacgtttggagatggctacctcacaggcgaatcaccttctaacaatccaatattttcggcaagtgttcaacgcagcgccgctgcacggcatgaaactgctcgcataaagcctccgcgtccggtggacacgctgctatttgacgacctagcccgcgtattggctaaagtcgacgtgtacgacaaatggttcaaggcagtgctccacacagatttccccttgggaagtatgcaggtaaggaacatactaaatctgctagtacccattcgaaataagctagcgcatgccaatggagttacgttaacgctccacgaagctgaaagagcactttgctattgcaacgacctaatctcagcgattcagaaccactacacaggagccagcatggcagataaattccctgcaccgatgttcactagaatatcggattctcagggaaatgttcattatccgagtgaccacaggccgaacttctatgggaaggagccgctgaggtgtggtgacacgatcagatttgaagtggaagttgattcaactttttcaccgaatgaatacgatatctcatgggttgtgaacaacatcgcgaatggacaaagaggcaccggtccaatcttcagcgttgtactggatgaaaggcatgttggcctccaattcgctgtatcagctacgctgttgtctcacaagtcttggcaccgtgaccagaattttgatgctatggcgactttgcgatacgaggttttgccacctccagcttga

SEQ ID NO: 206027 - DNA, 1383 bp, Klebsiella oxytoca
atggttgataatggtcttgatgctgtcaatgaaatcattgagcagtataaaaaatataattatccgatgtttattgttaccgataagggagagccggaacaaattggcacattcgtcatcataaaattaaattccaatttctatctactgaccgctgcgcacgttgccaatatttgcagtaaaaaaggttactactacttttttgataatagtcacattgaattcactggcttccttttaaaaaccgaaggttcaccatctgatgttactgatattgcaattctaaaactgaatgatgaatttcaggtgagtggtcttaacgtcgttactgaggaattgcttcctggacccggacaggtttcagatggcatacactcagttatgggatatccagccagtaaaacaaaactgaaccgtcccgagaaaaaaatcaggtcacatcttcacgttttctacaacatactttgtgagactgacgtttacgaacgtaacgatttgaatattcaggagcacatagctatcgtatttgacaaaaaaaattgcttatcaagcgaaggagaaaaggtcacgttcccagacccgcagggaatgagtggaggtgggatatggtgccacgatgttgtttccggtaaaacgttgctcgtgggcatagcttccacttggaaaaaaaacaataaatgtctatttggctcccggttaacacttataataggtgtaatacaaatgtctatagaagatgaaataggtaaagctttcagtgatgcagctgaaaattatgaattaattgtcagcctaattgagctcaaccctccaaaatccgacagtgattatataaatataaaccgcgcttacttcagaatgtgcacaaatttcaaccagtccctgatgatgctgattggggatggaaagccctatcctgccattgtcattctgaggtcaatgcttgaaatattcacaaaggccttatacctcgagtacgtagaaaagcctaaaggcaccgatattttgccaatgatatcaggtgataagaacttccctaactttgcaaacatgtcgaaggagcttgatgagtttttatctaagcattcttatggtcccgataattttttcaaacagttcactaaacgtggattaggtcagtacgaaaagttttcattatttacccacggtcgcggtgactatgtcatagctctgatggagtctgcttacgttccccttcacctggatgatgtacgggatttgatattaacggccaaaggaatgtatgaagtttttgccctcttttactttggcgtacagggagaaaaacataaatttaggctcattagcgaaaaactgatggaatcaagtcagcataatcctgataaaggtaatcgcgaataa

SEQ ID NO: 206028 - DNA, 2289 bp, Klebsiella oxytoca
atgagttacgacttcagaaacctttcatccgcagactttgaggatcttgttcgagatcttatcggaaaagaagaaaggcttcgctttgaagcattctgtgtggggccggataatggtattgatggccgacacgcatatgctggaaagaatgtcatcctacaggcaaagcattatgaagggtcgtcgttcagtaaactgatgaccgctatgaagcgtgagcgcttgtcgatagataagctagcccccacacgctatattctagcaacctcccgtaagcttactccagcgaataaaggcaatctcgcttcgctcatagggccgagcttgaaatccgaggcggatatttgggggccagaagacataaatggtctccttcgtaagtatcctgaggttctcaagtcgcatatcaagctgtggctatcgggggcgggcattttggagcaggtcgtacgcgccgcagcccatacttttgcggcgttgacgatggaagagatcgaacagaaggttcgtgtttacgcatcaaatcccagcttcggcgagtcattagtaacattaaataaatatgggcttctcatcatttctgggccacctggcgtaggcaaaacaacactagctgaaatgctttgctacacctttctgagcgatcaatgggagctagtccctatccgcagtctggaggacggcttttctgccattatcgatagtaaaaagcagatctttcttttcgatgatttcttgggaaaagttgccctcgataggcaggctttggcgcataaggattctgatttgatgcggttcatgaatcgggtgcgccgctcgccgaacgctcgttttatcctgacgactagggggtacatatttgaggaagcccggagagtctccgagtaccttggcgatcaacgccttgatgtgacgaagtatgtgctcgatgttggtgtctatactcgccgaatcaaggcacggattctctataatcacctgcttgtgtcaggaactcctaaatctcacatccaagcacttttggagagtaataagatcgcgaaaattgttgatcataagaattataatcctcgcatcattgaggctatgaccgatgcattacgtaccaacgatataaaatccatcaactatcccacagtctttatcgacaccctgaataatcccagccagatttgggacactgctttccgtacgcacattgatcaccgctgccaacaccttctgattgcgatgtttttcctttcggaatacggcgttgcctttgctgatcttcattcatctttcgataaactgcataccacgatgagcactgcttacggtttgccacatgggcctaaggattttgaagaagcccttcgtattctggaaggtagttttattaaaatcataaacatcagaaaacctgtagtctcttttatcaatccttcactcaaggattatctctcaagctatctgtttgatatagccttccttattcgtcttgttcccacggcagcctcaattgattggttgttgaggctgtggaacttcgtacatacacttgaactcagtgaggtcgatcaagcgaagatcgccagagcctgcattggcatgctggagatgatcgaaacacgtcctccctggcgtccgaaagctggtgattccctctcacttgaatacaatgacgtcgcaaactccaagcggctccaaatgctaatggattggtggcaactcacaaacgaacaacgatttgccgacagtataatgacgattgctcgcaatcccccgcagggttttagtacatggttggatggagagattctgatcgagttcttttctctgcgggatcaaaagagctatagccgacaatttatttacgaagatgaattattaaagatccttgaagaggaactcacagacactataagctgtagttcaattgacatgctttccacgtttattgatgcggtggacgcagcaaaaggtttgccttctagcattacccttgccttaaggagggcggtgctcgaagagttcgaggataatactagccgcgtttaccaggatgacagtgagtcttccttatcggatcggatcgacgctctaaaaaaattcgctccgcgttttggtgtgccagatagtgtattggatagagccatctcagatattgaggagcgtataagcgaaatcgaagaccgcagtagcattgcctcctctccaagtttcccgtcgtccaacaacaagtatgaacaggagacgtttgacgattgcgctcttcggaatcttttcataacccttttggatcgctag

SEQ ID NO: 206029 - DNA, 1152 bp, Klebsiella oxytoca
atgtcttcacaaaaaacaattgagcgctttgttgctacggatgtaagcggtgctatatggttgcgactgaaacgactcacaagctctcaactttgtaaaaaaataatccaaaaaaatcatcctttattacaagaaaatgaatatattaataaatcaatcggaatgtcctccgcaatacgaagtgcaattggatattgggaaactgaaaatggtggtttaaattcaaaaatcctctcgaggtactatgctttattacagataagcttagctgaacaaatttcctcaggagatcctaaagatgatttaaaagctgtgcaaaggcatactgaatctggtcacggactttttactcaaactattgaaaatgcaacattccctgacaatataaaaattggatgtgttcggggtggacatttttatgcatatgcaaaaaaaataggaatagaaattaaaacatatgcagcagaacgtcggccaagaaattctgaagaattggaagcatcctgtacatatactttgactgatttgttaagaagaatcccagaattaaggccattgttaaaagaaattattgatgaaaatccactttcatttcaaatcgggcatgcaagtagaaatacgatattaagaacaaaacgattatcatcgcaaggcattgtaaaatctacaccagagttctcagggtttacatatgcagctatttatacaaaagacgctgggataactgctgaggaacttgattcctatggtttaggaattaaagatattgagcaggagtgtacggaaaatataagtggatatgacgagccatactttgttggtaaagtgtaccatcctgaaaaagagctgtggtgggattatgttttaacgcataaatctggttattgcggaacaagtgtaatagttcctttctggggtactcaagatccctttgtattacacttagttgtattatacgcgcttagtattatagttaggtatcttcccgaaacatggcatgagatagagcatggtaacttggattatattaattctctcttggaaaattatttgacaattttcgatagtgtgttgcctaaacttgcagtggaaaggttaacaaaaacacatctagttgtgacttcaccggatagcatgaattctcctatttaa

SEQ ID NO: 206030 - DNA, 126 bp, Klebsiella oxytoca
atgttctcgttggcagtcgctggcttgtcgtctatagtcgatcggaccgaacttcactcagaccgttttgtattagaagcggagagccataacattatgttgtgctactttatgatgtactcgtaa

SEQ ID NO: 206031 - DNA, 237 bp, Klebsiella oxytoca
atgcgcctgaccgtacttgacgatgatcccggagaacacatagtaccgggccgtgaacgcatcacagcatatcttgatggtaatgaggtgaagcacgtcttctcggctgatgatgataaaggcgaagtgattgccgctgtgcttgatagtcgtggtcatatcactgccgagaacggtgaggtgaaacggcagacattgtacggcttcgtaaggatagagcacttacctaagcaatag

SEQ ID NO: 206032 - DNA, 210 bp, Klebsiella oxytoca
atgttagagaactactactggtctggcgccgttaaaactgacgatcaaaaaaaacgcttgattgctgtacaagctgcacttgaaattgcgaaagcatcagtatctgccaacacttcagatagcaataattcaaaagcattgtgggatcttaaacatgttgcacaagagataaatggattagcggattctattcaggctgcattgaaatag

SEQ ID NO: 206033 - DNA, 522 bp, Klebsiella oxytoca
atgaatattcaaacggcggcgatgatgtccggctggccgacgccggtggcgaatacaaaggatcagccagaaacaaagcgggggctggagaatcttgccgggctggtaaagatggcgggctgggtaacgccaacgtcgcgcgactggaaggattcggcgggaatgactgcgcagcgggacgggaaagagcgactggaccagctgccgcgccaggcgttcatgacgggatggccaacaccgacaacgagcaacactcgatcgccatcagtggatgcggccatgaacatgtatcgacagaacgggagcaagacccagcagcgtctgcaggacttcgcggggattaccggccccttgaggttaacggtttttggcgagatgcggactggctactttgtcgagatggcaaatggcgtccagttgaacccggcacattcccgctggttgatggggctgccgcacgcctgggacgagtcgagcccgggatggcaagagtggcaagtagcaaccgcggcggccgcctga

SEQ ID NO: 206034 - DNA, 504 bp, Klebsiella oxytoca
atgaaaaagacgatcttggctttgtgtgtagctgctatccctctggtatcaaccggcgctgaatatgtaacggaaggctcttggcaggttaagaaagaagaaaacaagatgaccgatatgactgatgttgtagccattaataggtcaccagatgtctatatgagacaaggaattgaaagagctacttccattatcttgcgatgccgtgagggaaaaacggaagcatatctttccgtagatgagtatatggggattgatgacccgttaataaccatcaggtttgatggaggaaagccgcagaaacggagatggagtgctgcagaggggggcgaggcggcgttcagccccaaggccatacccttcataaaggatatttcctctcataaaaaaatgatccttgggttcgagccatatggttcaacgatgcaagtagttgagtttgacctcactggagcagattcaatagcaaaagaaatttcctcttcatgtaagtggaaaatgtga

SEQ ID NO: 206035 - DNA, 381 bp, Klebsiella oxytoca
atgaagaagttactcatggttatgatggttagctttgctttggcagggtgcgcttcaagcggaaatcagtcgctaaagaaagaatctgaggcaagcgtcaagtcaaaaatagttgagggcgtaacgaccaaatccgatatcaaaaaaaccttcggatccgcctcaaagacctcctttactgatggcggtaaagagatatggacttacgagttagctgatgtttccctggatgctgtcagttatattccggttgttaactggtttggttcttctgcatcgggaacgaaaaaagaactggtcatcatgtttgatggagacaaagttcagcgctattcaatgtcagagtctccggtttcaacgaaaactggtgttttcaaataa

SEQ ID NO: 206036 - DNA, 189 bp, Klebsiella oxytoca
atgtataaatataccgttagttacacatgcaatgagaaggccttcgatttcatttatcagcacgaatctgcagcgttcccagaccctgagaatatgttgcatttggctgcggcgaatttgcttgaatatcaccccgaagaaatacctgtgactaaacttagattgaccgctatcgtattgattagatga

SEQ ID NO: 206037 - DNA, 210 bp, Klebsiella oxytoca
atgattttatctttctgctcgttgcttaggcctgaccatatggaggcaaaaaaaccgaaaattttcagaaaaatgtttatcactgcaatacctcatggctggatgataggagcgacattaataagtatcttgcatgccattactttgaataaaaatgacattacttcacaaatacagatattggataacgcttacaagtgttttcagtag

SEQ ID NO: 206038 - DNA, 330 bp, Klebsiella oxytoca
atggttaagcttaaagatgtggtgcgcaatgtcatctctggagctaataaacagcttccagaccattcgacaacacaatctactgcatctactgctctggcaactgagatttacaccaaaatctcttgtataggtcccagagcgttaggcattggtggagataagcaatctgattttgccaatcaagctgctgaactggtgaccgatgaaaaatttcttgacgagcttcaagataaaattggtaatcctcaagccaatgagaatgaggacgaatttattcacagagccaaaaaagaaatgtgcaacctgttgaaatctaaattaaagtag

SEQ ID NO: 206039 - DNA, 531 bp, Klebsiella oxytoca
atggataacagtttcataacgaaagaattgggtgagcgtaacccatatcctaaagaactttatgaaatatctatgaagtttactatggcattttattattgcgaagatcatttcttttctaggcgttgcagtattcgcgaaagtgatacatacagcaatcgtatcctgagtatagttgaagacgaatgcagcccagtgatcaccgagacttttaaatttttccaaggaagatacatggaaggggaaatggctcgacatcgattgtatgccttaaccatgcaagaggaagggggcgatcttactggattagctgaagctatttatagatatttggaaaacgctgatggagatattcatgcaatgttgtcggtgtgtttaatggttattatcagattgcgacataatcttttacacgctaacaagtatgaagcaatgattggcgagcctgaagagcaaaagatattgatcaatagaggatatatgttgctgtcaagtctactattcgcaagaaatacaaagcttgctgtttga

SEQ ID NO: 206040 - DNA, 318 bp, Klebsiella oxytoca
atggggtttccttcacccgcgacggactacgttgagcagcgtctgtctgttaactcgatctgcaatgtcgggcctaacacccgcgttttcgaaatggatggtggttatgtcgtagtagatattgggcttaaacccaggcagggaagccagctcattattttatacgatggcaggtctgagcttgcaaagctgatggggcgatcgcttataaccgaagatggcgaagcgattgaaggcgaggctctggatgatgtcactgtcgccggcgtcgtgacacatatcatttgtgatgtgcgaagcgatagcctggcggtttaa

SEQ ID NO: 206041 - DNA, 240 bp, Klebsiella oxytoca
atgcttcgacagtcagacatcgccgcggctttccgcgagtccattttgcgcagttccaaggggttccagtaccttcacacccgcgacttcgttaccgcgcttcgccggcgcggcatccacttttccgaggtggaggctaacgcctggatcgctcgcgagcagtcatatttcatcgataaaacggcagagcatagtgaaaaccgcctgtggatgatggccaacatggggagggtcatctga

SEQ ID NO: 206042 - DNA, 1026 bp, Klebsiella oxytoca
atgactcaacttgatggaatgattacaaaaaacaggtcctcatcaatagatactttacgcttcatagctgcgggtatcgtgtgtctggctcacgcaatccctgtagcgaatctgcactttatagttcctgaattcacgcttgggagggttggagttgttatatttttcatgataagtggatatttgattccagtttcattgaacgctaaaaatggtgggcttctgggattctggatatcacgtttttttcgtctttatcctatgtactgggtttcaatcgcccttgcgatatttattttaaataaaaacaatctgattgacattgccttcaacattacaatgttccaggctcttttcggcgttaaagacatgatcggagtgtactggacgctaatcatcgagatgcttttctatatatactgctctgtaatgtttttctttggtttgctgggtacaaggaagtatgttcttgcatcatacttcttaatgatacttaccgccttattattttctgctgttaaattcacactcaataaaaacctacctgttgcaattcctcttttgttctcagtcatgtttattggatacacaatcaaattaaacgaaagaggaattacttcaaagaaagacattacatctttaatcgtttcttttatagccttgataccttttatttcatacctagggtactcagatgacaaaaccgcatcacctgagctttatataataagttacatcgtcggggtagttttgttcatcttattattcagagtcaacattaccaacaaaatcacccccagacttggtgaaataagctactcaacatacctcatacatccggttgtaatgagcattgtattctcctcaacagctatagctcatattgataagtggatattattcattgcatatatgggtattgtatattttatgtcagaagtattttttagatacatagagatacccttcatatctttaggtaaaaaggttaaaaagttatctcaacgtggtgttgtaatgcagtaa

SEQ ID NO: 206043 - DNA, 192 bp, Klebsiella oxytoca
atggagtttgaaggctttcacggcacagatttcaaaaatcgtgattctattctgtgcaacaatttttctgtgagcgcaaaggatgacgaatggctaggtacaggtgcctactttttcatcgatggtattagtgaccctttggttgatgccagaaactgggctaaggaaggtgcgaacaagttcctgatatga

SEQ ID NO: 206044 - DNA, 516 bp, Klebsiella oxytoca
atgctcatgagcaaatcagaatatgccaggcatcgaggcgttagccgtcaaacggtttacgattgggtggcgaaaggtgaggttgttttattaggcaataaaatcgacgtagaggccacggaacgcaacatgctgaacgaacggaaagccccgggtgaaaataccccatgcgcactggaaatgacgtacgggcaattttgggcggcagttaaggcgttagacgggaaagctcctaagccaagcagcgatgaggagataaagcagagggtgcagcttgcagctggcgaacttggttgggatgttgaatttctggaaggcaatgggattttcatgtgtgacggtgacactgaattctacctaacgcagtacgaccagcttattcaaaatgcagatgtggccatcgggcttatccggcgtgacctctgttatgcagcttgcgattgccctgatgatgaggacgaatggagcaaagaaggactggcagcactcgcagaatggaaagcgggcaatgtgtaa

SEQ ID NO: 206045 - DNA, 177 bp, Klebsiella oxytoca
atgaataacatcgaaaaaatgaagcctgaaaatcatgaggcggcatcggttgagaaggttcgcacatggcaagacgatttagcaaaccagccccagcttgatagcaatagcgacattgtagagaggcaattacggggaagcattaacggaatgagtgttaattatatgttaagctaa

SEQ ID NO: 206046 - DNA, 663 bp, Klebsiella oxytoca
atgccattaatacgacctgcagacgagcaggatgtggtgcatattgtccaaaaaaaggccaaattagcagtaactaatgcattgcctggtatcattcgttcgttcgacccagaaactgttacctgcgacgttgatatagccgttacgctcagaatgacgaaagcgggtaccttgtatgaagatttccagtatgaatccgcccgctttccaatccttgtcgatttgcccgtagttttcccgcgcggaggaggcgttacgctgacctttccggttaaagaaggtgatgagtgcctgatcgtattttcttcgcgtagtattgatttttggtggcagaacggcggggtacaagaaagggctgatggtagggttttagatctctctgatgcgttcgttatccccggcccgcagtcacaggcaaagaaaatcagcggtatcagcaccacggccgcgcagcttcgaaccgataacggatcggcattcattgaagttgcatcaaacggcgctgtaaccatcacaagcccacaaacaaccgttaacggccctttccatgtcaacggtgaaattacttccacaggcgaccagacagcggcaggaatcagccagatagatcacactcacgacggcgtggagtctggcggcagcaatacaggaaaaccacaatga

SEQ ID NO: 206047 - DNA, 345 bp, Klebsiella oxytoca
atgaaaaaattaatattgttgttcggtttatttagcgcgattggaagtcatgcagcgcagagcatcaccatgcaatgcggaagttttcgatttgagatgatagaaaactcgatggcgagaattaatggtgagtatgtaacctctcagaaaattacagagtttgggcagaatggggccaaagtagaaatgacgctcatgcctgccagtgacggtaatttgtacgggtttgaatacattcatcccgatgatagcaaaaagcattggctgaacgtcgagcttatccgcaccaacctgaatcagggtcggatcattggtacgtttgactgtaaacgcattaagggttag

SEQ ID NO: 206048 - DNA, 1068 bp, Klebsiella oxytoca
atgtcacaaaactggatgaggcattttgaactgcagcttgttggagagaacgggcaagggatcagtttgagtgacttcaaagttacttttcaaatagagcgtaacgataacaaatggccggccgtaggcaccgtcaaaatttataacctgtctgcacaaacacaaaaccgaatcatgcaacgcgagttttccaaaatcattatgattgctggctatgatggcattgctccggatgtcatggcgaatgaggtaggcatagcccgtaaaatatcagcaagcgaagtgggtcaggttaacggcacaaactacggcgtcatttttagcggtgatattcgttttactgtgaacgggaaggataatcctgttgattcctgggttatggtacaagcgtgcgactcagaagaggcattcaccagtgcatttatcaacgcaactatcagcaaaggctacaccaccgaagatatttacgttgagcttatgaaaaggctggagccttacggcatttcgcgcggcattgtccccgaatttccgccaacggtgttccctcgggggcgatctctgcttggttttgttcatgattatctcgacgaagtggccgagcagtgtaaggccacctggcaattcaactatgggagaattgatatagtcccaagagacaaagcgacccatgaagctgtggtactcaacgctaattccgggctgatcggcatgcctgagcagactataggcgcaggcgtgaacgtcagatgtctgattaatacaaaaatacagttgaatgggcttattcaattggatcaggcttctgtataccgtagcgccttatccgccgaccaagtagtgcaggctggtggcccgatttcagtagaaagccagaatggaaaccttgttactacgggaataactcagagtcccgcgagcattgctactgatggcgtctataaggttaggtatatcagttacacgggcgacacgcgcggccaggcgtggtatatgaatttggcgtgtgaggcgcggggaaacacagatttattttcaagttcatttatgaataagcagagtcaagaatga

SEQ ID NO: 206049 - DNA, 555 bp, Klebsiella oxytoca
atgccaaatctaaagcagttcaatgctcaacccgtagctaacggcgtcgtaatcacagctaactacgacgatggaagcactacttcattccccactgataagcaatcatccgaattcatgacctctatcgttcaggctcttgcagctgccaacgatcggattattgccgttgagaatcgtgcggcagcagaaaggcgcacagcagaccggaaatataagcgcactggcgatagccttgaaaatggcagcgctcctacaacgtgtgatgctgaattcatgcgactggtacgcgctgtatgccctaaatacaacgagaacactaaggatgatgatccgcgccttgttgcccttgatgtactccgttacgcccccgctgaagccttttccgcagccttctcgcgtcctatgtcagaaattcagttaagcgaagccatagacgtactggcacaggtaggggattacatgaaagcaaataatatcgagcctaaaccgtacaccacctttgatacgatcaaggctattggtgacgcagctaaaaaacgttgggggaaataa

SEQ ID NO: 206050 - DNA, 1773 bp, Klebsiella oxytoca
atgaagaacgcaccaaacgtaaaggcgctgccgaaagacaagtttacggaggcgattattttcgctggtgccgatgcgtggagccatgcaaaaggctgggaagagggattaggtaagcagattgccgaagataccacacctcctgtttatttgggccctcggcaactggaggagctggataatctgcgcattatagatgatggccgcagagctgcacgggtatatcttgctggcgatattgagccgctgatgattaacgcgattggcgccaagctggcgctggcaggtgtgcaggatgccaaattgtttaaaggcattcccgatctccagccggaggactggtgtgattttctcaagcggataagagatgatttggatcgcggtgatagtgccgtcattgagccgtccagtggctctataaatctgattcagaaggccgacaacgaaaaggcgttgatgttagcggatcggtacgagggtattgccattcacgcagagagtgaggcggtttatctttaccgtgagggggtatgggttaaggcggcacccttagagttaagccgtgaaatggtggctatctacaacgaaaaccatactaatttcagcaaacgctctgtaaataacgtcattgatgcgttaaaaattgtcattccggttatgggagagccacgccgtagcctcatcccgttcaaaaatggcgtgtacgacatggaaaccggggctttctctgagcattcgttagacaactggcttactaacgataacggtgtgatctatacacagccggagactggcgaaaatcttcatgaccatgcgccaaacttccataaatggctaagttacacagcaggaagagacgcacttaagatgcagcgtatcgccgctgggctgtttatggttctggcaaaccgctacgactggcagctttttcttgagataaccggcgagggcggcagcggcaaaagtgtattcactcacatcgctactatgctggctggtgaacacaacacggccagcggcaatatggcagctctggacagcgccagagggcgggcgcagttcgtaggcaaaagcatgataaccctaccagaccagcccaaatactcaggcgaaggaacagggattaaagcgattacgggcggtgacgccgtagagattgacccgaagcacgaacaccagtacaccgccgttctgagggccgttgtggttgccacaaacaacactccgatgatttttaccgaacgggccggaggcgttgcccgccgcagggttatttttcagttcaataaccgggtaagggaggaggacagggaccctgatttgtcggaaaagatatccgcagaaattccggttatcgtccgccgtcttttggctaacttttccgatcccgaaaaagcaagaatgctcttgctggatcagcggaatagtgaggaagccttggaggttaaacagaaaacagacccgctttatgctttctgtgcctaccttgaaaagttgtcggagtgttcaggaatgctggtgggaaaccgtaatccacctctctatccgcgagtgtacctctatcacgcttatctggcctttctggaggctaacggcttcgataagccgctaaccctgaataaatttgctgagggcatggaaagcgcaatgcgggagtttaaccacgaatacaggaaggagagaaaaacgcgaggtgtagtaaccaatgttgagctttcaggcagcgcggaagactggctgccacggccttaccctaatcccgctaagaaataa

SEQ ID NO: 206051 - DNA, 369 bp, Klebsiella oxytoca
atgagcagtaacgtgaaatttaacgaactggaaaaacgcgttgctgtgctggtggagaaggtcttgcaccttgaacagcgggttaactcactcaccagtagccaagggggagaaatcccggcaggcatgaagccgatcaccacgttggcggctgagtttggtatttctacgaaaaaggcggaagaactggcgaaaaacacaggcgtaatgctggtcaggatgaaatcagggggatttgtggcaccagaagataaattcagggaggcagcacggcaggtattgcggggtgctaaacggaaatacggatctgcctactggtatcacccgttgttaggcaaattccagatgagtggaggggtgccgaaatga

SEQ ID NO: 206052 - DNA, 309 bp, Klebsiella oxytoca
atgaaaaatttaaattccggcttaattgctggcgcccaaactcaacctaaatttacctggttgtttgtggctacttacgttgatccgcaagcgcgttcagttgttctgcgtactcaggccaataccgaatatgaagcccgttcacagttggatggtgacttctcgctgacatttgcggccaatatccgtactgattgccctcttacctgccattggatggatcaggatagttttgttttgtggtctgtcatgggctgcgatgctcgcaattcctttcatcaaatgaacgggggcaaatatgagcagtaa

SEQ ID NO: 206053 - DNA, 201 bp, Klebsiella oxytoca
atgggtaagccaaaaaaatcgcatcttattcacttttcgttacctgtcccagagggctttacgggacaaatacttgtgaatgttgaaaaaggtattgccattaatggattcccattaagaccaggtgaatttgtcggctcagtagatagttttattgaatgttgccgtctcgcaggctttcaggtaatgccgcctcagtaa

SEQ ID NO: 206054 - DNA, 183 bp, Klebsiella oxytoca
atgcgtaaaaccttccagatcgacggatgtgctgttaataagcgcgggtatacggtaggcattcattacaccatgaccagtaccagtccagaaacggccaaatcgacagcgcaattactggcgtatagaggcgggtttagaaatgttcgtattaactgcgttcgtgaggtacgtaatgggtaa

SEQ ID NO: 206055 - DNA, 879 bp, Klebsiella oxytoca
atgtttaatctccagactttgacagccaaagcccgcgagctgcgcggagacgtggttaaagcggttagcaccaaaggcagccgtacaatgacgcctgtatatgaccgtgatgagcagcgcaagctgcgtgagcgcatccagcagacgcaaccggattgggtattgctctggtgggatattgcgaccgtaaccggctggcgtactagtgacgtttgtaacctgcgttactcctgcatcaattgggagacgggtaccgctacgatcgtagttgcgaagcaaaccaaagccgccgaagcgcgggcaacccgcaaaggcatcgaaatcgtgcgccaacagcgcaaggacgccgcgaggctcgccgctgaccatatcgcctacatgaagtgggatagcatcacctgtgacgctctggcggctgatatgagcgacgaagaacaggcgatagtatttgggctggtggctaaagctgacgttaagcacgacaccaaacagttaccaccgggcatcattaagcggctgcgtgaacgtcaggatcgtaatctggtagaggacgacctgatattttcccgctctcaaatcgaaagtaaccgttgtcagagtctggaaggtagcgttacccgccaaactatatggcgcaaacttcatgatgtgatggcgtggtttacccgttttatcaacgctaaattgcgcctgagcgcctattcaagccggaaaatagcagcctttaacctcatgtccgcaggtggcgagcagggcttgctggtggcgtctgaaatgctgggccatagcaacccggctataacacgcacttacctgcagttaggcagcaaagccgccgctattcagtcccgtttagcaatggaggccggaaatgcgtaa

SEQ ID NO: 206056 - DNA, 201 bp, Klebsiella oxytoca
atgcgtgatatgacggttcaacaggccgctgaaaaagcataccaggcagaaataatccttgccctgatttgcgaagagtcggttgtacatatggaagatagcgaagttgacgcgctgctcgtgatggttaaaaagctgattggcgatgtaggtggttttcttggtgaagaagaatcacgcgcggaggtgggaaatgtttaa

SEQ ID NO: 206057 - DNA, 183 bp, Klebsiella oxytoca
atgcttaaggtttctacttctactcacgaaaaaagcgctaatgaaaaactgcaaataatatggacgctggccgttgccgctcggtatttacgcggcaccgaatggtcacacgaaatgcaggtggaaatgctcgatcttatcgaggaaatctcttccgccgctcagggggtggatcatgcgtga

SEQ ID NO: 206058 - DNA, 288 bp, Klebsiella oxytoca
atggctaaatcaacctgccctaaattcacctggctatttctggccacgccgaaaaaacacgattgcagtccgattgtattgcgtactcaggccgatagcgaagaagctgcgcgtaacacgttcccgggctgggatttaatctttgccgccaaaatccgcaccgaaagcccgtttcaggattgttggactgactccgaaagcggaaccatctggcagatcattgccgacgacataccgccgttatcttcattttgtgatagctccctgcaagggggtcgccatgcttaa

SEQ ID NO: 206059 - DNA, 213 bp, Klebsiella oxytoca
atgtctgtatcgaacagtgagattttgcttaaagtcgaagttaaagcccggctgcgttatcgctcggattcatcgttttatgagtttttgaagaacgaggagaacggctttcccatgccctttaaagttggcggccgcaattgctggtatcgtgatgaggttgaggcgtggatcgggaggcagagcgaaaagcgcggaatctgcagtgagtga

SEQ ID NO: 206060 - DNA, 1230 bp, Klebsiella oxytoca
atgagtagcaagcccctaacccatacagaagtgaagaacgccaaaccacaaaaaaaggattacagcttatatgacgggttcggcttgttgctgtacgtttcggccgctggtggtaagtcctggcgtttcaggtattcgcacccgctaacagggaaaagacagacgctaaccataggccgataccctgaatttagccttgccgaggccagagaagaaagagataaagcccggcgtctggttgcccgtggcgttgaccctgtagaggtcagaagggagggaaaggcgttaaaacagaaggagcacggggagaagttctccgtactggccgctgcatggctggcaaaaaaagaaagcgacggtttacgggaacggtcacttatatataccagaaggggaatcgaccacctgaatagcatcatcggcggcattagcgtacataaaatcactgcatctcacacgctcgcagagcttgagaaatactccaaacatccggccttgagactgaaattatgcagctatgcaaatggggtaatggattttgcagttaacgccggaataatcgcttacaacccgcttctacgaattgccaaagcgctaccgactgtgaaggttactccattgccagcctttgcccctgcgttatttcctgaattccttgatatctgggaggcgagcatatgcggcgagccgacgaaacaggcgctaattttccagatccttaccatgaccagacccgcagaatcctacggggcaaggtgggaagaaatcgacatagacaacgcactatggaatatccctgcggagcgcatgaaagccaagaggccgcatacagtcacgttatcacggcaagctatggatattcttcacactatgaaagcatggcggcgcggtgattatgtgtttccctcgttgaggcgtcagaatgaggcaatcagccgctacaacgtgacaaagataatcagccgttcgaagtttaaagggcttattgttccgcatggcttccgttctctggcctctaccgtgctgaacgaagaaggatttaacccggacattattgaggctgcattagcgcacaaaagcggtgacgccattcgcaatatctacaaccgttcaacatatatcgaaaagaggcgcattcttttgcagtggtggggcgattacgttgaagcggccgggaaaggtgaaatactggaaacgaagggcgataagggattaaggctggttggatag

SEQ ID NO: 206061 - DNA, 717 bp, Klebsiella oxytoca
atgcaaatgggtagtcaagtccgatgcaattacgcacccggcaaggtgggccgattcccacacgacagcagcgcccggcaaggtgggcggatttccacacggcagcggcgcccggcaaggtgggcctattcccacacggcagcggcgcccggcaaggagggccgattcccacacagcaccggcgcgcggcaaggtgggccgattcccacacgacagcagcgcccggcaaggtgggcggatttccacacagcaccggcgcccggcaaggtgggccgattcccacacggcagcagcgctcggcaaggtgggccgattcccacacggcagcggcgcccggcaagatgggcggtttcccacacggcagcggcgcccggcaagatgggcggatttccacacggcagcggcgcccggcaaggtgggccgattcccacacgacagcggcgcccggcaaggtgggccgattcccacacgacagcggcgcccggcaagatgggcggattcccatatcgacatgtatgtagcttgtgttatccgtggattgtgcagctcagcgggtcgcttgtcgtatggcgtagtgtcccccgtaaccggccgcgtgcggccgctaacgcgcagtacggcgccgcgacccgaaggcgggccgccgttcccgcgcgcaggcgcgcggcgcccactgcgcacccccgtgggggacgtacggcagctgtgtggcggtga

SEQ ID NO: 206062 - DNA, 507 bp, Klebsiella oxytoca
atgaagtccgggttaacggttcgtgaggacaattacgccggtgttctcgatgcgctgaagcagctatccggtactgatgtgctggtgggcattccggcggacaaagcgcagcgtgatgacggtggcccactgaataacgccgaaattggctacctacagtcaactggcgcaacggtggagatcgacggcgaaactgtcactctgccccctcggccatttctcgacatgggcattgaggactcaaaacctcgcactacaacgcaccttaaagcagctgctgtcgctgccctggaagggaggccggatattgcgatgttagagctggaaagcgccggccagatagcccgtgacgccgctaaagcagtgatcggcgatggtgacaggctaacacctctctccgagaaaacgctcaaacgtaggcgtgcggaagggatacctggcgacaaacccctctatgcacatggcttcattttgcgtgcgattaactacgtcgtgaggaaaaaataa

SEQ ID NO: 206063 - DNA, 357 bp, Klebsiella oxytoca
atgaagtatctcgtaacttctgccgcaacgttaagctttgcggatggttcaaagtttgaaatcagcaagggcgttcacagcggctctgagttcccggatagtgtgaaatcgcactgggcctttgaagcttatgcaaagcagatcgacgatgccgaggcggagcagctcgaagcagctaacgctgacatgaaggcttatattgcctctctggaaagcgcgaatgcagagctgttaaaccagattgccgaaaaggacaaagaaatcgctaatctgaaggctgctgctgaaacccctgttactgacgatgaaaaacaggagactggcaatgccaaaaaacagtcttctaccaacaagtaa

SEQ ID NO: 206064 - DNA, 189 bp, Klebsiella oxytoca
atgccgatatgcacgctttcagtagaagtaaaaagccgctggtggctgccgctatatctcaaaacgctgacgttattctgccagatgattcagcgagagcctgattacgtaaaggtgtcagcattcatcgtgaagtatggcatcagccagagcgtgaaggtgcagccagcacaaaagaaaatggagtaa

SEQ ID NO: 206065 - DNA, 240 bp, Klebsiella oxytoca
atgaatcaggtaattctcattcttgaagggcaaaagtctcagtcaatcaatgtcgctgatggtattaaatcagtcaggcatcttctttctgatggacgtgaggtgtgcatagatattatgactgctatcgtcaggacttcacacggtgggcaagagtcataccttgttgcaacggatattgatgatatttctccgcgagaaatacagcgcgcggcggagttattgtttccccgtacttaa

SEQ ID NO: 206066 - DNA, 723 bp, Klebsiella oxytoca
atggcgctggccgcaatcgacagcgaggctaaggagcccattagttttgacgaatggtcacgcaaatgcgctttgcaaatcacgctttgccactctgattttcgagaaaaagctcagtacatctgggattcagcgcgtgcaacgcagcagccagcgccggtagtgaacgaggatttatacaaactcgctaatcacatcgccagcagcaaaaacgagctgcccaatgaatggcagggctgggctgaggaactggaggctgatattcgccgcgccgccatgctgcaggaactccaaaaaagtgcaggagtatcgaataactgcaggagtaacgaaaatgtgcaggacctgcaggctggcaactctccggtaattcctgatggttacgtgattgtgccgaaggagccgacaccagaaatactggcggttataaccgaagccataaaatctatgcgtggctcagcggcaacgtatgcaagggtgctcgcagccgcccctcaaccccaaaacgcaccacaaaatattcctgaaattattccgggatggattccggtaagcgagcggatgccggaaagtaacggtgtgtattttggctgggatggaaagcgagtattggaggttaactgcttctttggtggcttctcggctaatcaattcatccatggagaaataacccactggatgccgcttccagccgccccgcaggaggtgccagatggaaaatga

SEQ ID NO: 206067 - DNA, 306 bp, Klebsiella oxytoca; identical to SEQ ID NO: 161450

SEQ ID NO: 206068 - DNA, 273 bp, Klebsiella oxytoca
atgtctgaggtgaatatttccgatattcgcgaggttctgcgcaaccttgtcgatggtaaccgttttacttttgctcaggttgcccgtgaaaccggcttatcaaccggtgtggtcagtggcttcatgaacaacaaatatgccggtgataacgaccgcgtcgagaaagccctgcagcgctgggtcaataaacagcattctgctgccgaactgccggagccgccgcgctttattgagacgccaaccgttaaacaaatctggacagccttccgctaa

SEQ ID NO: 206069 - DNA, 717 bp, Klebsiella oxytoca
atgacctgcttattcgcaccttccctagtgcttttcgtcggctatctttggttgtggttcagagcaaatggcttgagggaaatcaatctgactatagaggaaagtacagttgttattaaaacaggggatatctttaagcaggaaggtttgaaagttatagcttttaatgaatactttgacactcaagttgatgaacgaatcattgctcaagccagccttaatggtaaattcattagagaatactgtgattgctctgttagtgaattagatgcatatatagaaaattatcgatttgattcggatgaaataaaagaaatcaatgcggatcggcctgaaggtaaaaaacaaaaatttgagattggtaccatatgcgtctaccatgattacatacttaccgcgctatctaaattcaacagacacaatgaagcgtatctcaccatgcccgagtatcttgggtttttaataaatttttgggacaaagtgaatcgtgtttacgctcagaaaagcgtttctgtaccaatctttgggtccgggctcaccagaattaaaggtcataaaattatcgatgagcaagatctcctaaagatcatgctttggacttttaggataagcgagatgcgatttaaacaccctgcgaaattgacaataatgatccatgaagggaagattgataaagtcaatcttttagaattaaagactgcaagaaatggcttgtag

SEQ ID NO: 206070 - DNA, 189 bp, Klebsiella oxytoca
atgatgatctcatatcaggaacttgttcgcaccttccttagttacactgttaaggtgtttattacgctgcactgggtagacaaaaaaaaatcatggcgtattatcgatatcattgccctctgtgctgatgtgatgtctgtcactatcaaacaggtaaattatcaaccttatacgaaatcagggatgtaa

SEQ ID NO: 206071 - DNA, 225 bp, Klebsiella oxytoca
atgaaatttatcaaattaagccaaagggtaacggtagagcgccagggcaaatatggctgggtgcctgaaacagtctacgagcctgtgtttgttgctgcaggtcacatcgtcagcatgtttttcgctggcgtgacaattctgaaaatgacctccggagaacgcattgacgtgaaagagaccccggaagaaatcatcgccatgcttaccgaaggagcctccaaatga

SEQ ID NO: 206072 - DNA, 261 bp, Klebsiella oxytoca
atgataccgggcattgcaacacgcatttgctcgctgagcacctttcgctcagacgccagtacctccgccagcgcgccacttcgggttttatcggatatcgccattactttactccgggcattaaaaaacccgccgaagcgggttaatttgttaacagataaatgcgtttttaccaaagtggcactactgggattaatggtctttgataacctgaaagagctactaaagcacttacataagaagaaatgtaaggaaaaataa

SEQ ID NO: 206073 - DNA, 246 bp, Klebsiella oxytoca
atgaagacacaaatgcagattgttcaagaagctatcgctcggctagagcagatgagccgtgaagaatttgtcgaaacgctggtctctgcaggcttggctgatcctgaacctgctcaaaaccaacatcagttatttttccgctcggtttccgttgtagagattgttgaagtcagccgtagcgcctctgccaaagatgtcaatataagtaaaaatggcactgaaaacgcattgtcgtttgcattttaa

SEQ ID NO: 206074 - DNA, 162 bp, Klebsiella oxytoca
atgcgggaaaggcttaatctcttcagccttaattttcccgtcagggagggtgttaacgaaaattttccgccctacccgaatagctttactaattgcggtctggtgaacgccgatggcatcagcagcttttgcctgtccaacttcgtcaacgtattcagctaa

SEQ ID NO: 206075 - DNA, 321 bp, Klebsiella oxytoca
atggagaatgcaatagcccgaaagttagagccgccaatcctcaacccaattgagattgaaggcattttgttaaaccggcttttatccattggccaaaaggtttttgcggaaatgcggggagttagcgagtcgacaatcagtcgccgcaagtcggaggggtattacgccgagatggcgaaggaaatatcagcgttgggtctgcaggttgttccgccggaggcggtagtggtttcacggcactacctccagtcagtagaaacgctggcagatatcggattacgtgcagagcggtgtcgtccagggccgttagggtgggattga

SEQ ID NO: 206076 - DNA, 549 bp, Klebsiella oxytoca
atgctgactctgacagcgactccgattccgacagtgattcggactctgactctgactccgacagcgactcggattccgacagcgatgctgactctgacagcgactccgattccgacagtgattcggactctgactctgactccgacagcgactcggattccgacagcgatgctgactctgacagcgactccgattccgacagtgattcggactctgactctgactccgacagcgactcggattccgacagcgatgctgactctgacagcgactccgattccgacagtgattcggactctgactctgactccgacagcgactcggattccgacagcgattctgactccgacagcgactccgattccgacagcgatgctgactctgacagcgattccgactccgacagtgactccgattcagacagcgactcggactctgactccgacagcgactcggattctgacagcgattccgactctgacagcgactcggactccgacagcgactcggatatcccgcaggccaatgcggataccaataccgcgctga

SEQ ID NO: 206077 - DNA, 369 bp, Klebsiella oxytoca
atggcactgaccaaaaaacagcgcgcagagctgcgcatgaagtttggcggccgctgcgcttactgtggctgtgagcttggcgataaatggcacgctgaccacgttcagcctgttatccggttcgacgggaagatgcttcatcaggagcgagacgacatcaacaacatggttccagcatgtcatccatgcaatctgcacaagcactgcaatagcctggatgactatcgccgaattatcgacgatgggcgcagagagttcctggtgtccgggaaaggaaaggcacttgttcgcatggggttggttgaaatgaaagctgacccggtagtgttctggttcgaaaagtatcaggcagaaggatccaaccaatga

SEQ ID NO: 206078 - DNA, 342 bp, Klebsiella oxytoca
atgttgtttatcaaagaaaactcctgtcggagtagttttcgacattccacgtatcgtttccaagacgcctccttttccataggcaatgactggagtaccacaggcctgtgcttcaactggagtgataccaaaatcttcctcagctgcaaaaacaaatgccttagcattccgcatgcaattttccataatttcattagactgaaagccaagtatttcagtatttgcacttgctttgtcacgtatctttttcatttctggaccatcaccaatgacaatcaactttttatcaggcattgccttgaatgcatcaacaatgaggtctattcttttatatggcactaa

SEQ ID NO: 206079 - DNA, 192 bp, Klebsiella oxytoca
atggcaaacaaaagattttctgtggttattaatggcgcaggtggttacagctcatatcgcgtcaaagccaaagactggaaacaggcggaagaaatagcaagagagatgcacaaacaagactgcccagaagatcctgaatgggaaatcggttgtgctgcggtggtctcaggctggccaagcatctggtgctga

SEQ ID NO: 206080 - DNA, 204 bp, Klebsiella oxytoca; identical to SEQ ID NO: 92423

SEQ ID NO: 206081 - DNA, 354 bp, Klebsiella oxytoca
gtgcgataccgacgtgaagacgatgacggagattacacttttggtcagggtgatgacacctggctggtaaactctccggaggccgtcgcgcaggctattaaaacgcgctttctgctctggtatggtcagtggttccttgataccacagagggtacgccgtggattcagtccgtactcggaaagcaacgacccgaaacctataacctcgccattcgaaaacgcattcttgaaacgcgcggggtgaaatccatcactgactttaataccactgttgacagccgcacacggcgtataacgttcacagcaacggtggaaaccatctacgggacaacgacagtaacctcggaggcgtaa

SEQ ID NO: 206082 - DNA, 399 bp, Klebsiella oxytoca
gtgtggctgcagcatgcgcatgccgatatcaacgatgcggtaagtcactccgccgatttccaccagaccggtgcattcctctccgcagtattcctgcaggaacgacagcacctgctgcgctcgctcttcgtcatagtcctcgactgccagagtcgttttaacctcgcctacgtgctggccaccagcagtgatagtcggcatcggctcgtcagtgcgctggccatcgcggcatgtaccacggagcttgatcagatgagacgtaaccattgcggcatcagcctttgtcgtcatggtttgcaatggctcgctaacgtcacgtggcctgctctgcccagcgcgaccgccaacaccaacaatctgagcagtaaccagcgcatgatgatcgacggtagtaactga

SEQ ID NO: 206083 - DNA, 375 bp, Klebsiella oxytoca
atgagcattaccatcgcgagaaaaataacacaacagaactcagcatcagcgctgggttttcagattgaagaggctgaaggtgctgttgacgtaacctataccgcaaactcaatcgtctttatatctggtgacatagccacggttgagtttcaagtgtcagtggcagggtatgaacagaccggtattcgccatattgattgcccctattcggggggtgatagtccgcttgaagaggctgaagagtttctcaagcaggcaatcgaagagttagacgctaaatctgctgaaatcgctgcgaaaaagcaacaagaggcggagcaaacggaattagccgaagaaatggctaaaggcttagtgagtgattcagatgggtga

SEQ ID NO: 206084 - DNA, 519 bp, Klebsiella oxytoca
atgccgcagcataactatccaaatggtaggccttggtctgattccgacattgcttttctccggagaatggccggtgtaatgacgttgcgcgatattgcgtcacaacttaaccgtactcacgcggcggtacgtacgatgagtacgagactgtccctcaatctacgagatagttataccagttggagctcagtagaaattcagatattgagatcgtgtgctggcaacatgaatgccactcaaattgctgaaaagctcggacgcacgctcgattctgttaaggggaaagccagcctgttgggcttaagcctgctctgcattggcgagcgacatcatcatgcagtttacaccgatcacgacgtctctctgtgtgtagctcttcacgaagagggcctatcacaagcagtcatagctgaaaaaatggagataccagcccatagcgtgcatgcgtttatacacggtcggaggcttactcatgatgatgcttcgtggaggaatatgtctcggaaaggaggcgcttga

SEQ ID NO: 206085 - DNA, 1077 bp, Klebsiella oxytoca
atgagcatagtaggcgattatttcttcgagttcccggcttcgcgcggcatgcagggtggcacggcgacttacatgataacggcaccggcccgcgcgctgacgcgcatacttgcctccgacaatcacggcagcacgctcgagcgttctcaacgcgaaattaaccaggcgcgcgtgaagaagttttaccagtacctcgtcaatgcatacaaaaataaagaacccttcatcatcccgccactggtcggcaactgcgacgcggttattgagtttgaagagttcggtaatacgaatgtgggcgtcgcacgcttcccgatggatgcggtgatcaagctgttcgacggccagcaccgcgccgccgggttagctgagttttgccggacctacggagagccgatcagcatcccgctgatgctgacacataacctcccgctgaaggcccgccagcagttcttctctgatatcaacaacaacgtctcgaaaccttccgctgcgatcaacatggcctatgacgggcgtaatgatgtggcccaggggatggtgacgttcctgtctcagcatgacaccttcgcagaggtgacagactttgagcacaacgtcgttccggggaaaagtaagctgtgggtgagcttcaaggcgcttagcgacgcgacggccaagtttgccaacgcgggcagtaagcctctggaaatgggtgacatcgaatccatctgggaggcctggttggccctgacacagatcgaagcgattcgccacggcaccagccagacagactacaagcgtgactacattcagttccacgcagtgatgattaacgccttcggctatgccgttcagcggctgatggctgaccactcaatcgtcgatatcgtccagatgattgaggatctgccgagctgtgcgggctcctctgagatggaagacttcttcctgatttcgcgctggggtcgaatctgtgtgaacaccgaaaaagaccggccaacgatcattgcctccgttccggcgcagaaatcggctgctgaaaggttggtgtcagtaataagaaacggtgcattggaggaaaaaaatgccgcagcataa

SEQ ID NO: 206086 - DNA, 147 bp, Klebsiella oxytoca
atgaatcacgatgaatttgatgatggtcgttgcggtatgtcgcgcaagggctggcgggctctctgcaaagtcctggctgtaatgatcccattgtgggcggttgctgctcttgtcgctcttcactatgcgggggtgttcaatgattaa

SEQ ID NO: 206087 - DNA, 375 bp, Klebsiella oxytoca
atggaccataaagaatgggttgataagctccgctggcttagtccagagcagatcgttcaggttcattttggtcttcaggaggatatcaagaaattttacaagctgaggggagagggcgataacctcgccagggccgagcatttatgcgagcagatgattgctctatctgaattggcgttcccggccttgcgtcatgctcatgacaaaagggtggaagaatacgagtcgttaactggaaataagtatcccagtgaattttatccgccgtcacattatgggtactctcagctgtcagtcatcctgaaaaaaagaaaggactttcagcgcatagaggatatacgcgagaagctgattaaagagggttggagatgctag

SEQ ID NO: 206088 - DNA, 1104 bp, Klebsiella oxytoca
atggcatacgatgctatagttatagatacacaaaccatcgataattatcactggcgatttaacgaaggtatgctttcacggatgaagcaattttgtaatagtcaggtaaaattcctcatgcctgacataattaaatatgaggttctaagtcatctatcaaaaaaaataaaagagtctcaagatgctttagataagtccctaaaggacgcattagaacactcgttgcttcactctaaagagactgcgcccgtttacgaaagtgctattcatacggtcggttctgatgcattagcctcatcattgatcgaggagtttttaacaaattgcggagcgattgagattaagtgtagtaacttaacaacccttgatgaaatttttgaagcctattttaatttaactccgcccttcgcagataggaagaaaagaaaagaggaatttccagatgctacggttttatttgcaatagaggcatatgctaggaagaatcatatggaaataattgcagtgtcaagggatcaggggtggattgattactgtgagagctcagattatattacttgtattttggatttaggtgaggctctaacgcattttcaacctagaacagcaccatatgaatttgctcagcgtttaatgttagatatagagagtggaaaaaatatttcattattggactctataagaaatatggttattaatcgttatgatgatgttagctttatagctgaggcagattcctaccttagttttgaaacagaggctaattattgtcatgtatcagatgttgaataccacaactatgttaatgttatagatgtcaatgatgattatgcaacttttgagattaaagccacggtgacatattctgcagagtgtgaatttaatttttatcattatgattcgatggataaggataatgtttatttggcaggtgcaactgaatcaacagaagttgatgattcaactagtataatctttaccatatataatggggttgataaggaatatgatgttttggatgctgaggatgttgaattaacatcaattattaaatatgttgattttggctcaattgaaccacattatgaacccgatcacgaatga

SEQ ID NO: 206089 - DNA, 195 bp, Klebsiella oxytoca
atgatggcaacgcaccgagtaccgccgcagatgatgggcattattcccaacaatagcggcggattcggagacgtggagaaggccagtcgcgactttatccgctacgaattaattcctctccagaagagactgcaggaactgaatgaatggctagatgatgaagtcatcacctgtgaaatgtatagtctcgactaa

SEQ ID NO: 206090 - DNA, 594 bp, Klebsiella oxytoca
atgaacacagataatggatttagctcattcgtagaaacgatttctgctcataaggatgtcatggccgatatcgctgatgctggattagaggccgctgataaaatcccattttttggctgggcagttaaagcatggaatataaaaaacacttttcaagaaaagaaactctcgcgcaacatagtggagttcctagaatattcatctgtagacgatgcgaaaaaattcatcgcaaagtttagctctgaagaggaaagagaggagctttgcgatagcttaattcaagtgctaattgattcggaaaaaccattaaaggcaaagctgacatcgaagataatcaacgccatctacgaagaacgccttactgtttctgaggctcatcatttacttttgataattttaaacgcttctattcccgcgctagaagccattgataaattttatcaaaataaccctaaaggctatacaagaacactgaatgaagatgcaagtacttatggtccattgctgatgtctattggagtactttatgtccatggcgatatgacccgcgttaccgagcttggaaaaaaattatacgaaaatgccttcgtataa

SEQ ID NO: 206091 - DNA, 513 bp, Klebsiella oxytoca
atgagcattacacctcaggaagttggttcgttttttctaacacttgttgtgccaataacgacagggatcgccgctgcttggtttactgccaaatttgctttaagtcgtttctaccatgagaaatggtgggagaaaaagcacgcggcatacaaccagctaattgacatccttttcgaaattaaagcgatgtatgactatgcttcagattattatgaggcagtcgcagaaagggggcgtcgcctacagccattgcctgacgggaaagttgactgggtaaggtttcgtgagttaaacgctcaacttcatcgattttacgtacttgcgccaatttctctaagccccttaacgagggagcttttgaataaattctttcaagatgacgcagcggcacagcacagtgttcatgaggaaggttatccagacttcattgcgtattatgaaatggctaaaaccacacaaaatctcattgatgcaatagttttagatgctgagttcgaactgaaattcaaatag

SEQ ID NO: 206092 - DNA, 282 bp, Klebsiella oxytoca
atgcaaaagttaagaatcgaaaaaccgggttgctggggcatgattgatggtgtcttccagcagtttcctgttggacacgaattcatcgcggcggatattccagcagcctttgctggtcgcgtgtcggtagttggcgaagtggaagatcgcgtacttgaagtcgcctctcctggctctgatgctgaagagcagccggagcagccggagcagccggagcagccggagcagccggagcagccggagcagccgaacaccaccgctaaatcgaaaaagggaaaataa

SEQ ID NO: 206093 - DNA, 900 bp, Klebsiella oxytoca
atgataataaaaaacttagaaggtagaattttatacaaaaacagagacgatttcgaaccagacagaataattgatgccatagtgaaagcgggaggtatggaaaatgttgaattaactttttatgccgatgatttctatgaagaagaagcgattaaagcaataaagtttttgaaaaatatcaactacgacattaacaatcttccgattgaacaatacagagcaaatgtagccattgaacttatcaggcaaggctatgatatgtataaaattgcagaatataacatcccagtcattacagaatgtggaagtggtgttttagaagagtgtattaaacaaggtttagacctgaataagttcaatgtggagaatcatttcaggtctgaaatcgaatatgatgaattaggtaatagtcacagggtttactattccgacatatcgaattttataagatataaggatagtatagattacgataaatttagcttgctggctgacaatcaattaataaatgaaaaaaccttaaaagatttagagggagggtttggagtgctatattataactataaatcagcccttaacccaaaaacttttatcaaagttcttaatgcttacgaaaaaatagagttagatgaacagaaaattaatgagcttgattctattgatggtttaggggggttaaaggctcaattatttaacagatatttagaaacgagtaagaacaaagactcagctattaatgaaatctatcagctattagagaggagcggtggaaatattgacagattggaaaatttaccaactcttgaagttataaagaatcatatcaaaaaggaacagaacgagattcaggaagctttcacacacaccgcaccaaaaaccattaccagaagacgaatgtag

SEQ ID NO: 206094 - DNA, 186 bp, Klebsiella oxytoca
atgataataaaagcggaagaaatggaaaaggtaatgtatggcgacaggttgaaagaatttattcccgaaaagaaaaaacctaaattactcgcagacatttatcatgctgaaaatctttttagaagaaacagtatagacaaaatagatatatcaaataaaatagaattagtagtcaataataaataa

SEQ ID NO: 206095 - DNA, 504 bp, Klebsiella oxytoca
atggacgatatgataatcaggtcagttaaatcagctttaaagcacagcaagagaaagggaacgacagcaatggacttcctgttaaccgatagccacacacaatttaagctggacgacagattcgggggtatagctgacacggggcatatgttcgctatcctggtggaagaacactacaagacgagatttaaggacataacaagaaaggggaatgtagtaacgattaaggtagcaagagacatactggttgggttcaaattcagctactcgccaggttctctttctgtttactacaagatcagaataaaaggcaaaacttacaaggagggagtaaaggtaatcgacgggtttaacagaaagtcagaaatcataatcaacaaagttataaacaaagcaagacaacaattactttcaataaaatatattgcttcaatggtcgttgtcgcaatgtttagtgcaggtatgttttatgtaatttttaatctaaatactttaataacataa

SEQ ID NO: 206096 - DNA, 594 bp, Klebsiella oxytoca
atggcgaaatttaatcttatcggtaaaaaccccgaacaagccaaaaaatattttaccttctggacaattgccaatactggggaagaggaaaaatatcaggaagctatggagttatctcttgaacctggattcagcataaacaagaaaaaagttaacggactcttttttatggaagacttgactctttcttgtcataaggaacttttctctctgtttatggataaacaccgtcaaacggtcaaataccacttgtcccgccgaactatcactattcctgaactaatcattgcaaggtatatgggaagctacaccaggttcgccagggacaaagaagtgatagatcacctgaccgctaacattgtctgtttcctcgatgccatgttggccaccggcaaacataagcgattacagcacctggacagttacgagaagcttatagcgaaggtggaagagtattacatgggagataaggcagatttgccgtctgtaaggctctatgaggctctcaaagcgaaagcggcaggtaatgagcaagcggagttgcaggaagtcatagcagcgacgacaggaacgacaaagaagagaagactgtaa

SEQ ID NO: 206097 - DNA, 543 bp, Klebsiella oxytoca
atgattataaaagaacgagacttagtaggcattaaacttatcctgaacagtaataaagtatcatcaagcattttgaactttaaactttgtgttattgaatcagataaggcaagtcagattaagcgaatcaattcaaagaatagttttatttataaagatataacaactaaacagtatcgtaaaaaaaagactggcgaatacatccttactcaggaatcacaggaaattcttgatgaattgttatctgttttcagtaatacaaaagagatctgcaagattgctatccagtattttattagtcgaactgacagaatggataaagacaaggaagaattaaaaagcattgctatggaaattaccgatgaagttttcgacaaggtagaagcagacgaacaaactttaatacttatcattcatcaggaagtaacaaagcatttacttaaaatggattggtggaaagacaatgaagctaaaagaatcgaagcacttagaagagtagaagatataaaacaaaagttagggggtgtttatggcgaaatttaa

SEQ ID NO: 206098 - DNA, 444 bp, Klebsiella oxytoca
atgtcaatgataaatgtattcaatttaacacacccaatagtcactattccgattaccattattatgggatttatatttataaccgtcttgtttaataactttaagaaagcttttttatctaagcttgaatataaacgattaaatgagtcaggtttctttgctaatataaaacatttaatagttagtatatacaaatgggttatgacaaaagtttattacattgtcggtgtcttttttttcagcatgacattactgttttcaattatggtgcttgtttttcaagataaaacattccagttagattttacggcttatatgttgtgtgcttttatcagtattggtttaagtgttttattttacacatacagagatagccattttgacttaaaaacatataaacaagtaagacaggagcaaaaagagaagaaaaggagaaaggtatga

SEQ ID NO: 206099 - DNA, 2295 bp, Klebsiella oxytoca
atgagtacaaaaaacataacaagatatttaggaagtattttcttacttctttcactaacaacacaaaatgcttatgcagaaggatttgatctctttaaacccagcgatgataactggttaataaagaatatctttatacctctgttttatcctgaaacttcgccgtttggtcctatctctggtgtgttccttgcgggaatccttgcttttgggggaatccttgcgggatataccatgcttgccggcacacttcatactgctaacgatggcgagatgttaggtaagaaatggtcttctctctggatacctatcagaacgaccctgggtgtctctatgattatgccgatcaagggcgggttctgtgcaatacagcttatagtgatatggctggcagttcagggggtagggcttgcagatcagacctggaatgcttttgtagaaaacccattgaaaggctctgttttgcctcaaccagttatagacagacaaatcagcacactctatcaaagtgctgttagtggttatgcttgcattgcatccatacagaaagatcaggacgacttcattgcagaaggtaaaagcattggcattattgataaattattaaacattacgaaagaagagtggaatcccggagtaacaacaacaaatacaacaggtgctaataatggtaaaaaacttattatagagtttggaaataaaaacagagaaacttcaagaaatgcttgcggttctatagtttatgacatgtatgctacatcagataaagtcattgcaagtgccccccaggcagcacttgaccttgttgatctcaataaaattcaaagaagtttgattccggttcatgtgactgcattaagtgctttattagcaagagcaagcgatgtgggatacaggattgctcataacgatgcttcaatcactcctgattacattgctaatgatatgaatgtagcgagtgatgcttataaagtcgctatcgctcttgcagcaaatacggcttatcaggattctatatctaaggacacagttgaatcactgaaaaaggatgggtttgtgtcagcaggtgcctggtttatacgaatcgcaatggctcaaagtgctgttaacaatgttgtaaataatgtacccatttcaacgggtgttacaggtagcatgttagaagaatcattaagctggttcggtgaatctaaaaaaacggattatccaactttcgacatagtgaataaaaaacttaaagcctattttgcaaaggcaaatatgataaataataacagtgcaagtggagcaggtgctggtacagaaggtgatcagagtcttttagataaagttatggcatttttctctccagaggaacttggtgctcttttcaatgctcaggcacttacagctaatccgatagttgccataatcaatataggattaactttaatcaatttcacattaataacatacggcatagttacaggagccattgctcttattggtgctgcttctactgttcttgcaggtggtgttatatcagcaaccataatgatcacacctcttatcacagggcttttattcgctatgttctgggcagggatcaggatggcttatgtcattgcatggaaacctttcatagtctggttcggtgcggttataggttggttggtgttagtggttgaatcaatgtttgcagcccctttatggatggtcgctcaccttgcaccagatcaggacggtgttgtagggaaaatggggcaggggtatatgttgattctctctcttatccttcgtccggttctcatggttatagggttcgttgtggcattgtctcttatgaccccttgcttaatgttgataaatgctttcatggctttcactggcgatacgataggtgtaggtgctgccgctttcattggtaaaatcgttatgatcactatctatcttaaagtagtagaagagactatgaataagctctttggtttaatccactccataccagacagtatcttgcaatggattggtggcggtttatctcgctcaatgggtgattatgctaatggtattgaaggtggttcttctcatactactgataagatcggtggtggtagtaagcaaacagcattggctttaagtaaagcctctacatcttcatggcaaaaaacacatgaacagagagaaagaaatgaagctaataccatgaatgcagctaacgggcatgatggcggtggctctggaaatggaaataatgactctgctgataaaccgaaaacaaaatcatcagaagataaacccagcttaccactataa

SEQ ID NO: 206100 - DNA, 510 bp, Klebsiella oxytoca
atgataaataaaattgaatcagtaaaattaaacaaaaaggaattacctaaacagataggcagagatgttattttagttaataaattaccccacaacatatatacaagtggaaaagggattttaatatcgaatccatataaccttactgataaattactatctgtttcggcgggagtcagtaaagggcaatattcagttttgtatgttgcattgctaatagaagtaatcgccaaaattaaatcaatgcctaacgaagaaagcaataaagcaatgaacattgttacaagaaaagcttatgaaattaatcaaatgataccaagggtggagaaaaggaaaacaagattatttatacctgaaatgatacttgatgaaatccagggaatggctcctgatatatataaagttaatttaataccagcgttaatatcctatgcattagatttaaaagaaaaaagtggtgatgtatatttatttgaatgtaatcaggagggcgagcattatgataactaa

SEQ ID NO: 206101 - DNA, 399 bp, Klebsiella oxytoca
atgataactaaattctcacagaaactaaacaagtatcattacgatgaaaagaagttaagaagaagatatgttgagttttgtattctttgttatgtttcctattttattttagttgcaacgattgtattaggtgtctttgcaaatgatattttccaaatgtattccgctatgatcttcggattcataatgtccactcttacattcaggtttagtgtaatggcatacggagtgaaatatcaaacaactcactttaatggtttttttagaacccctggggaatggcttcctgatttttcatataatacagtatggaaagaagaaccaattgatatgttagcaatagaagaaactaaatctttaccatacaaaaaacctaacagcttcaatgacattatgtaa

SEQ ID NO: 206102 - DNA, 255 bp, Klebsiella oxytoca
atgatgacttcacaccacgatttatcaactatcttaatggcatggggtgtattagctttgtgtgtatggcttactaaacattatacccgtttagaatacagtaatgttcttacttctggtaatataaacattcagtatttggctgcataccttgcatatcgtgttggctttattgcattgattgttgcttgccttgcttcactggcggtatcagttggcttttcggttggttatttcggtacttattacccttaa

SEQ ID NO: 206103 - DNA, 261 bp, Klebsiella oxytoca
atgaaagaaagatacacccttaaccagggcagaaatgccctttcagacagtgaatcaaatcagcctatcaggatttttttcaccaataatgtttatgtgtgcaagactcaatcaggcatgttcaaagagcgaagccccgaagaactggcaagactgcttaaccgatcagaaaaccagcagaggatatcaaaagggtttaagttgggaagaccgccaacggtagatgaactatcaaagctgttagagaagaaccagaaataa

SEQ ID NO: 206104 - DNA, 2331 bp, Klebsiella oxytoca
atgacaacaaataaaatagaagttttccttgtaagagatggtgatattgattacgactcaataccagacaatgtagtatctgatgaagttgagcaggaagaagaacagcttcaaaatgaagaaagcaatcttgataacgaatctgaaattgaagaagagtatcaggaagacgacgaatatacggaagaagaagacgatcagaacgacgaacaccaggcttctactgtaattggagaagcacaggaagctggttcagatgacccgtccaacaaactggacgggttaccttctcctatacgcaaaaagaaaagggaaaaggaaataactctctatgaaagttttgtagggaaaattactactcatggcatgtatcatacttcaagaaaatcagtaaaagggaaggttgttgttaaggatatacttgtccataacttcccgattttgcccgtcgaaattataaaggctcttgatggagttattgacgaatcagtaacttatattaaatttgttttcaaaagcatcgacggcgaatttaaagaggttattattccttctggtgcagctaatgactttaaagaagttaaaaaagcgggattcctcgcaccttctccactgaaccactcaaaagtattagctcttattaacgatgttatatctaatggctcgttaaataaaaagacaggttattctttgtgtggatggactaatgatttaatgcatcatatcagaccagataatgatctctatgtgggtaaaaaagtaaaggttacggaagtcaaaggaagtgctgaaaaatatttttcaatgctttctgaatttgttttaaattgtcctcaaatggcttttgggcttgcttttgcagctatgggttatatgcgtggatatattactgtaacagcattaactcccttctttattctttatggtgaagccaataaaggtaaatcaaagacatgtcaacttattgccagtttgcagggaaacccaatcaaagggaaaggaaacaacattgattggaatacaactcttattggttttcataagtttctggcaaacaataaccacggtgttttagttgttgatgaattagataacctgtttcttaaacttaatgtatcacatgctgcaacaatgattatggatataacaaacggtggtggtcgtgcttactctgaccaataccgaaacacacaccagggagaaagctggaataactctgtcattgcttctactaacctccgtattgaggatgtagcaggtggaacaatgaaagaaaaagctctgtttactcgtttaatgcaaatcgatgtcgaagaccctattattcataattataaaggcggtcaaagcaggctcgaagaactcactcagatcatgaatgagaactacgggcatttctatccaaaagcgattgaacaaatcaaagcaaaaggcaaggaatataaagcaagacttaaagaactttttactgaattaacatctgacattaagcttgttgacttgcagaacgaacctcgttcactggaaatgctggctcttgctcaggttggtgctgaacttgtcggtgatgtattaggtgaaaaagaaggtgcagcttgccaggcagcggttgacattatcatagaacgattcaaaaggtcggaagacgaactcatatctaaaaagcaaaatgaagatgctgaaacttacgatatgctcaaagactttattactgataatgctcaaagattccgctgggaaaagtatgcttatgtgcagggcaatcgcttagacataagtaaagctcaaatcgatcaggcgattgaatattcaaacaatgcaacaaaatcaaatacaggtgcattaggtgtagttgtccagactgaaattatggatcactctcttgattataaggggtatgtattacttaatccgagtgcctttgatagccttacccgctatggtatttcaaaagataaaatgatttcggcagcaaaaaatcttagggtgctgatagatcaaggtggcaagagcacttacaaacttagtggaaagtacaaaacaatgctttctggtgtaagtcgagcttacaaaattgagcttaaagcccttcatgatattctggaattggaagtaccagaagttgcaccagaggaaaaattgaaggaagttgtacccgcgaaagagtcagatttcacgacagagcaccttcaagagaacgagaacgggcaacttacccctgaaattgaacaacagttagacaaaattatggaggactatgacagattcggcttcactgactgggataacataggagcttccattcaaaataaaaccaacaaaggagagtga

SEQ ID NO: 206105 - DNA, 741 bp, Klebsiella oxytoca
atgaacttaaacaacaataaggacagaataaaagaaatagagagtcttggtgtaagcggggaggaaactccccttaccccacctgatggcattataggtgcgattaacgagttaagagaagaagagagttatcttcctgaacccttgttcgtgggcaagctggttaaccctctcattatgaaagataagccaggttatgctaaaaaaatgaagaagagaaagcatatcacttttaaacccaatgaagacggcttagatttacttgaatgttattacaatgataattatatcgagctttacactcgtgattacaatgaacacttacaagctatgccgatcaaaaacatagaaaaactggcaagggttgacagaaaattccaaaattacctggaagaaatacaattcactttttacgaaaatatatctgaattgtttgatctcttcggtgatacgattttcgagtggggcatggcgacaccatcagtagatagtagcagtcagtttacaagggctgttttgacagaagctatattaagaaacatgccggtctaccctgatttaatgaatgaaaagcaaagaagaattttaaatagattatttattgagataaatcatgaatataaaatggtttatcattcagaaatgacaaaggaagtgagaacctctcattatatttgtggtaaaacttattatgaatctatgagcagtaataaaagctatttattatcatcaggttattga

SEQ ID NO: 206106 - DNA, 1923 bp, Klebsiella oxytoca
atggcacaaccaaaacaatctgtaaatgcaaagggtttaaaagaatataatcacaaaggtttccttgcttcaaactctggtgctaacaatgtagatagcccgctttaccccgctattggggatgcaatgttttttgatgctgtttcaacggttaccgtaactgatagcaatcctgcaaagttagttctcgatatagaggagggagtttatgctgatgttaaaccccaaaccaaatattattataatgaacttaaaatacagggtgtacttggcggtaaggcagtaaacaaaaacaaagaagctcttcatgatcaacatgaaggtgaacattttgttttatatcttgatggtattccacaccatcagcaacaattagcagtagaaatagcttttagagtagtaacccaccctcactattttataaaaaaagaacaaggtaaaaacagacctccacaatggcaagcacatataggaacacaaagtgctcttatatgggggattcatcgtggtcaaaaagattacactggtaaaaacattgttcctgaccatgttcatatatttagatcaatgcaatgtatatcagataaaaactatattgtcgatttccagaacggaagaccaaaagcagttatagatgctattaatccaaatagacgaaatgtattgccatctatgtcgttagctcgcaatgacataaaagcatcagttcaggagcagattaacgaagcatgggcgaaggctggtatagatgcaaaagttaacttcggaactctacaagatcctatcggtgtagcttctgttattaaatctcaacaaataactaccgaagcagaagagaataacgaatctgttgcagaaattgcacagaagcatatcaatgatcaatctcttagtgaagaagatatttcagactcattgaataatcttggaaaccttgatgaagaatctattgaaaaacttgaagcaatcattaagaagacagcatttgatagtgtccagcaagttaaattgaagcagtctcgcattaaagatctcatggcagagattgttaaagaagaacaagaattacaagctatcaataaaggtattctttatgaagctaaatacattcatgctaaaaatcttttaaatgagacttcaagaaaacttgaatcagtaaataaagagcttgaagagtctaataagctgaatgacgagttcaataaaaaaatcattgaaaacacaaataccatctctaaccttaatgacgaattagcaagagaaaggaaatataatgaagagcaagaattacaacttaaccagttagaagcagatcttgaactcgaaaaaaatataaatgcggaaaactccgagcttattacaacccttacagataagaatactgttttaaccgctaatctggaagccgagcaagagaagacagcagaactgacagcggaaaatgcagatcttaaagagaagcataaagttgagatctctactcttcgtagtgagtttgctcagaagctggttaaataccgtaaaaactttgtggctcgtgttaaaaacaaagtcgcaatggctgttgaacatgcaatacaggcattcaaagttaatgagttaccttcattgcttaaagatgcaacaaccaaagctgttagtgagtacaagttaaaagaactaccgggtaaattgaagaaagtaagagaagaagaagctaaaaaatcagcaaaagaaattaaagcattaactaataatgtatctacattaactactgataaagatacattacaaaaagactttgacgaactattcaatgccagcaaacaaaaagcaacggaaatgaataatgaaattactcgtcttaaagaaattctcaaaaacaatggaataaatcctgacggtgataactcaccaaaaaagcctaaaaacgataagaaataa

SEQ ID NO: 206107 - DNA, 591 bp, Klebsiella oxytoca
atgagtttcgatccagaaataagcacaaaagaaaaatttcaaaaccttatagatatatgcaaatctaactttcaaatgactgatgacgaagcaaagtgtttttacattatgatgaatagatatgcatacaaggttgacaaggggccaaatagaaaacctggtaagggatttaatgaattacctacatcgatgtttgacttatcaagaaggtttcaagactgggaattaggttatacaatgaataatagaggtgcttcttttgagagatatatagaaagcaataatgccatagctaaaatattgcttgatccaactgaggcaatgctacttaatcaaatgtgtaactttaataatatacctaaaccaccgtcaaagctaacaatggcaaaaatatttaaattttataaagattctgaaatgcctacggttaaaaataaaatttctatgagttcgtttgaagagcataaatttttcccaatatataaaagttgcgaacaaataatagcagaacatgaacagcaaaatatatcgcaggttttccagaacggcacacctggaagcggagcaagtaaacccaaaagaagaatgtaa

SEQ ID NO: 206108 - DNA, 549 bp, Klebsiella oxytoca
atggtattaagaatccgggatacaaaaaaaagagtagaaacttttttaggcatgttagatagtgcttttataaataacagcggcaaaaataacaacctatccgataaacttacactgaaattcaaaaagaaaatagaaaagttatgtaagttgcatcacagaatttatgatgcacctcacttgtggaaaaataaaaccccgtcattattcaccggttataaaatgctatttgatagccaggagttaaaagtttcattcgttaataataccttagcaaaaaaaaaggtagtaagagaaaacttcattgttgctgaaaatgtctattttacagtccccttttattggagtaattcaaaactacccgtattaaatgcaacatacaggcttgttatagataaaaaattaacaccagaagaaatagagcaagaatttgagaaaatgatatctctgtttgaatgttcattaatatatcataaagggaaagtacccgtttttaaaattgatttgcacaatccagaagtgataagaccaacatacgataaagaataa

SEQ ID NO: 206109 - DNA, 297 bp, Klebsiella oxytoca
atgtctaaagaaaagataggtgttaataaatcaaccgaactgttctatgaccttgcatgcagatcgtttgccgcaagctggaatatgttcatggaagttaatggtgatggtgacgccaatgattatttggatgatccagattttatgagtccatttattatccatgtgattaatcatattcacaacaactttgaaaggttcactgtccaagaagataatagtggtgatattaatcaggttaactttgaactggttgctgcgatgttagtagggtattcagaaaactttagaaagtaa

SEQ ID NO: 206110 - DNA, 264 bp, Klebsiella oxytoca
atggtaaacaacaacgaaaaaagttccatgacaaataaaatatctatagttgtaagcgtgttgtgtgatggaactccagaagtaatgaataccattcaagagcgttttgaagtgtatatggtcattactggatattcagtagaagaaatcatggatgatagaaacttacttgatgagttaaatcgatttattaataacgaactagtcgatgatttagggctggagtatggctgtgtcatcatcaatatcgtttataacaactaa

SEQ ID NO: 206111 - DNA, 627 bp, Klebsiella oxytoca
atggaaaatattttatcaaaaaaacaaaagaaagaattgaagaaaacctatcttaatacagaaagaaaaatcaggaacagcatagcgagcaacaggaaagcattttactgtggtatcgccgttcttgccgttctaacggcatacagcttgttaaaaccgaaggaacagcaaactgtgatcccacaggttaaccaggattacgaaaactgtatgtcatggaacaggagcaacagcataaacaggaagcaatacctttcaccggtacagattaacggtgttgtcgtggattcagccgttaatgatttctgttcaacagacaagaacaggaacaggttaagttcggaacaaaacggactctggttaatgaaatttgatggctgtatacagcaattacagccagatcgttttttcatagagacaatgaatttaactgtattcgataaaaaatatactggggtaaaaaaagaaacagttaatcagtgtgtacgatttgcagcaactaacgataattacgacatttatgataattatctgtatgccgtctatatgactggaacttttatcaaaagtgatattgttgatgatgttattttttccatcaagactaacttttataaacaaatataa

SEQ ID NO: 206112 - DNA, 540 bp, Klebsiella oxytoca
atgaaattaataaagatacgaaataaaggttttagccttttagaaatattacttgttcttgctgtggctgcggctctggttataggtgcatttgtgctttatccgaagctggtagcttcacaaaagatagaaaaggaaagcaagaacataaccaccttacaggcgggagttaaagccctgtatgcaggtagatccaggctctccgggttaagcccgaccgttctgattcagtcgaagaatgttccagacaacatggtgcaggacagtaagcttatcaatgagtggaaaggggaagtagacattgcttactcaggtaatcacggcaaatacacgatcacttacaacggagttccagcggaagcctgttctaagttcattaccggtgtttctggcaacttcgtaagcataaccatttacaacggcggcagcggtggagatgtgaagaacgacgaagaagggaagcccttagatgtcgccaaaacagccagtgcatgtggttctgataccgtttcaaccattatgttttcttcaatcatttaa

SEQ ID NO: 206113 - DNA, 528 bp, Klebsiella oxytoca
atgagactacacacacgaacaaaagctttctcccttcttgaaatgatgctggttctggcggtggccgctgttctcgtcattggtgttttcatgatttacccgaaggtaagttcaagtcagaagatagacagcgatatgaagcttctctcaaccattaacggcggtatcaagggcatatttgcgagtaaggcgaactatgacggcttatctacggatatggtcataaaagcccagctcgtcccggaggacaatgtagaagacggtcagatctggaatgcctggggtgctaccgtcctgatagatacctggtatgacggttcctaccgtatcgggttcgaaaacatatctcctgatgcttgtcctaagttcatatcccaggcaggagccagcttctttaagatccaggtagaaggaacagaagtgaagaacacagcagataataaagattttaatgtggaaacggcagcacaagcctgtgcctcggtttctgataatagacccgtaacagtttactttttcgataaataa

SEQ ID NO: 206114 - DNA, 141 bp, Klebsiella oxytoca
atgagcgatacaacaatgataataggaatgacttttctttattcaatgacattttgtgtggtaatgacagcaatacacacaatcatgttatccaaaaaattaagaaaacttgaaaaacaaattaaaaaacaaacacactaa

SEQ ID NO: 206115 - DNA, 669 bp, Klebsiella oxytoca
atgatggcaatttttagtatgttggtgttagtgccaataaatatagaaaatacagaaatcgcttctcatgttggaattataaaaattactttaatatgctgggtgttgtttcttttttttgttgtcgggattatagcgggtaaaaaggaaagtattattgcagcaataatgtttgtgattttatctttgccatttggtcatgcattaagtaatgacccttcgatagagaaactaactatttcaatgtgcgaaaacgaaaaaaaagcaggaattgaaaaaaaaccatatgagtgcgaggaaatagccaaaccatcatccaactttgaaagtgttttctttactttcggtttaattgtaatgagtttactattaacaaatcaatatattgtatcaacacgaaaagtaaatttattattaagtctttttgaagaagaagaagaagaacattcatcaaccgaggaaaaacaaataaagacaaaaggaagagttgccagcttagtagaaaaagcaaataaattttgtgaaagaccagttgtaagggtatctgtttttattgtcggttcaatcttggttttattaatagcatttatgcttatgtaccatgtatctgttaaagatggtaataactcaaacataatgacaaaagaaatagcaacaacaaaaatctaa

SEQ ID NO: 206116 - DNA, 354 bp, Klebsiella oxytoca
atggaatatatagttttaaaaggcttatttgaacctgatagtgttgcacactttgctggcagcttatttacaatggttttaattggtatgataatttatagtgtggtttatgatttaatccatgattataaaaaacattgcaagagtgtcattaataaacttcgcatatccagcattgatagcttgcaagttgtaatgttattttcattggtgtttgcggtttttgtatttgtagtcttaatacttacacatccttttattgggtttatcatattgacaatcaactggatcatattaggttcactggaatcatctaacggattaaataaaaacaaaaaaggagataaagaatga

SEQ ID NO: 206117 - DNA, 432 bp, Klebsiella oxytoca
atgaattattatgttacggaaataaacacccaaatggtgatagatagcatttttgaatattacatgcagtttaaaaaacaaaatagcaaagatattgactgggcggcaggaacggatgacttaatggaatttcataattggctatgctacaaatatggtgacagatatttcttttgggtgactaacctttataaaaagagaaagaacagacataaaataacagaataccagtataaatatgcagaaagctatccttcttctatgggttgttatggtggagactacaaaagacctcaatattctgtatgtgaaatccccaatctattattggatataactaatcttaatgacagcaaaattgagtctggattgcgtgttaaatggcacttggaatcatttatacaattaaaccaaaaaaggaaaataaaatga

SEQ ID NO: 206118 - DNA, 951 bp, Klebsiella oxytoca
atgataaataaaaaagaaagagaaattgaattagaagaagaaattgaattagaagaagaaattgaattagaagaatgggatgaggacgaaacatatcttgattctataactctgacggaggaagaagacaataaaaaaccagatagcactatcagaatcttattcttccttatccatttagggctatacagagttgcgggtatgtgtttaaacgggttcgttagggtattggcttatatgtatggaataaatatcagtataagaagaagagttgaagaatatacagacagtgtttcttacagttcggcaaagagtaccagtaaccttaataaaatagaacaggcattcaaaaggcagactcaaagagatttagaaaattgtatatgtaaattaccaccgggttataaaaagaaaggtctggaatttatcagtaattacaaagatattcaggacaatgagatttattttacattagccatgtctgaattaaattacaaagccgattaccagacaatacatccttttaatttcaccaatattgtctctggtagattaaagacagtatatttttgttatgatttagagaatatgagaaaagacttagcaattaaagctgcaaaaaaatatgggtatacacacatagaatacagtatgtacgactacttatacaaagacaatatgaaagtgataatttattcatttttatttacggatgaaaaaagtgggtacgaattaagtttagatatatgggattactttgttgatcgagttgaggacgatgattatatttaccaatacacagtgtatcgaacagagattaacggtttggatattcatagtttggttaaatcaaaatatgaaatgcacgaaattaacaaagacagtttaaatatcagattggtattcgaagataataacaatgaactaccagtaaaaaagaaaagactttaa

SEQ ID NO: 206119 - DNA, 282 bp, Klebsiella oxytoca
atgaacaagacagagctaacacaaagactatatgaagctgatttgataaataactatgccattactggtagccaggagagctatctctttatgactaaccagaacggggaagggtactactggataaaccataatggcgaaacactggggtttataaaagaagatctggacaagatttacagcgaagcaaaagagtatgggttatcggataaaagattccatgtggtttctaattgcatagtatacgaaaaacattgcagcacaataatgataaacttttaa

SEQ ID NO: 206120 - DNA, 645 bp, Klebsiella oxytoca
atgggaataaatatagagggtaaatcatttaaaagcatatggaaagaagttaaaagctatacttgcactgtaaatgaaaccgaaacatttgaaatgctgttattggtaatgtctgatagaggttttaattttcataagcatgaatttataattctctctaccagggggcaaatgagaagccagcgaataaatagatgctcactacacaagaaattcttttacaagtcagtagaagaaaaaatgaaaactgtgttcagggcattaaagcaaatccatgataaaaacgaactggacaggaatagactactaaacggaagggataaaatcattaatcgtttccaccgaatcaagacatttaaaagcatctggctggaattattagaactggatatcaacactgacgagatagatagttatgaatgtcttgtttttataatgaagcacagggaaataaaaattcctgaaacagcattagttgcaatggaactcaccgcttttaactcgctaaaaaagaaaaaggcttacagggaaacaaattccattccatttacactcgattctatcaaggaagaactaaataacatatacaacttactaatggataatattaaatatgacaaacttcaaacgatacacactttataa

SEQ ID NO: 206121 - DNA, 570 bp, Klebsiella oxytoca
atgagcaatattactttaaaaacaccatattcagacagtttaatgataaaagcaagcccagaagaactaacagatatttattttgaatcttatcgtaaattcagagaaaaagatgatgcagtgccttatgtatatacagcagaggattatatcaaagcttatcactccaatgatgacgcattaaggaatacagcacttttaatatatgaatctcataaagataatttgtcatctatgattccttgtgatagttaccaggtgaataaagaaaggataaatcataaagcaatttacccccttaatcgtattttagaatcaaacccatatccaccgtgttcattctttatagatatgagagcttcatacgatgttgagcttcttaaagagaaagagttagacttcttcaataaattgattgaggtcatacctttcaggaaagacagagataatttattgaaagtgaaagagtcaggctattttgcttccactattgccaagatagaacaaaaagaaattgagcaggtaatgaatgaaaagccagttgccattaagaagaaagcccgattgtaa

SEQ ID NO: 206122 - DNA, 1239 bp, Klebsiella oxytoca
atgaaagggatgcagaaaatccgcagaggaaagagttttgctggtatcgtcctctatgcattaaagcccggttctcatcataaaaaagaccctatcgtgatcggtggaaatataacgatagttggcaatgtcgctaaagatctgatcgctgaatttgatagcaccaaacagcttcgccctgacgtgcaaaaggctgtttggcacaactcgcttcgcttacctaaaggtgaatcacttacggctaaacagtggtcctgcatcgcagatgactacatgacaagaatggggttctctgaaacgcatctcagatgctacatcctacatgacgacgaagacggccagcacatccatatcatcgcaagcagagtttctcttgttgcaggaaagctctacctcggcaagaacgagaacctggcaagcacaagaataattcagcaacttgaaagagattacaatctgacaagaaccaaaggaccgaaagctactccagcagcgccctcacctacaccgaagctcaaaaaatcccgtaatgagctgatgatagaaaagagaactggtgagctatgcccaaaagcaatcatccaaaacgcccttgatgaactgcttgataccaggcaatcgattaccgacttcgtgcaacagcttatggcacaaaatatcaggccaatccctaacattgcttctgcgggtaagatgaacggtttttcattcgaatatagggggattgctttcaaagcttcgcagctcggtaagggttattcttggtcagccttgcagaacaaactcaactatcaaccggaacgtgataatgctttcctgtttgaactgaaagcatctgtcagtgaagcgccttgtacgttcatgactacagatgctcctgaaatcacaacaagagaggttcacagccccatagaagcgcttatccatgataaccgtgctggtcaggacgaatacactaacgcttctgtaaagcagtttcacttagaagctggtgccaaagaagcgttaaaagaagcccccgaccaaagctatgcagtttcagcgttcaggtggttggaatacatcccctacctcgatgtaatttatcgtatgttgaaaaacctcaaaatcccaacccttaaacgtcctcgaaaacacacaaccatcactggcgtgagagtgatagagattatgcctctcccccaaaaaaatctcatcgaatcagcacctcaatccagaagagcttcgctttcgatgtaa

SEQ ID NO: 206123 - DNA, 414 bp, Klebsiella oxytoca
atgaatgatagaaatcatacttttaataatatcaagccattcagaatctgtagctatgaaaatttcgcttctgctgaattaccctctcagaagacacgttctcattgtattagtatcagattaaatgatgccgagttatcctacgttgatggtttacgagaggatcttaaccgtgctgtttggatacgtatgtcagcattgaatcgtctccctcccaaaattcctgaaataaatctacttgtctggaaagaccttgccaaggcatctcaggatctgaacaaccttgttcagcatctcaacactaaatcacacgatagtccttttactatcaccgaaatttatacggtgcaaaaaagaataaaagcactaagagatgcccttctgtcagcaaatcaatctgtcagtgataaataa

SEQ ID NO: 206124 - DNA, 510 bp, Klebsiella oxytoca
atggcacagcacagatataaaatactatcgatatgtgttccttatttattctatcccgtcccgaagaaagcattcgattctttaaacaaaaatgaattaagtatatgcccaaaagactttattactgtttatgtagttatagacacagaaggatcagataaatcagatatctttatttcccttacagaagctaaaaataaatgcttagaaaaaaacaataaagtatttaacgaaagtaaaatccctcgacttacacttgatttaccatcaaattggcgtcaatacatagtaaaacaaaacaaacctaaacttgaatatgatattgatgacactacattgttgaatgaaatttcaaatgcagaaaaagatataatgctttcattattagaagaaagaaagttaatgttaagagatctattctctggtatgaaagaagattatagaataaaaaaagatgcttctgttaacaacgatccttcaatagttcctaaatcacctaagatttcataa

SEQ ID NO: 206125 - DNA, 1062 bp, Klebsiella oxytoca
atggttatagatgttagtgacaatgttaatagcaattctatatccaaaaacaccaatattattgatgtcctaaatacacatgctaatgaaatattccctgctttagataaagatattcctgtagtatttgctgatttcactgtatggagtaagtttgtcataagaatgaataaattactgccatttacatcaagagaaatgaaaaccgcttacaatgttcatgatgaagatgttcatatttttagcgagacatttaatagagatacatccatattatatgattttatgctcagtaaaggatgtagttcaagtattacatcaacagtgattatcctgcacgagataggacatgctgttcatcatcagactgaaaaattaaatggcgaatatttggatctttccactcaagaagctaattttatcaataaattcacaatgttctttcaggaagaggcaaaccatatttctatgtatgaaacagatacgattatacgcaatgccactcgtgaaggttttgcagatctttattgttgtatattgattgataaattgtattcaaagaaagaggcgacagtagctataaacgggctgaaagcatatagagataaatacaataaaagagaaaattattatactgcctacagcattgcaagatacatcgagttaagagagcatgacggtctacaagctagtattaatagttttgcacagcttaataaaataatctcggctatagtgtcagaaacagctataaagcttttatcccagaaggcaggtgatgcgagttatgctgcttcaatgaataaaagtagattcttaggatttatcaacgaagtttacgaacttggcaattctgacgtcgataccgcaatgaaaaaaatgaaggaagatctgcctgttcttaaagaatttatagaaaatataaataatcttatcagatatgactacaatcctaaagaatttgatgtgggtaaaaatattgccattttctggaaaaaaaactatctaccgctaaagcccgtaccacagaaaaggaattcatcaaaatacattcctaaataa

SEQ ID NO: 206126 - DNA, 1509 bp, Klebsiella oxytoca
atggctatttttcatcttgattttaaaattgttaaacgaagtgagggcaaatcttccgttgcgaaagctgcctatcatgctcgttgcagaatcacagatgaaagaacaggtgatacctatgattatagtcgccgtactgatttgtacgggcatttcatattagcacctgttaatgctccagaacatattgttaaagattctacagcattgtggaatgaggttgaacgggtcgagcgtcagcaaaatggtcaaacagctcgttatttcgatgttgctattcctgccgagttaaacaatgacgacaagaaaaaacttgtccttgagtattgccagaaaaatttcgttgataaaggcatgattgccgacatcgcttttcatgatcttgatagcgacaacccacatgctcacgttatgttgacattaaaaactataggaccagaaggttttggtaaaaagcaaagaagctggaacgacagaaaaatgtctgtggtatggcgtgaatcatgggcatcgatggctaacagctacctcgctgctgctggttcgccagaacgtattgatcatcgttcccttcaagcccagcacgaagaggcattagaaatagcggcggctgctctggacaatgaagaacaagcgctatggcttgctaaagccgctgaaacaaaccgccctgcaatgaaacgtatccacagtgccaaatggcgtagtaaggcggctcaggaacaaagagccacagaacaagctgttcgtgatgctgctaagcaggaagcagttgaagtctacaaaacattcagcgaacttgatcttgaaatcgtcgttgatgtcagaagctttacgattacacatcttgctgaaccagaagagattgtattacctaaaacacaccccggctcttctactgatgagaatcaaagacctgtattggtagcaccagctcctcatactcgtatgcttggcgttaaatcttaccgtgacaaaacaaaagtcagtaaggttgttgctcgtaagaaaccattggtcagtatttctgattctggaacaaatactatcctgaaaacatcctcctctcaaaacccaaacagggcatccagaagtacccctgaacgtgttaagaggacaaaggctattccacatcaggataatatttttaaacgcttcacaactcttgtcatagattttttcaagcagaagtttgtatgggctaaagcaaacaaatcccaaattgatcttatcagtgaagaacatgataaacgcattgctgaaaattatgtatttgacgaagtattaggtcatcctgttccacgtgctgaatacgagaaacgagctaagtttaaccaagatgactacaagtcaacaccggatgagatcagccgtttcccaagccgccagcaacaaaaacttactggtacggaacaatctatagactgcgtaccttcaactttttcaacaagaagcaagggcattcctaagatgaaacctccgggttatcatcgtgataacaatacctaa

SEQ ID NO: 206127 - DNA, 309 bp, Klebsiella oxytoca
atgagtgataatgataaaagcagaaagccaagatcagaaaaaaccattaagcaaaaaatagcatcagcgcagatgcgtttgaatcgtctcaagaccaaagagaaatctttgtccaagagtgctgagacacgcctgaagatcattcttggggcagaagtggctaaagctgttggctgtaaagtagaagatgttgataaggagtttgtattaggcgtattaattcattttaaaaaccttggtgctgaagataaggcaaggctcaaattacgaggaaaaaggtttcttgatgaattgattggcaggcaataa

SEQ ID NO: 206128 - DNA, 183 bp, Klebsiella oxytoca
atgaatttaagagagatatatatggctatcggaagatctggaaggatcgtgttacaagtagaccctgagttaaaaaagaagctttactctatcttagctatggagtctataacccttaaagattggtttactttaaaagcgaaagagcaaattgaaaataagaataaagagaatgcgaaatga

SEQ ID NO: 206129 - DNA, 549 bp, Klebsiella oxytoca
ttggcacctgtgaccattcccacttcaacatttgctatagtatcaaaagagtgtacgtttggatgtttaataatctcattaagaagattaacttcatttttatctaggacggcttttgtccacttaccttttacggtatcaccattgattgtatttgtttcgttaaatatatcttcgggatttttttgtaaaaaatcgaagccactgacccctttaattccgacaccttgtgatgcacaatccagattaattttcttttcaactaatagaatgaccgcgccttgtaaggtttcactgaaccatatttcttttgggtcaataattacaattttagagcaatgctcacccaagaatgtcctcaaggattgtgcatgcattacatttataatttctgatggaattaccatgccaagtcgtcctccgggattgaggagcgaaacgccagacaaaataaaaggtacccatgcatttgtatgtttagtaaattttaagtcaagcaatttgaaaattgcttcagtattttcttggaaatccttttctaagaattga

SEQ ID NO: 206130 - DNA, 177 bp, Klebsiella oxytoca
atgaacaaccagatcaataaagtgccttacagcagcagtgataaaccagaacttcctaaaaataaaaaagttaagttttatcacgaagacgagtatgcttttgctcatttcatgtatgacgatacagcagccgaacaagacaatgcagaaactaaaatcgagaatacaagggagtaa

SEQ ID NO: 206131 - DNA, 774 bp, Klebsiella oxytoca
atgaaaaaagaaatagtaatcgacactttaaataaagttatggaagtatcaaaatttgcgaatactgaaaagcactttttcagttgtgtatctcatgcaatgataatgaattctttacttcagtttgaagaaagaaaaaaattctatcttaaaggcgactatgcttttaatcattttttgagcgaagaaaccataacatcatataatggttacgagtttgaaaggaatgaaaaattcttcaaacagtttgaaaatgaaattgtaaaatcagctataattatatctaaccttatacgatataacccattaacagacattttccgtgaattatttgaattgtatcatgagcaaaataatcaaacaaaatttgcaaaatacactgatgataaacttacaaaagacaagaaggttgaatgtgtaagctttaactatgatcacaatggtttttgcaatgtagaaccgactggcggtacaggctttctcttatattcgttggtaaataaaataaacagcaaagcaggactggaagaaattcaaaagctaaatattacttacttagaaagtgatccgttctttgctcaaacatttatcgcacagacactgacaaacatgttttctcataacctcgacttcaaagaattagatatttatataacaagtaaggagcgatatagtgaccttaatccagtatacaaagaaaaaggacttgtaataacagttatccagaatgagtttgtagccaaacgagttttagaaatccaaagcaaacaataa

SEQ ID NO: 206132 - DNA, 789 bp, Klebsiella oxytoca
atggaaaaacaattcaaaaaaacactggcaagcattcaaacacgatctaatcgctcaagctctaatacaatcaaagaattctttaattgtgtgtcttacaccatgataatgaacagtcttttccagttagaacgaagagaattattttattcaggaaaaagtatatacggttttaatcagtttgccataaagtctggttttattgaaaaatcaataattttaactgacaggcataaattcagtattgaagaaaaattttataatcagtttgatactgaaatcatagaaatagctaacttaatctctcttgaaatacaaaaaaaacctttaacagatgttttcaataacatttttgaagagtgctatttaacaggaaaaaaaggtgaatggctcggtcaatatttaacacctaatgatgtttcagaacttttaacagagttagcaaacttgaacaaagaaaacaattatagtattggcgatatttgtgcaggtacaggatctttaatttttccattacttaaaaaaattcataaaatggaaggatatgaagggattcagaaaatagaacttctttataacgacattgatccactgatggcacaattatttatggctcagatattaaccaatatgacctatcataatctcgattttaaatctctacatgtacatattggaaatgcaattacagaatacgatactataaacactctttttttaagagttaagcaaaatccgttagtagctcaaagagtattagaaattgataaagaaaagaaagcggcatga

SEQ ID NO: 206133 - DNA, 789 bp, Klebsiella oxytoca
atgaaaaaacaatttaaaaaaacactggaaaacattcaaacacgatctaatcgttcaactttcaatacagttagagagttttttaattgtgtatcttacacaatgataatgaatagtctttttcagttagagaggcgggatattttttatttaggcaataagatatatagttttaaccagcttgctatgcaagctggattaattaataaatcaataactttaacagataggcatcaattcacaattgaagaaaaattctataatcagttcgagagtgaaataatagaaactgctaacatactttctattgaaataaaaaacaaaccattaacagatatatttaacgagctatttgaagaattatatttagttggtaaaaaaggaaatggttttgctcaatatttaacacctaaccgagtatcaatcggtgcggtaaaatttttagcaataacaaaaaaagaaaaatatcatataggtgatatttgcgggggtacgggatcaatgattttagctttaacttcggaaatttatgaaaaagaagggttagaagggattcaaaaaatagacttattttatcaggataaagacccttttatttctcaaatatttatagctcaaattttaacgaatatggtttaccataattttgattttaaagaattacgagtttatattggtgactctataactgaatacgacactataaacactctttttttaagagttaagcaaaatccgttagtagctcaaagagtattagaaattgataaagaaaagaaagcggcatga

SEQ ID NO: 206134 - DNA, 477 bp, Klebsiella oxytoca
ttgttaactattaacaaaatccaatacgaggcttcgaaatttcgaaagttgatcgaggcatgtgataaacataagactagtcttgttacagacagttttcctgttatgaattgtaagctttcttcgatgcttctttcttatcattttctacaattataccctgagcttgtgattaaaggtattagcgcaacaacagggaaagatgatcaaatatctcacttctggcttgagataggtgacattgtgattgacatcactggcgatcaatataatatcattggagacaaagagcttaataataagattataaacagcagaccttttcctactgttcatgtcgcatacaagaaatatagctatctatacaagatattcaagaaccgtgaagaagagtatctggtatcaggattcccgacgattaaagagagttttattgaaaaaatgagacgtgggtatagccagctactgaataattaa

SEQ ID NO: 206135 - DNA, 276 bp, Klebsiella oxytoca
atggaaaacaataccatcaagtgtccattttgcctgaaagaaagccaacggggagtgcatgtctgcaccggctgcatggcaactattttatatggaacctaccccggttggtatgctttcgttattatattattgaccttcggcctgtcgatactgatcggaatgtctacaggcatggcagaagctagtatcagcctactaatcattgcggctgttgggtttgtcgcaggtaaggcgatattctctgataatgttgtgttcagaagaagaatgtag

SEQ ID NO: 206136 - DNA, 552 bp, Klebsiella oxytoca
atgaagaagattttactcgttacttgcacagctcttgctttggcgggatgcggtgaaaaaggcgatttcgagaaagcgatcaacgcgaaaataacacaatcaaagctgtgctactccctgcaggacaacgacattgtgttcaataagggtttccccatccgggttaatcacggctatcgttccgctggatacagtcccagtgatgaaatcttaaaaggtttggctaatcagggactgcttgatgtttctcaacaagctaatggtttcagtggtgtcgatgttctggaagtaacagacaaaggccaagaggttgagttttgggatcgtgagaaaggtgcctgtgtcggccatcgggaagtttctgagataaaggaatggatcgaaccgggaaacggtaatcagaaagttgttcgtgtgtcttatacatggaagttagcggatgttccttcatgggtagacaaaaaagcgttctccagcgtcaagggcatgaatgaacctgaagaaggaatgattaatcttgttaaaaccagcaatggctggaaagccaattaa

SEQ ID NO: 206137 - DNA, 273 bp, Klebsiella oxytoca
atgaatgatagaactaagggttataatatgattgatgaattccacgtaatgtatatgtataaaaaaatctatgctgaagcggctacaactgatttaaaaaccttgaatcaactgttgaagaagttccgtaaggtagtagcggagcgccgtgaagaatactatctggaggttggtgagaaaagggcacaagagctaaggggcgagaggctacaaaaaatatgggggaaaatgaaacgtgacagggttttaccagaagatcttattgacaggtaa

SEQ ID NO: 206138 - DNA, 768 bp, Klebsiella oxytoca
atgaatgaaatagaagttgatttagatttaggcttaaatcctttttgctttgagacagagataaagattgaaacaagaaagaagaacctgactgtttcaagaggaacagaacttattgaaaggaaggataccagcaaaacttattttgccaatatcgtacatacacaagaggtcgataaagaagagttcattaagctctacacctcacagataaaagcatattttgatttaacgaaaacagcatacaaagtgttttttatctttttacgtatatatcaggatgcgattggaaaagatcacttttatctgagttgtaaaaaagcaatgtctcttgcggaaaagatagatcattttgtcttatcggaatctatcttttaccgggggataaaggaacttatcgagaaacgtattattgctaaaactaatgaaaaaaactggtatttcataaatcctgcaattgttttcaatggtgatcgtgctcgttttgtttctgagattaggaaaaggaaagaggaaattggcattgaacaggttgaaagcattattgatagcggaggaggctatactaaaaatgaagataagcgtaggtctattgagtcagtcattgaaaatgtaaacaacaaagaagatatcgatgtgttaatcgccagattacaagctaaaaagtcgcagggattcgcaaagcgcgaaagtataaaagtaagcacctctgttgaaaacataagcttagtgccaccagaagaaccattagattgggataacatctaa

SEQ ID NO: 206139 - DNA, 312 bp, Klebsiella oxytoca
gtggtgaaggtcagcgacggcggcgatatcagccagctgacggcggccgcgccggcagcctcttccgccccggctcaggcggccgccccggcaggcgccggcacgccggtgaccgcgccgctggcgggcactatctggaaggtcattgccgcggaaggccagacggtggccgaaggcgacgtgctgctgattctggaagccatgaagatggaaaccgaaatccgcgccgcacaggccgggaccgtgcgcggtatcgcggtgaagtccggcgacgcggtctccgtgggcgacaccctgatgaccctggcgtaa

SEQ ID NO: 206140 - DNA, 126 bp, Klebsiella oxytoca
atgacacacattgtcttatcagcgctatccgagaaaatgaaaaaggccaatgagggcgtgaacgctctcattggcctaccggtactaataagcgtccgtcgcgctaataagcgtccgtcgcgctaa

SEQ ID NO: 206141 - DNA, 168 bp, Klebsiella oxytoca
atgcgcagaattaccttacaacgtccgtttcgtttttactcatgcaatattcttattacctgcaggaaagggcataaggctgatgtaaatactgtttttggtacggttaacgcattttgccaggtggcggctgacgccttacccggcctggaaaacccgcaattttag

SEQ ID NO: 206142 - DNA, 444 bp, Klebsiella oxytoca
atgcaactagatggcgaatggatttatgtttttatgagtggttcagacactgaacgatttaaagttggaaaaacgaaaaataacccactgattcgtcttaataatttgcgtacaggtgatcctacactggatttccgagttgcctatttcattccttcatctttaaattggcgtttatacgaattagaaaagcacatacatgaccagcttgagaaaggtttccccagaattagtttttataatgacaaaccttctgaatggttcatgggtgatgcaatcgatatttggcgtgaaatggatatcattttcgaaaacttagaagttgatgttacagactacttcgaccctgaaggaacaaaagtcgtaagattttgggaagagaacctaaaatctatatatgggccggggttaccgctagatgatgacggttttccagttttttga

SEQ ID NO: 206143 - DNA, 195 bp, Klebsiella oxytoca
atgtggattagcttgcgcggcggctattgcggcgcgaagacctgctccgcctgcgcctattacggcaagatcggcttgaaaagtttgcacgacattcctccagtttttgtttatttcgccgccgggctggcgaaaacgtatcactgctcctttataggtaaggagtatagccgtagggttatgagggaaaattga

SEQ ID NO: 206144 - DNA, 2145 bp, Klebsiella oxytoca
atgaacaactatgcgtatcttattaaagccaaagcaaaggctaccgattcaaaaaatttattctgctggttccctgctaaatccgactcacgcgctgagcgcaaaattctggatatcctggaggacgctgaaatcgatgttggtcgcggtgcggaccaccagctgccgatccgcactaactggcatatcgttgacgacctcccggatgagggcattctggatgaaacatggtgcgaccgttacgaactgggtggtgaagacgggttgacctggcagaaaattgccgcacctgtagttgaggaagcaactgaagctaccgaggctgaagatgcaacgaatgcagttgagagtgatgaggaatatgccaatgacgagaatgctctgttctctgtcgctacaatgcctttccgcactcagctcctcgcccaatataccgctgaagatcgtcatgtttatcacatcagcctcccccatcgtgcgcgcttatcagcgatggaaatggatgttgataaccattatgtacagaacatgatacttgcggctgagaatattccagacataaagtcatacgatatgccaggactctggaagtttacaaatgcatgtaaaaaagcattccctgaagataagcgccatgagctaggaaagctcattcagtttgcgaaactgtggttcgagactaattcaatagatcgtgggatcctcacaaaagagtgggcatctggtaattgcattacatcagtgcaacgtacagattccggcacgaacgccggaggcggtaacaaaacagaccgcaacccagattatgaccatactctggatacgctggatcaagaaatcgcgcttgcaacactgccaatggatttcgatatctacgatttcccggcatctattcaccgccgtgcgaaagaaatcatcgcggccaaagaaagcccctggaaagaatggtcggtggcacttcgtagcgttccgggcatcctggattattcccgcgcggcaatatttgccatgatccgcggtgctggcgataacgtacatcatttcccggatagcctgcgccggtacattaactcctgcctcactgaaagcgtacacgataaaccgtcagcggaaacaattgctgctgcgcgtcattcgccgaaaaatgattcggatgaagaggttgggcgtcagcttgccgccagccgcggcgagtatgtagagggcatcagcgacccgaacaatcctaaatgggtacacgaagatctgactaaaactaagaaacctgaaattgccaaggtcagccccggaatgtactccattgaaaaccttatggggaattctcctgtaacccctttatcgatagtggaccaggtacgccagcactcagtagatgaaaagattacagtcatcaataacgaggaaatcaccagccatgtgcagatggaagaagctatcaatgatgaagccacggctgctgatgagatttcagaaagcgaaacggcagatgagacaactgcaggcgacgctgaatctggtaatgaagcaagtaccttaaatatgatacccgaccttcatattattgaagagaatacacctgctgattatcgccatgtaatggttgaccttgaaactatgggtaaaaagtcaaatgccccagttgtatccattggcgcagtaatattcgacccggaaacaggctttctcggcgaaacattttacaaagttgtcagccttgaatctgcggtctcgtggggggctgagattgatccatcaacggttatatggtggatgaaacaatcgtcagaggcccgttcggaaattgccaatgataacgccattcagctggatgacgccctgctccagtttagcgagttcgttctcgagaatattcccggaggctataaaacggcccaaatctggggtaatggcgccactttcgacaacaccattttgcgatcttcatacgaacgagcatgccttgactgtccgtggggctactggaatgaccgcgacgtcagaacgatggttgaacttggcaaagctattggcttcgatcctaaaacttctaccccattcgagggtgagcggcataacgcactggcggatgctcagcaccaggcccggtatgtttctgcaatctggcagcgactgattaaaaactga

SEQ ID NO: 206145 - DNA, 249 bp, Klebsiella oxytoca
atgaattatgatgagatattgacgtttctggcgatccttgatggaggaagtatagcaaaagctgcacaaactcttttcattagccagggcacggcgagtacgcgtattcaacaattagagcgacaactaggatttgagttgttttatcgtcaaaagggcgttcggcatattgttttaagcccacaaggaagagagttcctgccgctggcgcgccaactgtataaattaaatcagatgctatgcagttga

SEQ ID NO: 206146 - DNA, 564 bp, Klebsiella oxytoca
atgtcggtaccgaaccagacaccctataacatctataccgccaacgggctgaccactgtctttgcctatgagttttacctgatcagcgccagcgacattcaggtgacaatcaacggcaacgaagtaacgtccggctataccgtgtctggtgtgggtaatactggcggtggcgaagttacttttctgtccgcgccggccaatggcgctacagtcatttttgaacgcgttacgccgacataccggctcaccgattaccaggacaacggcgacctgctggctgacacggttaacaaagatttcgatcgtctatggatggctattcagcgcgcatttatttatctcggtgttgcgcttacgcgccctttgtttggtggcgggccatttaacgctaacggctaccggattgctaatctggctgaccccgttaacgaacaggatgcggctacaaaaaaattcgtggtggaaaatgcaaatattgggttagctcgcgtattacgagtgcctgaggttagcgttgatttaatccctagcactagggaaggtgcgaacaagtccctgatatga

SEQ ID NO: 206147 - DNA, 420 bp, Klebsiella oxytoca
ttgaagaaagcaaaaatcaacttcggcgtggaaaatgctgagaaaattttcaacgcgatcattcacggtgagacaacgcaaaccgcgctatacggattcatcaatcgtgtcggaaccaacaagcggaacacgtctaaagcgctcgaactgctcaaggagcataagctccgcctgaaacgtaatgcccgtgcgtcacgcactgtccgcacgactctgaaaccttacagcgctgaattagcaaaaggccgcgacgtgatcgaaatcatccagcccgtgctcaccgcgtggcgtctgttctacgcgaagcagggcatcggcctgatgaatgatcaggtgctgctgttgaaaatggttgaggcggcgggcgagttggagaagctgacgggcgaaccagtcccggatatggcaacgacggggtga

SEQ ID NO: 206148 - DNA, 897 bp, Klebsiella oxytoca
atggcagtagtaaaaactaagaggacacctccgccagacgaaccatacactaacattgaaatgcgtctgatctgcgcgagcaaaatcaaaattgtgaatggtgaacatgccggaacggtaatcaactgggattctgacatgctccgcgtctacctctacctgtttaatcaggtaaaaggctttgagaacaatagcggagagttctaccaatcacaggataagatccgactgagcacaggcattgggaaaactaagcttaacgaggtgttaggcgtattaaaaaagctgggattgattcaaccaacaggcaaaaaagcggtaaaaggtgcgccgcgtggtttggttaaatacacggcatcccgcttgatggacgtgatcggaaatctggaaataatcttcgcagacgatgacggcgagcctgtttgggatcacgatcgcgccagcgggaagaagaagagcaaaaaatccgaggagattaaaagagatggcaaatctgatgacggggttataccgcaggcagaacaggcagcagccactgctacaccatccgcagacgaacccgctaaccagcctacggacacacccgctgatcagaatgttggcctggcctctgagcctgccccagatgattctggacagcgcgatagtgtggcatctgacgatgacggcagcagcgatgatcgcgccgctggtaatcatgagatgagtcagcagaggccattcccctggcagggcgacacctttattaaaaatcgcctctctgagaacgcctatcaatgggcgctcactgctggcgcaactgactggcatcatgcctgccgtttggtgtgggaaaagatcgagctgaccccgcccactgagatcgacgaatgttataaaccgttatcgctatgctga

SEQ ID NO: 206149 - DNA, 258 bp, Klebsiella oxytoca
atggattcgaaagagtctactgcgtactactgccaattgtcgcatttaatctcctctcaggcgctggccttcgatatgctttgcacgagcctcatcgcttccctgcgccatttattctcctgttgtggtatgccaaccacgatatgggtttgcccctcctcgggttgtctgccggacataaaatggcatcgagcgcacggcggtgcgattggtctcctgccgccgttgccgctcctcctttctctctcagaaaaataa

SEQ ID NO: 206150 - DNA, 342 bp, Klebsiella oxytoca
atgaaaatgggtgaaacccaacgcacgtataacgacgtgattacgtaccacgcagacggcaattttgatcggcgcgaattgaatattccaaccctcgccgttgaagtgcaaccaggcagcgtgatcaagtctgatggcaccgcgtatgtctccggttctgatgcattactggttctgagccatcaccgcgccggaactgatgcaaacatcatcgttgctgaccgtggcgtgtacattcgcgctgaaacagtgatcgctgttatgggtgagactgtaggcgctgctgctattgctgcactgaccgcatccggcaacattcgtgttgcactggctgataaataa

SEQ ID NO: 206151 - DNA, 591 bp, Klebsiella oxytoca
atgtattatcccgatcgcgctagcgcttaccgggctacggctctgcgcggtctggtagcccggacaggcgcgtcaagcgccacctccggggaaatcccccggtcgcgcttacgcttaccggggctacagctctgcgcggtctggtcgcccggacaggcgcgtcaagcgccgcctccggggaaatccccggttgcgcttaccagggctacggctctgcgcggtctggtagcccggacaggcgcgtcaagcgccgcctccgggaaaatccccggttgcgcttgcgcttaccggggctacggctctgcgcggtatggtagcccggacaggcgcgtcaagcgccgcctccggggaaatccccggccgcgctcacgcttaccggggctacagctctgcgcggtatggtcgcccggacaggcgcgtcaagcgccgcctccggggaaaccccggtcgcgctcacgcttaccggggctacggctctgcgcggtctggtcgcccggaccaggtgcgtcaagcgccgcctccgggaaaatgccgggtaacaaatcgcactttttaattgatctgatcccgacgcagcccgacatcttttag

SEQ ID NO: 206152 - DNA, 360 bp, Klebsiella oxytoca
atgccggaagagcatccgcttgccgcgcgtaaggcgatcccgcttgcggcgttgcgtaacgaatattttgtcaccatgccttcaatacataccgactggacgtttttgcagcgcgtgtgccagagcgccggattctcaccgatgattatccgtgaagtgatggagccgcaaacggttctggcgatggtcagtatggggataggtattacgctcatcgctgatagctatgcgcaaatgacgtggccgggggtggtgtttcgcccgctggaagaacgcatacccgcagatttgtatatcgtctatgaccaacagcaggcgacgcccgcgctggagaagctgattgcggcgctggtgaattga

SEQ ID NO: 206153 - DNA, 1077 bp, Klebsiella oxytoca
atgaaaacaacccttcccttttggtcagttgatgcatttttgtattgggtcacgcctcgcagatatacagctgaatggtcttcagagctcatgtcacgcgtttctggttttttagatgcatacataatgtttgacactgtcattattccagaaagatataaagaggaaggtatattaaaaaaacttgaccccaaccaatctatatttgaatatgttaaatcaaatgctctcataaactccgatgatctgtgcaatggactgacaatagatttatcacttaatattcctgacataaacgctttaaaaaaagatgattacttatggttttctcaacatactggatattgcagtccagaagattttgatgaaatggtaagtgaaaatttcatgtcattttcattgttaaggctgtggcagttgtctttaattaatgaaattactgaacttacagagtgttgtgcgatccttccgttgtcacttcgtgacattgatctatttcaaataaaagaaccaccttttcacttaaataaaattaacgaactgaatgtccattatcaatcgatgataaaaactgtgtcagtagctgtcggtgaacagtttaatgattacctagaaaatattccgccatttctatcattagtcatcgatcaatcattaagccaagaacattcaatcgaggtcattgccaaaattagagaggattataaggaattacgatctagcggatcgttatacagctcagagataattcgcagcaagggaattaggaataagaaagaaataattgacgagtggaatgaatcatgggataaattgcttaagagtagttttaaaaaaccttctttgttcaaacgaaagctttctttaggtgatatttcaaaggctgtagtcacgccacaaaaagcaggactttcaagtataatccagctttttctagagcatattgaagaatactcttcctataaacggtttaggatatactgtgatttatatactgaactggatagcattacgttttcaaaaaataaattagaaaaaacattctctgtcaacctaaaaaacaagttgtcaatctga

SEQ ID NO: 206154 - DNA, 873 bp, Klebsiella oxytoca
gtgcaattcagtgacataataaaaatggtgcaagacatttggtcattttcctggccacctttggtaatttgtggccttgcatattttatggctcgtttctttcaccctgccggtaccaccagttcgttacagaaaattttatcaggaatgaaaaaatacggagataagcttgaaagtactcgcacgatccttgaaccatatggcctaacgaagttagtgcctgctatttcaattattatgctcgttagttgcatgtttcttctaaacgggccgattactagccttgtcagcaacattcctccatatgtttcttataaccccgctttacttgccactaagacaatgtcagaagctcagcaactcgcgctaattcgaaagtacccaatggcacaaagtgttgtcgaggcatattacctcgcgctcagaagtgctgaattggaatcgaaaataaaaccagactacgaagaattaagtctatggaaccaagcgcaagaccttctcaagttcgcactggtttttgccactatcatgcttatcgttagtctcaaggcgaagcttccccttggtaaacaaattacaaaatatttattggttttagttgtgcttatgttcctatggacaatttccttagctggtcttctctttcaaaaagaacgagtcattaatgaggaattagatatggtggtcattcctttaataaaggatgcaagtcccttacttacattgcctattacagaaaaagaaatggatgaattaaaccaagtatctcatgagatgagccagaattggtggcaggtctatgttatagatgagtatcgctgggagtgggtgaaaaagacattctatcctaatagtgaacctgaatggcattga

SEQ ID NO: 206155 - DNA, 327 bp, Klebsiella oxytoca
atgaacaatattccctctatgccgcagttagggatttatgtatcaaaaatagatcccacccttcgcatcactgtaaccgacgttgatattgttgatgactctcctgatgatgaattgttttatctagtccgttggatcgagggggaagatgaaagtgatatgtctgcgatagaatttgagctagacccagtagagtggcaggctttcgttgagtctgagcaattagtgtttgagcgcgatccatacatggattcagcccccgaaaattcaaacgttgcgaaaattcgggattttctcatgaagactaaacagaatgatcgttcgtaa

SEQ ID NO: 206156 - DNA, 144 bp, Klebsiella oxytoca
atgactaccatctggattgacagttctgtagtgcaatattgcgaaattatctccagcgctgataagccgaaaatcaatactaagaatagctggaacgttatcttcactcaaaagggcttcaatagtctgtgcacgatcaactaa

SEQ ID NO: 206157 - DNA, 627 bp, Klebsiella oxytoca
atggagcagaccgacaagcgcaagcaggataaactgaagttcgaccgggtaattaatctggcgcgcagactgccgcaaccggcgatccatgacttactacgcgcgctgatactgccaattcaggccgattacttgctggccgttggcacggagggccaggacgcgcgcccggacatgaacgagcgcgagttcttcttcacaaaaatcatctgggcgatggattacacgcacatgaaatcactcaggcttgcagctgaagattttcccctggcgcttgcgacggccaagatcctgccgtggccgtggggtgaatcaagctaccggagtgctttagccgatataggcagcgctaagggcaatccgtgggtacaggatattaaccaccgcgttactttgtggttgccctggcggataggctttgtacgaggagggaaccattctattgccagcggcgttctggccggtgagggtgaggtaatacccgatacggtttatgatatgcggtatttgctcgatattgtcagcactgacgggtattactggtacatgagcgggaagatctgcgagagagtcagtgactaccgtacagccgccttttttggggtcgtctcagaaaacggaaaataa

SEQ ID NO: 206158 - DNA, 549 bp, Klebsiella oxytoca; identical to SEQ ID NO: 16825

SEQ ID NO: 206159 - DNA, 294 bp, Klebsiella oxytoca; identical to SEQ ID NO: 190812

SEQ ID NO: 206160 - DNA, 315 bp, Klebsiella oxytoca; identical to SEQ ID NO: 16857

SEQ ID NO: 206161 - DNA, 345 bp, Klebsiella oxytoca; identical to SEQ ID NO: 16856

SEQ ID NO: 206162 - DNA, 306 bp, Klebsiella oxytoca; identical to SEQ ID NO: 16855

SEQ ID NO: 206163 - DNA, 603 bp, Klebsiella oxytoca
atggcgtacatcgtcggccatgagtcctcaaatgggccgtacaggatcaatattaacggtggtagtacccagttaaaacagcaaccacgtactgaagctgaggccgtcagcgtttcgaaagttctgctgaaggataataaaagttttgatatgggccttgcacaaattaactcaaataatttagtgggcctgggtctttcggttgacgatattttcaagccctgcatcaacctgcgggcgagccagaccatccttaaagcctgttatgatagcgccctgaaatcctatccagccgggcaggttgcgctgagacacgcgctttcctgctacaacaccggctcactcataaacgggatttctaacgggtatgtcacgaaagttatcaacgtggcgcgtcaatcaactgatttgaaaatccctacgctgctacctgatggccagaccagtgaggacagcaccgcgactgagcctcagcaggcaaaaagtacggccacgcagtatgacggtgaacaagatgtttttggttcgggtgatggcgatgccttcagccgaaataatacggatgcctttttaaccaaacaggaaacagcgaagggggagtga

SEQ ID NO: 206164 - DNA, 282 bp, Klebsiella oxytoca; identical to SEQ ID NO: 16853

SEQ ID NO: 206165 - DNA, 294 bp, Klebsiella oxytoca; identical to SEQ ID NO: 16852

SEQ ID NO: 206166 - DNA, 318 bp, Klebsiella oxytoca; identical to SEQ ID NO: 16851

SEQ ID NO: 206167 - DNA, 2601 bp, Klebsiella oxytoca; identical to SEQ ID NO: 16850

SEQ ID NO: 206168 - DNA, 714 bp, Klebsiella oxytoca; identical to SEQ ID NO: 16849

SEQ ID NO: 206169 - DNA, 228 bp, Klebsiella oxytoca; identical to SEQ ID NO: 16848

SEQ ID NO: 206170 - DNA, 1041 bp, Klebsiella oxytoca; identical to SEQ ID NO: 16847

SEQ ID NO: 206171 - DNA, 504 bp, Klebsiella oxytoca
atgactgatgcagctttctatcaacttggcccactgcgcgagtatttagaagatcctactgtttttgaaattcgcattaactgctttcaggaagttatctgtgatacgttcagcggccgcagggttgtgcagaacgcggcaattacggcagattttattaggaaccttgctaaatcgttggtgagcagcaacaagctgaccatgcaggccattaatgacgtgatcctgcctggcgggatcaggggcgttatctgtctgccccctgcggtgattgacggtacaacggccgtagcgtttcgtaaggatttggcggccgataaaaatctggagcagctgacccgcgaggggattttcagtgactgccggaagattaccggcagcaagcaaagcctaacggatgatgattttttccttaaagagctgcacagcagcgaaaaatggcccgcattcctgcaaaccgccgttgaggggtcggttccggctgagggcgaaatgacaccctaa

SEQ ID NO: 206172 - DNA, 381 bp, Klebsiella oxytoca; identical to SEQ ID NO: 193288

SEQ ID NO: 206173 - DNA, 615 bp, Klebsiella oxytoca
atgcataaaacatttctaagttatcatcatgctaatgaacaggatttaaaagatagtataatagagacgtatggtggggaatcttttatcgataaatccgtaagcgacggtgacattagtactgatgtaagtgaagaatacatcatgcgtaagatacgcgaggaatatctcgctgatactacagttactgttgtgcttatcgggagagagaccgcccaacgtccatttgtgaactcagaaattcaagcatctctatggggtgaaaatccagcgggattgataggtgtcgtcagagatgaaatctggaatgaagtttttaccgatgctgtatgttctgactttcgatgtaactgcggagtgagtttaaggcagatttctactggttatacactatatcttccttatctggtacaaggtaatcatcgtcttcaaaaaacagttccgcattacaccgatgaggaagtgtattgtgcagtggtaaggtattccgattttattgctgattgcgaaacatatattgatgaagcatttaataagcgagcaattatgaatcctgctgttaaaagaaatgcagatacagttcctgctatccgagctaaacctagactatggtaa

SEQ ID NO: 206174 - DNA, 729 bp, Klebsiella oxytoca
atgtacaagagatgggttgtgtgggggtctgtttgcatagttgttattgcactcttgggaactgttcagttaccaacgtcagaagatataaccttcggtaagcgtttacttcaaaatattggggtacttagttctctactttctgtagttatattaatcattgtggctatctttctattagatggcatgatgaatagaaaatattcgtttaaagttgaacggcttaattttggcggtttaaatattctttttgataactctgatgcccttttcataaagtctatacagaattttctcgacacgaaaaggacgctttttaaaataaacgttcagcaggatgcttttgatgaggtatttaattcttactacgaggtctatcagtttgttcgtgttgagatgcgagttctgaatattaaaaggaaaaaagatcttgagttatatatgttggcgaatactatgctcaaaaaactaaatgcatttctgactgagcaccaaaataattataggcgctggcataaatacgtctcagataaagatgaagttaaaattgacgagaaacctgatggtgaagcaattgttcttaggtatcatctgacgccaatcggtaaaattcagacttactattatcattttaataaacttgttaatgatttcactgagctgaataaattctttcaagatagcgttgccagccagtttagtattgacatggataaatggagcaactaa

SEQ ID NO: 206175 - DNA, 300 bp, Klebsiella oxytoca
atgataaccacgattaaattaaggtggcggtacatcgagccgccgccaatgactggtgcactcgctgacctgaaacagtgggtaatggataccggagagcctgagcttgaagctaaatttcgtaagctgctggggctgatgcgccgcaatggtatcagtgacgaacgtgttaatgcgatgaccgtcgagctttatgctctggtatgccaacgccagcgcgaagaatacgaagcctgcaaacgggctgcatctgacagtggagactttgaatcatggttacacggacagaccaactactaa

SEQ ID NO: 206176 - DNA, 156 bp, Klebsiella oxytoca
atgacctacaaccaaatgaggtgccagcactggccgttactgggctgtgggagatggatgacctacagcttttgtatttatttcagagtgttatgttatgcgaaatgtcataacgatatgatttataatgtattttgttttacttgcggctcttga

SEQ ID NO: 206177 - DNA, 570 bp, Klebsiella oxytoca
atgaggacttttatctactgccgcgtttcaacacgcgagcaggatacgcagaatcaggtgctggctattgagcgtgccgggtacaaggtgcctgagagcagggtaatcagcgaggacatttccggcagcgttcaggctatgcagcgccctaagtttcgggcgatggttgagcataagctggaagcgggagatcagcttgtcgtgttgaaactggacaggctggggcgtgacaacatcgacgtacagcagaccatcgacatgctgttagaacgcggcgtgaaggtggtgtcccttgacctgctagcgcgtgatctgacttcatctgagggcaagttaatccgccagatgtttggagcctttgctgagttcgagcgaaaccgtatccgtgagaggacgctggacgggctggagaaggcgaaagccaatggcgttaagctgggacgcaaggaagccaccgacaccactcaaaaggtgcaggagctgcggagtgaggggctgtctcaatcgaaggtagcgaagcatctcggcgttagcgtgagcactgttaaacgtcactggaacaagggttag

SEQ ID NO: 206178 - DNA, 816 bp, Klebsiella oxytoca
atggaaagatatcgcccacatggtcgtaccgtaaccactttagaagcagatgtacttaaacttcgagcactagaaatggtgttagtgcttttctatgtagaaaacctgaaaggttttattatcagttctgtcaaagttacaaaacgcctaagaaaaattcctgataacacaactctcgaaacaaataacgaagagcaagttagttttaaaaaggcacatgaattactcatttcagaaggcgtcataacgcaagaagaaagcgaacaactgaaagaaatgattgactaccgtaatactatcggccatgagattcacagaataaccatagatattggagcatacgcaaatctggcagagtatgacctccctaacggacataaaatagcaaaatataattactcagcagtgcagcgcgtacaaaatcttagaaagaagatagaaagaaaaatgatggaaaagttattttcctttgagttgtcttttaacacactggcatttgatgccgcagagcaagcataccttaaggagattaagcggttaaagaaaaaggttaatgctgggattgataagttgaatattacaattgaaactacaaataaaataatccgcaacattcctcctgaggttatggatatggtacaacccggccatccgaaaaacacaaagagtaatggtacatttagtcaagaaggtgcgaaagcaatgttcatgctatatgatgcaaaagcaaccccgttagcggttgcttatataatgaggataacctaccgtaccgctgctaaatggcacaagaaatggctgtcacaacataaataa

SEQ ID NO: 206179 - DNA, 441 bp, Klebsiella oxytoca
atgtctggtgttttgtcaagtgcggcggcagcagttgggattattgataaagctgttaatattgctaagaaactatcgaatgaaagtaatgaacttgatacggcgacacttaaattggaattggcaaatcttatgagtgagctggcaaatgcgaaaatagaaattataacaacgcaagcattgttgttccactcagagcaaaagaataaacagcttgaggaacaattggaagagaagcgaaaattcagttttattgatggtgtgtactggattgatggggactctacggcgttttgtccgaaatgttttgaagatgagcataaaaaaatacatatgcagtcccgtgaaagaatgtacgcgggtttggggacgacgatagaaaaaccgaactggtattgccgcgtgtgtaaaagtacgttcgaccgcatagttaacagctaa

SEQ ID NO: 206180 - DNA, 207 bp, Klebsiella oxytoca; identical to SEQ ID NO: 146443

SEQ ID NO: 206181 - DNA, 441 bp, Klebsiella oxytoca; identical to SEQ ID NO: 146448

SEQ ID NO: 206182 - DNA, 285 bp, Klebsiella oxytoca
atgtttcaaatgagtacattgcaaatgaagacatgcaacctagtaatgttgcttgttacttgcttcaccctgtcaggatgtggggataaggataaaaaagattttatggctggttgtactgatggttcgacaaatgagcttgcggtgaagttatgttcatgtgcgtacggaaaaatgaaatttaaatatggcggcgactccggctggatggaaaaagctctgcaatcatcaccgcaagagttcactgccaagatgaatgaaaccgtcacatcatgtatgcagtaa

SEQ ID NO: 206183 - DNA, 432 bp, Klebsiella oxytoca
atggcggtacacacggtaactgaagctgctaaattagcgggtgtcaccagacgaacaatatatcgttatatcaagcaaggtaagctttcaacggttgtgacaggtagtgacgcaacccaaattgaaaccagcgaattactacgcgtttttggtagcctgtcacaaccagaagagtctaaagtatccactggatcacaggttgaagagccggagtatgtcacacgattaatggcagaaatgtcacagctcagggatttggttcaaaggcagcagctgttacttgaagacaagctggaaacagataggcttagagaacagatgaccgggttgcagaatgagcgtgatgaagcaactcaggaactggaaaaattgagagcagagcttgaagctgaacgaggtaaaggattctggaagaggttatttggcgggtaa

SEQ ID NO: 206184 - DNA, 2310 bp, Klebsiella oxytoca
atgacggtaggatcacgctggtttaaatttgattttcataaccataccccggcctcagatgattatagagtaccggatctccagccccgggaatggctgctggcttacatgcgacagcaggtcgactgtgttgtcatcagtgaccataacagtggggcctgggttgacgtgttgaaagcggaactggcaaacatgtatcgggatgccagttccggtgaactggcagacttccggccgctggctctgtttccgggggtagagctcacggccaccggcaatgtccatatcctcgccgtgttgcacactaagagcaccagtgccgaggtggaacgactactggcacagtgcaacaacaactgccctatttcgcgtgaaacccctaatcatcagcttgtgcttcagctgggatccgcaggcatcatcagtaatatccgtcgtaacccggaagcgatttgtatcctcgcacacattgatgcggcgaaaggcgttctgacaagccttactaatcagggagaactgacagccgcttttcagtcaaagcctcatgcagtggagatcagacaccgggaggaagatattacgaacgggactcaccggcgtctaattgcggatttgccatggctccggggatcagatgcgcaccaccctgaacaagcgggagcgcgcacctgctggctgaagatgtcagcccctgattttgacggtctcaggcatgcattactcgatccggaaaactgcgtgctgttcgatgataatccaccggaggcaccagcttcacatttacgcagcctgacattcagaacccgtctttgcaagccggtggatcagaatggagcctccgttgagtttagccctttttacaacgcggtgattggctcccggggcagtggtaagtccacgcttatcgaaagtattcgtctggccatgcgaaaaaacgaagggctgactgcgtcacaaatcaataagctgaacctgtttagtcagacaggaatgggcatggatacagattctttcatcgaatgtgtgttccacaaagagggcaccgattttcggctcagctggcggcccggtggttgtcatgaattgcatatcttcagcgaaggtcagtgggtgccggacaatcactggtcagcagaccgttttcccctctcgatatacagccagaaaatgctctacgaactggcatcggacacaggggcattcctgcgcgtctgtgacgagagtccgatggtcaacaaacgagcctggaaagagcgctgggatcaactggaaagggactacctgaatgagcaaatcacgctacgtggtcacctggccagccagacgattgcgggaaaactacagggggagttgtctgatgctgaacgggccatcagtcagttgcggtcgagcgcttactatcctgtttgcacccgtctggccacggcccgagctgaactgtctgcggcaacgcttcctctggagcataatgaactgcgtgtcgctggtctgagggcgcaggagaaagaacccgtgcaagtccctgagctccaggtggagtcgtctgcgccactgacagcatttatgacgcgtcttttggacgtacagcaaaagtatgaccagcgtcttgacactctgttgtcgggctatgccgcggaactccgtaccattaagcaggagcccccttttctcgcattggaagaggcggttcgcaaccaggaggaaaccgtacaacgtgaggccatggtgttacgagaacaggggctcaatccggacgtcctcgatgagctgatgacgcgcagtgagtcgctgaaatcggaactgagaaattacgccgatcttgacgggacgatcgcggcctccgcagcgaggtccaaaggattactggctgaaatgcgtaaccatcggatggtattgacggaaaagcgaaaggtgtttctgtcctctctgtctctcagcgcactggaaattaaaattctgccgctctgtgccccgcatgaagacaccgtatctggttatcaggcagtaaccggcatcggaaactttgccgatcgtatctatgataatggtgacggtagcgggctacttcatggcttcatcagcctgcgcccgtatagtccgctaccgtcggctacggaaaacaaatatcttgcgctggatacgcttaaagcgctgcatcttgctatccatcgcgaggagcctggggtcggggctgagctccacggtgctttcagaaatcgccttaaaggtctgaatgaagcgcaactggatgccctgcaatgctggtatccggatgatgggatagtaagcgtgcagcgagaaccgtattga

SEQ ID NO: 206185 - DNA, 303 bp, Klebsiella oxytoca
atgtacttatttgcgtacatgttctatgctaagccccaacaaatgggggttaacaacatgcatgcaatcaattttactgatgcccgtaaacattttgccgagacgatgaagcgcgtcactgatgatgctgaaccggtacgtgtcatgcgccgtgatgcgcctgatattgttatgatcgatgcgggagagtatgaggcgctaatcgaaacggtctatctgttcagcaatccggcgaacgcagagcatatcaatgagtcaatgaaacaggcggagcgcggcgaatttgtcgaagtggaatattaa

SEQ ID NO: 206186 - DNA, 276 bp, Klebsiella oxytoca
ttgtcgaagtggaatattaagttcactaggaatggcgctgatgaccttaactactggcgtgatactgacaaaaagaagtttgagcgtatccggcaactgttgctcagcatcgaggctgatccgctgacaggtataggaaaacccgaacggctgcggcaccacaaagatccggcactctactcccgcaggattgatcagagccaccgtctggtctattcaatccagaacggagaaatcatcatctacgcagcccgttatcactatggtgacaaatag

SEQ ID NO: 206187 - DNA, 906 bp, Klebsiella oxytoca
ttgcataacgccgcactcgaacttttcaacgaacgcttaccacacaagccgtacttttcggacgatctgcactttggtgtccgtatcgccggtaaggaacgcgctattctggcgaaatatatccagttcaatcagcctcacgccatgttctggctgggatttgacgttgaccgcgccggttcctccatcgactggagcgaccgcaacgcgcctgcaccgacgctgaccataactaaccccgaaaacggacacgcgcacctgctgtacgcgctggaaaactcgatacgcaccgcgccggacggcaaaataaaaccgttacgctacgccgcctccgtggagaatgcgctacgtaaaaaattagaggctgacgctggatattcggggctcatctgcaaaaatccgaaccacaaccactggaaaatcgccgtgtggcagccgaagctctacactctggactggctggccgactttctcgatctgaacacagggaatgacaaggaaatcgttgccgactacggcttaggccgtaactgcacgttgttcgacaaaacccgtaagtgggcatatcgcgccatccgtcagggctggcctgagtatgagcagtggctgcaagcctgctacgaacgcgcttgcgcatacaacctgcaatttgcacggcctctggatgaaaatgaggtaagagggatagctaagagcattgctaaatggacatcaaataaattttcacctgaagaattcagtaaatttgttgatattactcattcctctgaaattcaatcaaagagagggaaaaagtcaggacagtcaaggaggaaaggaagcctagaggaaataaaaccttgggtagctatgggaataagcaggcggaagtatttttatatcaagaaaaatggtgaaataagatga

SEQ ID NO: 206188 - DNA, 708 bp, Klebsiella oxytoca
atgaaaaccttcgtaactctttggactatagtttttttagcatttattgccgtgatgtgtactgttgatatatctaattacattccgtctgtttacacagtttttagtaagaatagacctcttgtaactggcgccctttctattcttttgatatctgtttttatttggctgatggtatccctctacttacttaaaaagtattcggttaaggttgagaaacttagccttggtggagtgaatatacttttcaatgagagtgctacactttacaaaaagagtgtaaaaaatcacctagattcaaaaagagcaattttcaaattaagaaaaaacgttgatgcctttgatgaggttatttcatcatattatcagacttaccaatttattcgtgatgaaatgaaaatactaaaccctaaaaaagatcgtgagatttatgatttcagcaatgagatgctcatggtgttaaatagatttctaactaactaccagaacaactacaagcgttggtataagtacatatcagacaaagatgaggttgttgatagggttagcggtgatgtcatgagatttcatgcaaccagcataaataaaatacaaatgcagtattatgattatgagcgtattttaaaaggttttaaagatgttaaccggttctttgttaatgatgtgaagcctaagtttggaatcaatacagataagtggaactggtaa

SEQ ID NO: 206189 - DNA, 615 bp, Klebsiella oxytoca
atgggaaagcataaggtattcattagctaccaccatgcgaatgatcagtactacaaaaacgcacttgaaaaaatgaatgaggaacatgaaatattcgtgaatcgctcagtatcattaggtgatatagatgaagatgaagccccacaaaaaataagagagataataagagatgaatatcttagagatacatcagttcttatccttcttgttggaactgaaacaaaaaacagaaaacacgtagattgggaactttactctagcatgagagatagtaccattaacaaaaaatcaggaattttagtcgtcaatctcccgtcaacaaatactacgtacattcgttcaacacatggaactaatgaaaaatcagaagttcatcctaccgtaactgaatggttttctattgataagcgctcaacttatgaggaaaggttcccatatatgccagcaagaataatagacaacttcatgaagagcgggtcttatatatcagtggtcaactggaatcaaatagaaaacaacccagaaacactcagaaaattaatagacatgacttataacgatagagaaaaagcaacgtatgatatgtcgagagaaatgagaatgcataattcatag

SEQ ID NO: 206190 - DNA, 180 bp, Klebsiella oxytoca
atgatcgtgcgtcccccgcaacattggtttattcgtttgtttacctggcatggatccgttctctccagtatcatctttcgactctccctcaatgttggtggtaatgactccaacttattgatagtgttttatgttcagataatgcccgatgactttgtcatgcagctccaccgattttga

SEQ ID NO: 206191 - DNA, 279 bp, Klebsiella oxytoca
atggctgaattagaacgtacgaaagttattattctgaccacccccctggaagatacagcgcaaaagacacggtatgagcaactggatctgaaggctcctacactggctcaggttgaacagttttatgaaaagcaggaagcatccaccgccattgccgcaatgcgtttgcttattgccctggtgacggacacccgggaaagcgtactggcgccgatggactatgtggatttctgcaagtgtaaggagtatctgctcggttttttgaactggaagccctga

SEQ ID NO: 206192 - DNA, 369 bp, Klebsiella oxytoca
atggctgatacctcaaaccgcctggccggtaccgcctacgtcactgtggacggtgtttcagtcatggtggaaggttcctttaaataccagccgtccactgttaaccgctcgacgctgacgggtatggatggcgtacatggctacaaagaaaagccggttgccgggtacatttcagcgcggctacgtgacagcggcggcaccagtgtcctgaattttaacaaacagaccaacgttaacgtgatagccgaactggcgaacgggaaaacgattattggtcgcgcgctctggacggtcaacgttcaggaagtagaaagcgaagatgctgtatttgatgttcgctgggaaggccgcgacgttacggagaattaa

SEQ ID NO: 206193 - DNA, 1518 bp, Klebsiella oxytoca
atgaccgttccgttttcacgcgtacccggtaatctccggacgccgttgttttacgtcgagttcgacaactctatggccaatactgcgacggcgacgcaacgaaccttgctgattggccagatgttggccgccggtacgacgcaggtcaatattcccgttaaagtttcctccgccaatggtgttagtgaactgaccggcaagggctcgcagttgcatggcatgatgacggcctatcagaagaatgatacggccgcggaaatctggatcctgccgctggcagacgactccggatcaatggtggccgcgaaggggagtatcaaggtcgcgtcacaggcgtctgagacgggcgtaatttctctctacctcgcggggacccgtgtgcagcttaccgtgctggccactgataccccggcgcaaattgcgacagcactggtggctgctatcgccaaaaaaacagatcttccggtcaccgctgccgtgaaatctgatgcgaccgatacgattgaactgacggctaaaaatgcggggcttctgggtaacgggattgatattcgcctcaactatctggggacgcagggtggtgaagttacgccggccggtctgacgttgacggtgaccgccatgacgggcggcgccggcgcaccggattttgtggatgcactcggcaatctgcaggataaaacgttcgatttcatcatcaacccgtacgacgatacggcctctcttgatgccatgaaggcgtttctgaacgatgcttccggccgctgggcgtgggataaacagttgtacgggcatgctttcggcacgacgtcgggaacctacgccgaactgggcacaaaaggcgagacccgaaataaccagcatgaaacgctgctgggcgtctatcgctctccaacgcctcggtatatctggtctgccgcggtggtgggggctattgccccaagcctgcgtaatgatcctggccgtccgctgcagagcctgccggtttatggcgtactggcaccagatctgcaggaccgcttcgaactcactgagcgtaacaacctgctgtacagtggcatttcaacgtataccgtcgccgacgacggaacggtcaacgtggaaaacatcatcaccacctaccagaaaaacagttacggcgatgaagacgacagctacctgcaggtggaaacgttgttcagcctgatgttcgtgacccgctatctccgcacagcggtgaccagtaagtttggacgcatgaaactggctgctgacgggacacgttttgcaccgggccagcccattgtaacgcccaacatcatcaaagctgaccagatagccgaataccagacgctggtgtttaatggttacgcccaggatgctgaagcgttcgcgaaaaatattatcgttgaacaaaatgcgtccaatccgaaccgcgttgacgtcctgtggccgggaacgctcatcaatcagctgcgtatttttgcgctacttaatcagttccgcctgcaggcgcagtcaacagatacaggagcataa

SEQ ID NO: 206194 - DNA, 180 bp, Klebsiella oxytoca
atgtttgtaaaaccaaaagatgggcttagcgttcgctgccccgtccggggagagcctttgcccaaagagggcggggaagttccggataataccttctggcgccgtcggttgaaggatggcgatgtcagcctggtgctggaaaaaggtgtgaagaacaccgctaaaaaagaggacgcttaa

SEQ ID NO: 206195 - DNA, 363 bp, Klebsiella oxytoca
gtgacaaccgttcgcatcactggccgcgtccaggaatatgacggggaaaccgatgatgatggggcgctacgagccgaggagtcgctggaggacctgcgcgagcaggtagaaagggcggtcatcaacagctacgagctcacccgtaaaatccagaagtacgcggaaatccgttcaacgattgacgttgacggtgatggtgaagcgcatctgggtcagctgctgtttgagctcgacatcgaacattatcaggggccggaagatttttatcccatcgacccgccaccgctggaggggatcgatatcaccatcgaaatgccggatggtacaccgcgcccgggcgtcagtattaacctgcaggagtaa

SEQ ID NO: 206196 - DNA, 279 bp, Klebsiella oxytoca
atggctgaattagaacgtacgaagaccattattctgaccgtccccctggacgatgccgcgcaaaaaatacgttatgagcaactggagctgaaggcccccacgctgactcaggttgagaagttctacgaaaaacaggaatcctctacctcgattgctgcaatgcgcttgctgatcgccctggtgacagacacccgggaaagcgtgcttgccccgatggactatgtggatttctgcaagtgtaaggagtatctgcttggttttttgaactggaagccctga

SEQ ID NO: 206197 - DNA, 369 bp, Klebsiella oxytoca
atggctgatacctcaaaccgcctggccggtaccgcctacgtcactgtggacggtgtttcagtcatggtggaaggttcctttaaataccagccgtccactgttaaccgctcgacgctgacgggtatggatggtgtacatggttacaaagaaaagccggtcgccgggtacatttcagcacgcctgcgtgacagcggtggcaccagtgtccggggttttaacgggcagaccaacgttaacgtgattgccgaactggcgaacgggaaaacgattattggtcgcgcgctctggacggtcaacgttcaggaagtggaaagcgaagatgcagtgttcgatgttcgctgggaaggccgtgacgttacggagaattaa

SEQ ID NO: 206198 - DNA, 1299 bp, Klebsiella oxytoca
atgatgacggcctatcagaagaatgatacgtccgctgaaatctggatcctgccgctggcggacgactccgggtcaatgacggccgcgaaggggagtattaaggttgcgtcacaggcgtcagagacgggcgtaatctctctctacctcgcggggatccgcgtgcagctcaccgtggtggcaaccgatacaccggcgcaaattgcggcggcactggtggctgctatcgccaaaaaaaccgacctcccggtaaccgctgccgtaaaatctgatgcgacggatacggttgaactgacggctaaaaatgcggggcttctgggtaacgggattgatattcgcttcaactatctggggacgcagggtggtgaagttacgccggccggtctgacgttgacggtgaccgccatgacgggcggcgccggcgcaccggattttgtggatgcactcggcaatctgcaggataaaacgttcgatttcatcatcaacccgtacgacgatacggcctctcttgatgccatgaagtcgtttctgaacgacgcttccggccgctgggcgtgggataaacagttgtacgggcacgcctttggcgcaacatcgggaacctatgctgagctgggtacgaaaggtgaggccagaaataaccagcatgaaacactgctgggcgtctatcgctctccaacgcctcgttatatctggtctgccgcgctgactggcgccattgccccgagtctgcgtaatgatccgggccgtccgctgcagagcctgccggtttatggcgtgctggcgcctgatctgcaggaccgtttcgaactcactgagcgtaacaacctgctgtacagcggcatttcaacgtataccgtcgccgacgacggaacggtcaacgtggaaaacatcatcaccacctaccagaaaaacagttacggcgatgaagacgacagctacctgcaggtggaaacgttgttcagtctgatgttcgtgacccgctatctccgcacagcggtgaccagtaagtttggacgcatgaaactggctgctgacgggacacgttttgcaccgggccagcccattgtaacgcccaacatcatcaaagctgaccagatcgccgaataccagactctggtgtttaacggttacgcccaggatgctgaagcgttcgcgaaaaatattatcgtggaacaaaatgcgtccaatccgaaccgcgttgacgtcctgtggccgggtacgctcatcaatcagctgcgtattttcgcgctgcttaatcagttccgcctgcaggcgcagtcaacagatacaggagcataa

SEQ ID NO: 206199 - DNA, 1080 bp, Klebsiella oxytoca
atgagtgatgatcaggatgtagtcacgctgacagtcggtgataaaaaaatagagggttgggattcagtccgcgtgacgcgctcaatagagcgcttcccgtctgattttagcctgggccttctggactattacccgggcacccacgaaaaacagctggtggtggagggggcgccctgcgaggttcatttcggtgaggacccggtgataacgggttatgttgacaactgggaacccgcgataacgcgagcccgtcatgaggtacaggcgaacggacgcagcaaatgtcaggatctggtggactgttctgccgagtggcctaacaacgtcatcaaccgaagtaatgcgctgaatatcgcttcccgtctggcttcatggtacggcattaaagtttcatccgatgtggatgatttggtggaggtgccccagttcacgattaactggggcgaatcgccacaggagatcatcgaacgagtatccagatggtcggcgctgctttattacgatttgcccgacggtaacctgctgcttacccgcgtaggctcccgtcgggcggccagtggagtggcggaaggggagaacgtcgagcaggcgtactaccgagcagatatgtcggaacgattctctgactatgttggggtctcgatgagcgtttcgccgatcgccggattttctccggatacagcctatgactcggtgacgctggcgaccgcccgggatcccgaagcggccagcatgcgataccgcaaacgtatcgttatcgttgaaagcacgctgatggcgtcgcagcaggcgcagcgcgccatcgactgggagatgaaccgccggtacggccgctcgaagctgttaagcgtcacggtagatagctggcgggataaggcaggaaagttgtgggagccaaatacgctgatcccggtgaatctccccacactcaggttaccagacactgaattgctgatagccgaagtcacgtttatgcgggacagcgatggtacgcatgcccggttgacgctgatgccgccagaggcgtttgcggtgcaaccctatgcattttaccagcagatagcaggattcagccaatga

SEQ ID NO: 206200 - DNA, 219 bp, Klebsiella oxytoca
atgctgattgacggacgtaacgttaacgtcggagatatccacgtttgtcatcgttgccgcagacgttacctgtattccatgattacggccggtgccacgtataccccgaataattacgccagtcacatttgcgccattgatagactgcacccgtactacattccttactgtttgcccgtttgtaaccctcacatcttcaaccatgacattcactgttga

SEQ ID NO: 206201 - DNA, 321 bp, Klebsiella oxytoca
atgcccgccctgaactccgggcacactgtaggttatgtccgtaacccaacgttcatccggtgcttccgggttgaactgccgctggagcttgttgggcgtcacaatactggcttcacctttacgcgcccgtggacttcggtatccgacctgagcctttatccccacacgttgcatcaaccgccagactttgtttacaccgcattgttgcccggaatcccgcagatcgagatagatcttgcgatagccataaacacagcccgactccagccagaactgcttaatatgtcccgtcagcttcaggtcagcatgaaaccgtcgtga

SEQ ID NO: 206202 - DNA, 123 bp, Klebsiella oxytoca
atggcctcgttgatttcatcaatggtggcgctgaccctgtcgtccgcaatcaactcgaaatcgaatgcgttactcatcgtcctgacctccggacttcagtttattaattctgttcgcctgtga

SEQ ID NO: 206203 - DNA, 180 bp, Klebsiella oxytoca
atgaaaaaagaatctaaaattgataatgaatttaaggtcaatgcaataattttattattattgatgatcttaattccgggtgttagactcatggtattaagtatgatctgcatttttgttatccctgtcatatgcatagacacattcgattattttaaaaaaaagaataacagcaattaa

SEQ ID NO: 206204 - DNA, 1842 bp, Klebsiella oxytoca
atgaaaacaaggtctttttctatttttttgcttaaagcaggctacaacgcacagaactccctcaagccagatcatcaacttctcgatgactttcaggctcaaaacctcccacagggtgcaagtttatttatttctgacagatttaaaacaactccttggtgggtgaattacttctcaattggcgggaatttagaacaagaaagtaagggagcgttaatttttcttccagtaagagatcgatgtttcgcactaacttttgggcacatttatcacaatctacgcgatgtttcctatgagtatgactttggtcttaaagtaacattaaatagccttgaacctaaagagttaaaaagtgctgacatagtggatcctggtgcatcaagaagaaaaagaatgcaagttcctgtcatgtctgacttaacctatttggattttgatagtaatagcgagattttaaaaagcttaacaggaaaagttaagccacagtatatagagttatttaaaaatgccactggctctacaaatttaaaagtaggtctaaaattagaaccggatgagcttatagttttatgtgaacagctactggatttatatgcaagcaatgaatatttagagtctttccctaacatacaaaaaatagtcccggaaaaagaccctctgaaaatagaaaagttagacacttcacttttagaggcatttataaataaaagtgatgaattatccttatcaattccggacattgttgattatagtgacaatatatattgtgttttcaaaggaagaaaaggaatctccccaatatatactgatattagtcttgatgaattttatgactatctaggagagattgatttaaatacatttgatatagaaaaaataaaaagcttttcattaaacctctgtaatgaagaagggattacaactaaagcatataatatttacagaagctttatttatgacattccctttgatgatgagggagttgtttatcatctttgcgaaggagaatggtataaagttgatcaagattatttagcaattttgaaagattatatcgatcaaagatgcgagaacacctcacttccaccatacaatcacgataacatagcagcaaacaaaagaagttatagtgaagaaaactacaatgaagatgttgcccgtaactcacttacacatatctgtcttgatcaaacagatataagccctgatggatatacgcaaatagagccttgtgacataattagttataatggaaatacgtgcattttccaccatataaaaatatcctcacgctcatctcagcttagtcatctttttaatcagggtgtcaactctatggagttgttaatactggaaggacatagtagagacaaattaaaaaatctcattgaagaaaaaatacaacatcgtgatttagatagtttcaagcgagtaatcgatggaaatgactataaagttgagttcggcataattacaaaaaaacctgcaatatctaaatctgataaccttccacttttttcaaaaataagcttaatgagaagtttaagagcactttctctttgccgcacggaaggtgtggtaagttttatacaagatataagtcctcctaaagaaagctatagtaaatatcctcgtattacagtagtcgtatctcttgatgcaaatggtaagaatgaggttgttgtagataaaaaccaaattttcccacaagggaaaaaagtaatgagatgctctcaagaaataaccaatagcgctatcggttcaaaatatatgatttatgtcaaagcaagcgaaaatggggatcttagcaccagtcacgcttgggaaagtgaacggatttag

SEQ ID NO: 206205 - DNA, 954 bp, Klebsiella oxytoca
atgacaagagtaacttctgaatcccacattggcgagctaggttcagcttttttacaatatctatgtagcaaacaagaagtaatttaccgtccagttaggatttttgatgttggtatagatgcgtttattgagcctcaagtgggaaatattgctacaggagcaatgataggagttcaaataaaaacagggaaaagctttaaaactagtttaggtcgttattctttcaaaagtgataaagctcattttgaatattggtctagatgcactttacctataataggtgtcgtctatgatcctgaggatgaaaaaggtgtttgggttaatttgagcgatatagctaaggacaggcttaccaataaagggccatgggtaattaatctttctgttcaagaacacttattagactctgacagcttgcaaaaccttattgatagcgctgaattaacaaggattaagaaagattttattaagttttcttacttaaccatgcctcaatcgaatcaaaagaaagagaaagattcatttcaaaatttaagcaccatctcatctcatactgcatgggatgaactattagatacttttctttcccttctttatgatgacagaattgttgctgatgctggttatagattaagtttatatttcccgaaggaaaaaagtgattttcgctacaaatatataataaaaagattgtctttgcttaatgatgtccagttaatcaaaatgatattttcagtgaaggttgcattggatgattgttgtgagcatgtggcggagcatatatgtaatataatgagatacattccagatatatgtttaaggttggaaagtattatcttcaacaataatttgagtaatgatgtgaatgctgttgctattcaattgattgaatctttatcagaatatgaacgtcaagatttatgggacatgattagtaataaaaggttgttgtaa

SEQ ID NO: 206206 - DNA, 1497 bp, Klebsiella oxytoca; identical to SEQ ID NO: 204194

SEQ ID NO: 206207 - DNA, 1272 bp, Klebsiella oxytoca
atgagcactgcaactgactttaagacactcctcgacaatataaaaatagataatgcaggccagattagtaaaaggtatggtcgtataactaaggttttgaaccaatacttttataacttagattctaagacagccaattcactacaggttggttcctatgggcgcttcacaggaattcgggggatctctgatcttgatatgctttactttctacctgcaacttcatggccaagattccgagatcgacaatcgtatttattacaggttgtgaaaacagaaatcaagaaaattttcaaaaatacggatattcgcggtgatgggcaagttgttgttgttaaatttaagaatcaagaggttgaagtagttcctgtattcagtaatgaagatggaacttttacatacccggatacacatgatggtggatcgtggaaggtatgtaaccctagggccgaaatgtcgtcttttagggcactgaatgatgataggaagggacatctgagacgtctatctaaaatgattcgagcgtggaaagctcgtcatgaagttgagataagtggattcttaattgatacactgtgttataattttttctctaatctaactgaatatgatgataagagtttcaaaagttatgatcaactttcgcttgattttttcactttcttagagaatgaaggtgatcgagtattttattatgctcccggtagtcgctcaaaagtgagcgtaaaaaaatcatttaataaagtagcaaaattaacaaaagaatattgtgaagaagctttatctgctacaagtgaaaactcaagaaacttagcttggaagaaagtttttggcaggccttttccaaattatacgacaaaatcactcagtaatgtcaatgtatctgaacagtttattgaagatcaatatgagatgaatttatatggtcatgtttcgatagagtgtgagattagaaagaataatttattggaagctcttctttcaaatattcttggcgaagggcatgatattagcacaaatcgcaagttaagattctatgttgatgagataaataatatatctcacccatataagattaaatggaaaataaaaaatgtaggtgatgaagctgagcgccgaggaaattttagaggtgaaattttagacgatgaaggaggttctgagcgtttcgagaccgcagatttctcaggacctcattttgttgaatgttatgttatttatggcaaccaagttgtagcaagagatagaatcgacgtacctatacataattag

SEQ ID NO: 206208 - DNA, 549 bp, Klebsiella oxytoca
atggacaaaaatatattagaagggcaattaagagagtgctatggaagggtcgtttatacacataaaactcatgagaaatgtgcagatattcttcaaaacaaactaagctgcatgaaaaatttacagctagttcttttagcaataactaccggtagttttataaccactgtagtgggtgatgctaaaataggtgctatcattgggtcaatactttccgctatacttctctttctaaattcatatttaaaggattatgatttaggaactatagctcaaaagcacagacaagctgctggagatatgtggttaattagggagagatatttatctctgcttactgacttgaaaatgcaaactaaaagtatagaggaaattctccacgaaagagatgctctgatgaatgaactttctgcaatttatatgggagcaccatccacgaattacaaggcatattcaatggctcaaaaggcgctgaaggaacttgaggatatgactttttctgatgaggaaatcgataaattccttcccactgaattgaaacgtaaatga

SEQ ID NO: 206209 - DNA, 516 bp, Klebsiella oxytoca
atgagaaaagtaaagacagacaacagtgatttaatcgaatacataaatacagtcaaagaactaaaaaatcatatttcgatagaggtatacaggaatgaatatcgtaggctacgttctgatgatgttccattggttaaggctcaaaaatttaagtctgcacatactgaacttcgcaggctggaaaaaaagagagaatctcttattgaatactttattgaatactttattgaatactttattgaatactttattaacgagttaaatcctatcagcagttcaaaagctaatacatcagcaaaatcatcaggtaatcttgatctgtttaacgaacgtgtattataccgcaaggccatttcagaaaaaagtgatgaagaaattgttgccttggtcataaaacagcgtacagaagccgctgttgagttccagcgttcaattgaacatagccttgatcaactctctcacatctcgtcagagttcgaaccatcaagccagaagcgcaggaaaatgtctctttaa

SEQ ID NO: 206210 - DNA, 324 bp, Klebsiella oxytoca
atgcatattgaagaacatcattatggtgaaaatgtaagtaaaataaaacttgatggaattgcaccttttgcaaactcatataattttgatgttgcaatgtacttgcaaaataagaaactaaagaaaaaactaaaagatattgatccaaatattaagcaatatatgaacatcgtgttccagtaccgtcaaggtcaatggaacattggtgatattttatcttgggaatatgaaggagttaaatttgaggtagtactatttggtactcatatgattagtcagaagggtaagcaattctatcagtactgtgtaggaataaaggaatga

SEQ ID NO: 206211 - DNA, 582 bp, Klebsiella oxytoca
atgattaaaataaaaagtaaagtaactggtttaaagcagtcaaagatatatattaataaagaaggaaagaaacttggtagtgatttccaaaacgaattgatcacaaagactcgtgaattagctgttaagatgcaaactgatttaaatgcctctattgatagaggttctgtgcctttcacaagaaacgctttacggtcttggtttaaaaagagtagggcaggggtttcatgttatattggagtacttcaaaaccagaatgagtatctatacgatattatagtagaacctaaagtaattgataaatttgttaatacatctgctgcacgattgactaaagaagggaacatttctcagttacgcagtagtattaaaaataataaatttaaagttgttacatctggtggtaagaaacgattaattgatactactaagaaagatactaaaagaaatacaaagcgtgtaattggacttcatgaatctaagaaacgaaaaataatttatgacttctattctgaagcagagaagggcatacgtctaatcatttcagatatacaaggtcatttttcagtgaagaggggataa

SEQ ID NO: 206212 - DNA, 318 bp, Klebsiella oxytoca
gtgaaaaaggaacgtcaggaacggaaattttttccttttctgtacagcacaatgctgtgccaggctgaattcaggaaagcaaccactggcccactctccttaactttcttctgtcttctgatattcaggagcatttgcgcgcggcagctgctgactgttcagtctgtgaatacgcaatctttcccggaaatactcacggagatgcccaggctgttcacgctccgcgagttcgggcacaacaggcttgttcatacgctcctgccatgcgacggcagcggccgctttatcgacggagactttgtcctgttcttcttttga

SEQ ID NO: 206213 - DNA, 777 bp, Klebsiella oxytoca
atgaaaaacagcgaaaatgagctcgctgagcaactgatagagcagaccggagataacacgctgacgttaatggataaaggctattattccctggggctgctgaatgcgtggagccaggcgggagagcaccggcactggatgcttcctctcaggaagggggcacagtatgaagaggtcagaaaactgggtaaaggcgaccatctggtgaagctgaaaaccagcccacaggcacgaaaaaagtggccgggtctggggaatgagataacagcccgcctgctgagcgtgacgcgcaaaggtaaagtctgccatctgctgacgtcaatgacggatgccatgcgttaccccggtggggaaatggcagacctgtacagccatcgctgggaaattgaactgggatatcgggagataaaacagacgatgcaactgagcaggctgacgctaagaagtaaaaagccggaacttgtggagcaggaactgtggggcgtcttactggcttataacctggtgagatatcagatgattaaaatggcggcacatctgaaaggatactggccaaatcagctgagcttctcagagccatgtggaatggtaatgagaatgttgatgactcttcagggagcttcaccagggcgtatcccggagctgatgcgcgatcttgaaagcatggggcagttggtaaaattaccgacaagaagggaaagggccttcccgagagtggtaaaggaaagaccctggagataccccacagccccgaaaaagggccagtcagttgcttaa

SEQ ID NO: 206214 - DNA, 1095 bp, Klebsiella oxytoca; identical to SEQ ID NO: 204206

SEQ ID NO: 206215 - DNA, 189 bp, Klebsiella oxytoca; identical to SEQ ID NO: 204207

SEQ ID NO: 206216 - DNA, 2664 bp, Klebsiella oxytoca
atgccaaatgtaacgtttaataacgatactagtactattgaagtttatgatagttctttttcaacaaagttacttggtagtaaaagtgttaatgatattgagattgtagttaactatattccagataatccaacacatgcatttttagacaatgcagtagaaacacaacaagaatttcaattaatcattcagtaccaaactgatgaagagggaatgattgattattcaattattaatggtcaactctctgcaagacatattagtggtgataaagatgcagtagtacaggcaagttacacatttagtccaaaagaagtggctattcgttctgctcgtgcaatggcatcaatcccactcgttgaaggctcatatggcgttggttcaaatggagtcaatgtaccgcaatatcaaccagataccccagcaggtaatagttttattaaaatcccagcttcatctacgggtaatccagcaggggcagatgtaatgggtattggattgattgatcaaaattcttttagttcaattgcattaacaaaatctggtgcacttgcaatctatgcaaagaatggttcaactgcatggacacgtattgtcacttccccaatggcagatgcaaagtacttaccatttagtggtggtacaattagtggtaatctaaatattactggaatcctatcacttacaaatgcactaacagttgcaaatggtggtactggagcgactacagcagcaggtgcacgtactaaccttgatgtttattcaaagagtgaagtagatgcaaaagatactgcattaagtaatagtgtttatacaaaagcacaagtagatgcaactgttgcaacactagtaccaaaaactactacagtaaatgggaaagcattatctagtgatattgtaattaataaatctgatgttggacttagtaatgtaactaatgatgcacaattgaaagttgcatcaaatcttagtgatgtaccaaataaattaacggcacgtacaaatcttggtcttggtgaaagtaatacaccatactttggaagtattgaactaagtgcagtaacgccatttattgattttcactttaataaaagtagttcagattatacaactcgtctaattgaatcttcttctggtacgttgtctctattgggaaactattcaattaataatagattgaatgtaactggtttaagtactctaagtgatgcaaacattactggtttaagtaccctaagtgatgcaaacattactggcttaagtactctaagtgatgcaaacgttactggtactttaacattaacaaatgcattagcaattacatctggcggtactggagcaagtacagttgagggtgcacgaagtaatcttggtcttggaacagcagcacttagtaatattgggacctctggagccaccataccactactcaatacagttaatacatggtctgcaattcaaaatcatagtgcagaaattgtatcaagttcacaaaatataattcgtggaacatcatcatcatatggttttatcttacgtaatgatggttcaaatacatatatgcttcttactaataatggagatccaaatggtgcatggaatactttaagaccttttacaattaataatgccaatggtaatgtaactattaataacctagcattgaataatgcattggcaattagtaatggtggtactggagctactacagcagcaggtgcacgtactagtcttggccttggaacggcagcagttaataatattggtacatctggtgatacaattccactattgagtactgcaaacacttggacctctggacaaacatttaatagtacaattaatgttagtggtttatcaacgttatcaaatgcatcaattactggtactttaacattaacaaatgcattagcaattacatctggcggtactggagcaaataatgcaagtagtgcatggcttaatctactaaatggacgtacagcagcaactgcacgtaatgatctaggagttactactttctatagtaatggaagagaaaaccaagcaggtgctggtgtgtttacatataatgactctcgttttggatggaatgagacatatgcaactgtattgcaaataagtaacttatctaactcaagtgataatgttggatcaggcagatggcaaaactatcttgcactaactactacgggtaatataattttcgcctcaagtattaatggtacttatcgatcagtacgagtatggtcatcaaataatacaactgttgatggtagtgggtttattaaacaagcatcaccaattattcgtgttgtaagtgatgtaaatgaaatgacttcaaatttccttgagggttttaccttatctggttctggttctgttaatagtgaagcagagggtgtagtaattgagcgtactgcacttggtgtttataaaatcaccgggtcaaagggactccatcaggatggatggcaaattgaagtaccaaaagatgtaaatggtaatagattgtgctttgttaaagttgatacagataaaaataatgtaattacacttaatgtgtttaaacctaaacttgatattgaaacgggtgggattatagctggagcagttattgatattccaactggtagatgggtagatatacgtttagaaatgtaa

SEQ ID NO: 206217 - DNA, 300 bp, Klebsiella oxytoca
atgaatctagaaaaattaaaacaaaaactaaaaccatcacttgtaccttttacaattcttgatgagacaatttacattcatagaccagcagcaagtgatttacagaaatgtgattcagttgctagtactttgatttattgtgtaaaagatgagaatggtgatcaaatcttctcagatgaagatattgatggacgcattaatgttggtttaattgactttgcataccaaaaacaaatttatgatgctatttctaaattagcagaagcagcagattcaatctcagagattgaaaaaaagtaa

SEQ ID NO: 206218 - DNA, 555 bp, Klebsiella oxytoca
atgattaacttatcaaaaaacattaaagtctctgctgttaatcttaaaagcacagaaccgaagtatgaacacacatcttggactggacaagtaatacaacgtttaacgggtatccagtactatgaattagattttacaatgacatttaatactaaagatcgaagtgaagtactagcatttattggtgaatatggtcagggaaaagcatttgaaatctcactaggtcacttatcaacatatgtaggtaatcagactggtgcagttaattgtactgcaacactaccatcaggtaatattgttatcccaactaatacacaacaacttggtattggtgaattaattcaattttctaaccataaaaagatttatcgtattattgctcgtactaacacatctctaactatttttcctgcactacgttcaaatgtacaagctggtgaaatgatccgttataacggaataacactaaatgcagtacttaaggcagataatgattattcaatgccaattacaactattgttgaaatgaaatttagtgcaacggagaaattctaa

SEQ ID NO: 206219 - DNA, 627 bp, Klebsiella oxytoca
atggatgatttattaacaaacccaaacttacttaagtactggaatctagttaaaggtgagaataaaactaaattgactattactgatgttatgtcacttggtcaacatgtaactgcatttgacgtatttccagttggacaaaactcaattcactggactgatgcatttaaagatatgattcttggtggtcgtctctatctctcatttccagatatagtacaggatactctaccaagttttaatgaagagaagggtgttagtaataactcaatcttatttaagattagtaatattgataactcagtacaaatgatggctctatctggtcagctattcaaagcaaaagtaaatattattatggttgtccttgacccatatacaacagagccaatttattcttctctaatgttttgtggatatattgattactgtcaggcagtagcaaatccaaataatgcagttactgagatgacagttaatatcaactcaatatatcagaagcttgatgtgcaaacacgtactcttgctgccaattcagtatatcaaagttattataaaggtgatgagtttatgagtcttctaggacaggtgaataaagccgatcaggaatggaggatgaaaaaatga

SEQ ID NO: 206220 - DNA, 387 bp, Klebsiella oxytoca
atgattcacaatgagataatgaaaattattgaaagagcattgtatgaaccgtatcagtatggagaaaatgattgcaatatagttgcattaagaatagttgatttactttgtagtactgaatggtcgcagattgcaaagtactcaactcttaaagaaggcataaaacaactaaatgatcttggttttgattcaacacaagacattattattaaagaatgtagagaagtagaaataccaattgatggtgatatttggctagatgatgacaatccactaattatgggaattgttgtatctggtcgtctaatgggtgtcaatgaatcgcatgatgcatttgaattacacaataaaaagaaaaatggaaagtactatagagggagtaagtaa

SEQ ID NO: 206221 - DNA, 3261 bp, Klebsiella oxytoca
atgggttcaggtggtggaatattaggagcattagtaacagcagttatggtagctgctgctgtttatacaggtggggcaacacttgcagtagctgctgcatggggtgctgctgctggtgcattatcattagttgcaacaagtatgttaggtcagattgctaccacaacgggatataatgacgtatcacaggcattaagtcggtcaacgagtcctactagtggattaccaattatctatggcggtagtggaccacataaagcgggtagtactggtggttcgtttgtactaacatctgttatcaataactggtataacgtaccaaatggaagttctcagtacttctttagtgaacaagtagtatcaatgacaggtactggtaaacacattgagcaaatttattttgacggcgaaccagtactatcattgccagtaactacagatggtatagttccaagaaattcaattatatcaaaattccaaaacttcttacaattggaagtacgttttggtggtgactatacaacaacaaaagaacttgcaaaaagatatgcagggccaaaatggacagataaatttcttggtaatggtgttgtatcaatttcgtcagttatctttaaaactgaacaaagtactatggatggtattttgacaaatgataactttaatatgaccgtagaattaaaaggtcaaagcatttatgatttcaattctggaaatacatttgctacttcttgtccagcttcacaggcatatgattattttgtaaatccaatttatggacttggtattgatcctgcattaattaatagacaatcatttgcagaagttagtcaatggtgttttcaacagggattaactagtaatattgcaatgtcataccagagtacatataaagaaaacattgaatcaatattacaggcatgtgccggtattatctatattcatggtggtcaaatatacttaacggttgatcgtaagacactatctgtacactcattcaatgaatcaaatatcgttggtgaggcaagtattagtacttcaggtacttcagattactataatacaatcgatgcaagttatactaaaccagattcaatgtatgccaatgaagtactacgtattccatctgacattgataatgatgaagtcattaaatctgatggaatagttattactcttgcacgtaatttcaaagcagtatatgaccaaaatattcttgcaaatcttgttaacgcagaactacgtaagacaaagtttgcaaaacgtactttaacatttacaactgctgaaggttgggatcttcgtgtatgggatagtattgatgttaattttaaagagttaatggttgcaggtaagtttaaggtactatcaaaatcaattgcaactgatcaacaaaatgttggctattgcactataacctgtattgagtatccagatgcaatctttgacggtactgatcccggtacatggtcgccgggtggtattattaatccagatgagggacgtgcaatactaccccctacaaacctctcagtgacacgtagaggcgatataacaactggatcggtagttacccttacgtgggaagaaagcccttcacagaacgttagaggctattacatttactatcgtgagactggtgcagtaaattggattcttgcaggacagacgccgccaactaagtatgagtttgatatatatggtttagacttagataagaaatatgattttggtgtatcggcatttaatataattggtggtgtatcagttaaggcagtacttggtaatataacaccagagtttaactttgctctaccagcaattactggtttaaaactaactaatgcaacaactggtttatatgaaacaactgcattagatttcaatttacaatgggataaccaaagtaatattaaggttaataatctatcattttcaaactattttaaatattacgttgttaagatttatgatggtagtactttaaaggcaacttactatactaaagaagatggatttaattttacatttgagctaaacaatttacgcatacgtaaaccaactattggtattactgcacagggattcaatgctggaacattttcaccagaagtaaaaataactgttgagaataaacaatgtggtctagttgaaggtgtccgtatttcgggtggttttggtaatttatttgttaactggattgaatcaactgaaccagattacgcgggtgcaagtattattctttcaaccgatattagtactcaatcatatgtaagtaataagccagagtttgattcagtacccaatgtacaggatggtagttataaagttaaagttggtctttttgatgcatttggtatggataatattcaatactcagaagaaattgatattgatattaactccaagtatgtctttacaaaagatgatgcagatgaaattaatagtatattagatcttgataaacgtcttgatgatacacttagtagtgccgtcaacgaaagtactcaatatactaatacacaaattacagtactacaaaatcaaattgacaatgatattaatgcaaaaatcactgagatgaatcaaactattgttgataatgatactgctcaaactcaaaagattacacaattaaaatctgaagttgatggtaatattgcaacagttaatcagcaaatgacaactaaagccgataagagtagtgtgaatgcatcatatacattatctgttaaagcaggtggtgaggttgctggttttagactactagcaactgatggtactgagaaatcatccgcagtgtactttgcagcaaacaagtttattatctctggttcagatactgcaactgctggtgatactccaccatttagtgttgttaatggaaagacatttattaaaactgccatgattcagcaaggtagtattggttcagtttatatcgcagatggtgctattactaatgctaagattgcaaatgcaagtattaatgatgcaaaaattgttgatggtactgttactaatgctaagattggtaacttcatatcatcaaataactatgattggagtactggtaatactggatggcttattagcaaggatggtactggtgtattcaataacgtaacagtgcgtggaaatttaactgcacagaatggttcctttgcattcaatggtactaataatgtagttgaaataaatgatctaggtgtaacagtaaatataccaggcggcggaatgattagactagggagatggtaa

SEQ ID NO: 206222 - DNA, 342 bp, Klebsiella oxytoca
atgaaaaatagaacaaaaaataagatggtggttgatgcaactgagttattacttgatgaatggctacaattaattaaagaaaacgacaaaaaacagtgttatttaattaatgactgttgttttccaacggataaaatgctaggtgagtatattaataatattaatgaaaggaatgatgatgaggttagatatttgatctcaaagtttctgatatccggggggagatattattcagatgattctattttacagtttttcaatacattttctcaggaaagaaagcaagagcttctaaggaaggtgcgaataagcaggtcatttcttcccaagctgactcgctga

SEQ ID NO: 206223 - DNA, 1101 bp, Klebsiella oxytoca
atgtataagaattggaattattcaaatagaccacttgctaatttagagtctctattcaaaatgctggaaacaaatgaagagaggcttacttatcttttaaaaaacaaaaaaaattttttcaaaacggtaccggtaatcagaaaaggtaaaaaaagaacgacgtataaagtggttggtgaattattaaaaatacatgagcttattaaacagcgtgttttttcgaagatatcacttccggagtatattactggcggtaggaaaggcgtcagctatatagatgattgtatatctcatcgtaataaatcaattatcattcaagaagatatgaaggatttctttccttctataaaagaagagttgatagctaaagcatttcaatattacatgaacttctctcctgaagtttcttcattattagccaatctatcaacacttgaaggctcacttgttcaaggaactaaattaagtacggacactgccaacttaatatttttagaagaagaggctcttatcagtgaggaagtcagaaaaataggtggaaaatatacgagatatgtcgatgacataactattagtttcgaatcaggagttaataatgaaagtatttcaaaaataaaaacaatgattttgtcaatggtgctcaaaagtggaattagattaaatagaaagaaatcaaaagttttgagaaatggtcagtccaaaatcgtacatggtgtaaaagtaatcaaagagcttaggccaacacaaaaaagaaaagataatataaggatgtgtctttttaatttgaagaaaaaagtgattgaaaaggaaagtgttatggatgttcttactatgtattttaaaattagaggattaataaatacattaaagcagcaaggtgataaaaatcatgcagagtatataaagcaagctaatcagattatagctggtgttgataaaaaggatgcaataaaatcaataaggaaaatgagaaaagttagagatatcaagaaattaaggtttttgtattcaaagttaaaaccattaggtaattcatctaaaagtgtatcggccattttagatgttgaatatgaaaactgtaaaagcaaacttaataaataa

SEQ ID NO: 206224 - DNA, 474 bp, Klebsiella oxytoca
atggaaaagtataatgatctaaaaaacaataaaggtatttatcacagtgaagcactagtagcatggcataacatgcactatagagttagtaatattctaagctatggtaatgtaacaatatgctctgaatggtacacatttagtaatttttataaatggtttagtactaattatgtagaaaattggcatttagataaagacataaaaggaggcagcgaatacagcccacagcattgtgtattcgtacctacagaagtaaatcagttatttcgtaatgtcagtacgacttatgctaaaggtgtggcaaaaaataatgatggttatcaggcccaaattacaatcaatggggtaaataaaaaattaggtacttacaaaacaattgaggaagcaaccgaggcatatcaagttgcccgtgctgaaagattgaatgaacttactattcagtatccaacactagcaaatattattaactaa

SEQ ID NO: 206225 - DNA, 732 bp, Klebsiella oxytoca
atgaataaaattcatatcaccctgataactattacttcattgtatgcaagtttaagtaatgcggtttcctttgattgtactaaggcaaaaggttatgttgagttaactatatgcactacgccagagctttcatctttagatgaaaaattgaattcagtttacaaaaatgcactccagcaaagcaaagaaaccaacaatgctctcaagaaggcccagatctcatggctaagagatataaggaacaaagccacaagtgcgagtgagttaaaaacagcatacactaccagaattgaagatcttaaaatggtagttgagcctagaaatgaaaagcatactgttatgcaaccacaaccacaaccacaaccacaaccacaaccacaaccacaaccacaaccacaaataataaacaatggaatttataagtgtgataaatttgaggcaacaacccaaacaaggcagggtacaaagtataactcaggatattattcagataataataccagtataacgtatcatataaatgatgataaaataacagtgcgtttagtaatgcatgaaggtactgcaagtgatgaggtcgctgcttataatagtacatctgttgatggttctcgcaagtatgaaaactcaagcagtaactattatgtatataaactaaatgatgaagctattaaggtggtgaacactgatttcaacatgaatgggacaattacacaaatatgtaaaaagtga

SEQ ID NO: 206226 - DNA, 777 bp, Klebsiella oxytoca
atgtatacatataatttagtgaagaataaatataacttgatagaaatcgagctatataatgaaaaagctaagggtatgccagtcgttatagctccaggttttctgacatataatgataagtcatgggctataaaattaagcaaagtaataaaatctccaattatatttgtaaattggcaatcatcaaactcaaatgaactcttaaaaaaatcaatcatacctatagtgagtggattggcaatgccacaactctcagtaaacataccaataaatgtaataatgatgataaaaaaagtgtgggatgaatgctcacaagactcttatcatgctggagatcggttggcatgttttctgaatgatgtatgggatgaggatgatcgtgcaatttttttaggacattcacttggagtaaggataataacaggggcaatgtcaagactgaataacaaaaatatatgttcatcagtatcaattgctggtgcaatgccaagagaatattatgaaattaatctaaaactttgcaaggattataaaagtatagaacatataaatatctataacgataaggaccgtgttttgcaacttttatataaactcggtgagtgggagtttaaaaataaacctatagggttgtcagagtccagcctcggaaatgttaaaaacataaacttaaatttaggtcatttatcatgtttttcaaatgaaaatttcattagatttatttcagggtattatatgcagaaaagagcagaatattacgcaagtaataaaatctaa

SEQ ID NO: 206227 - DNA, 654 bp, Klebsiella oxytoca
atggaatttggcaccattgctgattggattagtgccttgagcacattaggtacatttgctgtagcttatgttgcattgcggaatgctcctgactggattgcacagaagcactatgatatagctcataccatcattgaggattctgttttcaaagacctgagaaaagttcgctcatcaagtttgtatttaaaaacaaaaattgcaatgctatgtagtaatcttgtgcgtgttgcggaacgtagaaatcaatataataatagctttgatactataattgatgaaatagatattactcttgcacaatatcatgatctatcatactcaataataaatcaacttaaagccatatcacgcaccaattacaccgaatcccagtacactttagatattattaattttttaaaagatgcggctgaaaaatacaacaatagtaatgtgcaactaattctggctagtggtgaagttagcatgctccaaaaagctgatgcatcagtcatcgatgccacaattaaagaaatagtggtaattagaaatgatgtgattaatctgaacatagaaatatctaattttatcaatagaatatattcggacaatctcccaatcgataattttatatactataagccaaaattaaaacaccgcatagataaataa

SEQ ID NO: 206228 - DNA, 261 bp, Klebsiella oxytoca
  misc_feature (42)..(51): n is a, c, g, or t
atgtggctgagattgaaaaattactatcgcagtattttcatnnnnnnnnnnattcctgctagttcttacgtagaactatttgaatcaatagatgcaatagaattaaaaacacgtctacaggaaaagatagacgaatcattagaaggaatagggatgtttaaatatgagtacgaaaatgaaattaatgaagctgttgaagaagacagtgaagataatattaccaccaaagaaacagaatccggcagagtgggtagagaataa

SEQ ID NO: 206229 - DNA, 777 bp, Klebsiella oxytoca
atgaaaaacagcgaaaatgagctcgctgagcaactgatagagcagaccggagataacacgctgacgttaatggataaaggctattattccctggggctgctgaatgcgtggagccaggcgggagagcaccggcactggatgcttcctctcaggaagggggcacagtatgaagaggtcagaaaactgggtaaaggcgaccatctggtgaagctgaaaaccagcccacaggcgcgaaaaaagtggccgggtctggggaatgagataacagcccgcctgctgagcgtgacgcgcaaaggtaaagtctgccatctgctgacgtcaatgacggatgccatgcgttaccccggtggggaaatggcagacctgtacagccatcgctgggaaattgaactgggatatcgggagataaaacagacgatgcaactgagcaggctgacgctaagaagtaaaaagccggaacttgtggagcaggaactgtggggcgtcttactggcttataacctggtgagatatcagatgattaaaatggcggcacatctgaaaggatactggccaaatcagctgagcttctcagagtcatgtggaatggtaatgagaatgttgatgactcttcagggagcttcaccagggcgtatcccggagctgatgcgcgatcttgaaagcatggggcagttggtaaaattaccgacaagaagggaaagggccttcccgagagtggtaaaggaaagaccctggagataccccacagccccgaaaaagggccagtcagttgcttaa

SEQ ID NO: 206230 - DNA, 141 bp, Klebsiella oxytoca; identical to SEQ ID NO: 36145

SEQ ID NO: 206231 - DNA, 1089 bp, Klebsiella oxytoca
gtgggctcggagatgtgtataagagacaggatatatccagatgcaactatttacagtgttgtggattttttgtctgaggatgataaaaacaaatttaaaaataaaaaaattaatacgaccttcattcaaaagttgcctagagcccaacggaagtatcaacaatatttgcctttaatgcccttagcaatcgagcaattagatgtatctgctcatgacgtcattctttcaagtagtcatgcagtggccaaaggggttttaacaggaccggaccaactacatataagctacgtacattcacctatacgatatgcttgggatctacagcatcaatatctgagagagtcaggtttaaatcgaggtctaaaagggatactagcaaaatggatactgcataaaatcaggttatgggatgtcagaaccgctaatggtgtggatttttttgttgcaaattctaaatttattgcgagaagaataaaaaaagtctatggacgtgatgctgatgtaatttatccaccagtagatgttgaccgttttaagttaaaaacctcaaaagaaagtttttttcttactgcgtcaagactagtaccatataaaaggattgatttgatcgttgaggctttttctaaaatgccagataaaaaattggtagtaatcggagatggtcccgaaatgtcaaaaataaagaaattagcgcgatctaatatagagattatgggttatcaatcaaatgaaatcatggaggaattcatgatgaatgcaaaagcttttgtttttgcagctgaagaagattttgggatcacgcccgttgaggcgcaagcgtgcggtactcctgttatcgcatatggaaaaggcggtgtacttgaaacaataaaaccttatggggaagatgagcctacaggtgttttttttaatgagcagaaagtggattcaattatttctgctatcaatagatttgaatcaatatctcattttatttctcctattaattgtcgaaaaaatgcagagaaattttctgtctcacgatttagattagaaatcgaaaaatatgtcctagataagtataagcaaaaatttgagcgaaacgattga

SEQ ID NO: 206232 - DNA, 318 bp, Klebsiella oxytoca
atgaggcattttacaagtaatcaaattgattcaactttcctaaatgcctttggtcaacctatcgaaattaacggggtgacatttacgggtattgtagatgtacgccccgttgtcgttgatagcggtactcaaggcataattgaaggtacagaaacattcatctcaattaataagaatgatttaaatctagtatcaattgatgcaattgttaaaattgataatatagaatatacaatctataacatttatgatgatttgagtggaatcgttgaagtttatattcgtgaatcactactaaacaactacgggggttactaa

SEQ ID NO: 206233 - DNA, 681 bp, Klebsiella oxytoca
atggcgtctatagatgaaagatttcttgattttattagaactaagaaaaacaatatagtattggacgatataaagaatgatttcaagaaaaatgatggtactaactctaaaatggcagactacttgttatttgatcgagagattattttagaacaaaaattactcacaaatgacagaactgatttgattaatgaaaaacttaatgaattagccaagacagatgaatggctcaaaaaacgttggtttggcagtgttcatattgaggagttgattcaacagcaccctgattcagatgatttcagaaaaaatataatggattatgcttatagaaatattaaggatcttgtagcaacagccaataggcagattagatcaacaaaacaatctttaaatatccctaatgcagtcggtggacttgttattcttaatgaaaaaataatgccctatgaatcagagaatgtaatgacagaacttaattttcttgttgaaaatcctcattatgaacatgttgactttgttctctatatatcagaactacgtagaacaacacataatatgattgatatgtcagcaatgataaaaagcagatcttcaagatatgagtttgtaagttggtatataaaaaatgttttctcattcgatttcgcttcattttttaatcaccccatacaatttttatag

SEQ ID NO: 206234 - DNA, 393 bp, Klebsiella oxytoca; identical to SEQ ID NO: 100994

SEQ ID NO: 206235 - DNA, 468 bp, Klebsiella oxytoca
atggcagaacaaaacagcaccgaaatgactttccagattcagcgcatctataccaaagatatttcttttgaagcgccgaacgcgccgcaagttttccagaaagattggcagccggaagttaaacttgatctggatacagcttccagccagctggctgaaggcgtgtatgaagtggtgctgcgtgtcaccgtaaccgcctcgctgggcgaagaaactgcattcctgtgtgaagttcagcagggcggtattttctccatcgaaggcatcgacggtacccagatggcgcactgcctcggcgcatactgcccgaacattctgttcccgtacgcgcgtgagtgcatcaccagcctggtttctcgcggtaccttcccgcaactgaaccttgcgccagtgaacttcgatgcgctgtttatgaactatctgcagcagcaggctggcgaaggtgctgaacaacatcaggatgcctga

SEQ ID NO: 206236 - DNA, 951 bp, Klebsiella oxytoca
gtgacgcgttttctcatcgtctggagcgttttcagcgtaagaaaatggttcgcgcagctgagctggcgctaccggccttttaccggctatggccaaaaggcggtgcgcaggatcatgcgtttcacccccatgccgctgctgttgatagcggttcgcgcgctatgtcggctacggttattgggccgacactaccgcggccgtaccgccgtggcgacgcaaaactaccgctgcctgacgggcgccgacgggcgaatcgatgccgcatggatagccatgcgccgtcagttgcttgaaatgggcgcgacctggggacagcatccggctacgctggcccagatgcaggcgtgcacgcgagagcttgatgccgttgtcgcgcctctggtggcgcaaaagacgccggtcgtcctcgcgccgctgcactgcgtttccgatattttagcggcgatggtcggggccggcgtgacgccgggaaaagccagcgtggtggtctcctccagcgcggaaagctacaccgtcgccagccgaaaaatgggcggcgtcgcgctctcttactgctcaatccaccaggataatacgtcgctggccagcgagcttatggcgttaatgaccaatgtatcggaagggcgggaaaatatgattattttccccgacattcctgccgattacaccgtgcagacccatgaagcgcagtccgggaaaataagctgccgactctttggccgcccggcgaaattacatagcggcgtacagcgattttctcgcatcgtatcggcgcaggtggttttttatcacctctattatcagcaggggataaaaataaagatctattctccgctgagaccaaaagaggtcgcggcacagctaccgacgatgattgaaaacaccctgcgtgactatccgcaggactggcttttgtggcacagccattcgctctattttattaatcactga

SEQ ID NO: 206237 - DNA, 312 bp, Klebsiella oxytoca
atggagctgcttgaagcgcggcttgccgccgctgaaagccgggcggcggtggccgaaggccaggtgcgggatttacaggcgaagcagaattccgctatacaggcggcgcaaaccagcgtagcggttaaaagcatggccccgaccgctgagaataaaaaaaatatttcagttcctgagctgaaattatccggctatggcgatctgaaaatctacggcgatgtcgaattcaatatggatgcggaaagcaaacatggcttgctggccatgaccaatgccgacgtagcgatacaacctatgataagtgggatttaa

SEQ ID NO: 206238 - DNA, 2124 bp, Klebsiella oxytoca
atgattagttctaagattttatattcatacgaaaggaatgatattaaaatatcgtgcggattgtataacgaaaaaacatccgctaaagaaaaaggtatcggtagagccgggtattatgacgcattaactggagagcttattgaagctgaaactcttgaagatgttattaaaataattgctcttccagaagttgttgctgaatacaatgagcatggagatttaattcgttctttacctgccgatattgaacaagtcgttcgtaatgagcttttgttttccgatgaaaaaataaaacagattaaaatcggtgaacgcgatggtaaaaaaataattgaaaagtatcaaaaagaagagaaaaaatataatgaatatcttgaaagggtagagaaatacaaagaagacccaaacaagaacccattaccttctacggctgtagcaccgccaaaggttcctgagccattcatttacacgaactcttacaaagatgtctcatcgaaaaatccagatgccgcaatagaatgctaccaaatcattcttaatcttgaacatgttcctgttgaagaagtagaagctgtatggaaagtagcaactcatgcgatggcgcatgataactatgtatatgattatcctcaaggcggtagtaatactacgcctcgcggcctgaaaggaagacgcccggttatcttcaataatatccatgttaaacaggatgctcctatacacggtcaggcgtatgtttttactcgtgatgtttcagaagcaaaatatgttcctttgactgacgagaaaagagcgtatttagagaaagaaggtaagttagatcttataacttatttccctaatgataaaagagcttttgttcctgagcaaaacggtgtttatccgtgggctaaatggtcaaatgctaaaacaaaacttcaagatgaaaagtttatggaagttttccaaaaacacatcgaaagagagttaaagaatgcgggttataattatccgttcacaatggttagtgtttgtaaaagatataaagatgctgataaagcagaagcagtaagaaaagttcatactgatttacctaaagctatagatacctataaagaaagctttgttgattcaacaaagcttgaacttgatccagaacataaacaccatgctattttaaataaatacaatactaatatcaagacaaaacaaaatcaggctgctgatttacttgctcaacttgaaaagcttgaacgtgatattaatgttatggaagcggctaaagctgctgaaatagaaaacttatctcttaaagttgaggtaaaagatttaacagctaaagtagcagaactgactgaacagacttcattgaaagatgaaaaaatcaatgaacttgaacaggatcttgaaaaagaaagaactgaaaaggatgagtttgttgataaaaacaatgaattgtatttcaaaaacactgagcttgaaaagaaaaaagcagagttagaggaagaagctaaaacgcttgaagaagaaaatacagcgttagaaacagagaatactactcttactgaaaaagtttctgctcttgaagagaaaaacatcaagcttgaagaagagttagaaactcttgatgctaatactacaacggagataaatactctcaaaggtcaggttgaatcacttaatggtcaacttgagcaaaaagatattactcatgctgctgataaagaagctgctatagcagagttaagaaaacaacttagtgaatcatttgaaactgaaaaacaggaagctttagctaaacttcgtgaagagttaacggctcagtttaaagtggataatgaaaaagcgctggaagctcagaaaacgacgcttgaagctggatttacatctgaaaaaacacaagcattgaatgagttaagggaagaacttaataaaagctttggtgtgaaagaaaacgagtataaagaagtaattaaaggtcttagaactgaatccgctgaaaactttgagttagcaagcacatatagcctaaaaatgcgcacattcttacaagaaaataccgatcttgttgaagaaaaccgtatgcttaaaaagcaaatcgaggattttaataacgggaaagaaaacagaccaaaaaataaataa

SEQ ID NO: 206239 - DNA, 396 bp, Klebsiella oxytoca
atgacagatactaagaaagacaaaacagaaaaaaacgctaaaaagggtgcggcgtggctcgataactttgatgattttcagaatgtctcgctggaaacctcttttgctaaagataatggcacctactggaactacaaggtagaaagcttaggtgatattcaggccgggactacgccctatgtccgttctacggtaaaagtcactaagcatgatgatgcacgtttgattaatgtccgtattcctgctgcgcttgaagaaaaactaaaagaagtttcttttgatattccaatccccactcttcttttaatttgtgctgattatttaactgatgaactcattaaagaaaacaaacaaatattagcacttccaaaagaaagcgatgaacggaagatataa

SEQ ID NO: 206240 - DNA, 624 bp, Klebsiella oxytoca
atgtttgctatgagtgtgtggtgcaggaaaggtggtgtaggcaaaacaaccattagccttaacctttgtggctattttgcttccaaaggccagtcaacaacgttagtagactttgacccacaggggggagctatcacctgtgcggcttttgcggagaagaacggtaaacctctgccgtttgaagtgacccggaaaccaaaggtagcaaccgactttatgatctttgaccatgcacccggagtggatagcggcggtcagttagcgccgttggtattagtaccgactattctcgatgcttccagctattcggctaccctgaaaagcattgatgagctgaaagagatgaacaagccttttatccttgttccgaaccgtgtggaagtccagaaccgggaacagatggagctgttgaagaagctggaagggtattcagagaagttaggctatgaacagccatacatccgtaagcgtgttgcgtatccccgcgcctatggcaacgggatcactatctttgatgaaaaggccgcattgccaaacatcactgatgcccgtaatgagtttgctcacttgattgaaatcatcaaactgaaaatcaaagaacaggctgaagccaaaaagaaatga

SEQ ID NO: 206241 - DNA, 1149 bp, Klebsiella oxytoca
atgaatgaacaatttttagataagttcgatagagctttcattgctgatcctaccgaagcattaaaggccgttgacgacatggccacatctctaatgtcagagatagaacagaagaggaaagccggtgttaaagagttagatcctgttatggtaaggctacaggaagaccatgcttatctctccgggctacatgaagaaaagagcgaagagctggcattacatcagcgcctacataagcaagctggcatcgagatagacaatccctttaaacagctcacagaagaggctccagccgtctttaatgagtttgatatacaagaagacgttgccccggctccagctcctgtagctccctctcttatgacgaacgacgacatagcaaagttggctaaggccgtcagtgataagcaggctcctgcagctccagtagaaccggaaggtatggacatatcccaattcaagccagaacgtaagccactggacttatcagggcttgatacgttcaccatgcgtaaagcagaagagacaaaacagaaagctaaaccaaaagtggatactgacgaactggatcgctttagtaatcgctatgcggggaatagttttattgaaaaagtgacaaaaaaactacaggagacattttcagcatcttctcatgctcctgttaactttgtaccagaacatgaaataaaaaccatgtttgggaattcactttcaaaaatagttaataacaccaatagcagaagcatacattttgttgataaatctgttcttaaagaagatgcgcagggattatcaattgccacaaaggatagaaccttagccgcaagaagattaactctaatggctaaagctaaaggatggagcagcattagttttgatggtaatcagcttttccttgaagaagcatatgaagaagcaacaagagcgggtttggtagtaaagccatcatcagaagaacaagccagatttttcaaagaagttcatgaagcgaaaaagttagatagttttatgccttttggcggtatgaaggaaagcaaaaaaaaggatatagataaagatattgaaaatcccggacatagccatgaacaagcccctgttcctgttcaagcccctgtctacaacgcaagaataccaacaagaatgaaataa

SEQ ID NO: 206242 - DNA, 294 bp, Klebsiella oxytoca; identical to SEQ ID NO: 156793

SEQ ID NO: 206243 - DNA, 567 bp, Klebsiella oxytoca
atgtttattgaaaataaaaacaaagagaaaaagaagttaacacttggtagaattgctgctgcgccatttataggaactgcgagattatttacagcgccttttgttttaccttataaagtgggtaaaaacattgttaatgctgttcaatatgctcatggtgatccgagcaataagcgtacctttgaagaatggtatgttattaaaaactctaatgaaggaattttacaaacaaactacagaaaatgcgcttcaatagctttattaacattgatgctaacgtgtgtcgctctgttctttggttttagttttatgacaagagctgatttaacaatcccattaaggatggttccttttaccgctgcgcttgtcggttttgccgggtatttcaatcttatcgttaatgcttattgccttaaggcaagaacttttgagaataaacttaatgtcttcaaatccattgaagacattatacctaaccctttttatgaattcacttcttgtgtgaaagataaaaacaataaaagtagaaatgttccagttatgttttatcccaaaaataaaaaataa

SEQ ID NO: 206244 - DNA, 2211 bp, Klebsiella oxytoca
atgaataaaataaagatgcttgtttttagcattttatttactgtgctgtattcggcacaagcacaagcggcaaactattatagtttgactggagataaaaactttgtgctaaatgcttttgataaatattttaatccatcaactgtagggattatcggaacttttttagatttttatgggccaatatgtttaatggtagctgctattattgctgcctacattttgattgttggaaccgtgacaaccgctcatgaaggtgagatgttaggtaaaaaatggtcatcattatgggttccgatacgtgctccgttagctgttagcttgctattgccagttagtaatggatgggctgttattcagcttatagttatggcattagctgttcaaggtacagaatggggggatgcaggatggaagaaaatagccccttctttaataactgacagcacttatatatccgtgacgaataaaacagctattcgccaactcgtagttaataccttatattctgctgcttgtgtgaaaataaataatgatgtagcaactaaggcattacaaaaatctggtgttaagttatatggatttatggatgccgctaattttaaatctgattcaggttccaataaaatgattggttataccttcggatatccagatggaaacgcattttcaggttataaaacagataaatgcggaagtacaaaaatgaagcttcttaatgaagataaaatgccagatccgggttcattattaataaacacgaacgggatagcgatgaatgttcaaaaagctcagatagctgctaatgctgctttagtatctggtgctatggcatatgctgaagctaacttgaaagacaggtctaagactattgatgttgaaacattaaacaaacacattgatcttatgactaatgcttatgctcaaattgttcaaactgctgctgaagctgctatgaaagatgctgttaatcaatcacaggttgataagttaacagaagctggatggacttatagctatgcattttatatgagaataacaacggctgcgtcttcagctaatgctgctttaaataactttcccatttcctcagcaacattaaaagaagaagattttaaatacaatacatggggtgaggtttacagtagacttgataaagtaagaacgttattgaatgctactaataaactcaattctaacctttctgatgaaggtgataatgatgggttatatcaaaaagctatagggattatcggaggcaatttaggcgtattcggaactcaaaaagctgatacagcaagcttgatgcctttaaccgtttcggcaaatatcggtgagcatgttatatatggcgtagatgctatgttagcggctttaactgtaggttctatgttaggtagccttcctgtcattggtggcggtatacaagcggttgtcggtcttctgtctggaacattgacatcgttcttcgttccattattgatagtaggaaacatgttagcacatgttatgcctatgatgccttatataattggtttcggttgtgttataggttatttcgttcttgttcttgaagctttatgcggtgctccacttcttgtagtagcgtcaataacacctgatcaggatggtgtagttggtaaacaaggacaaggttatatgttgcttttatccttattgcttagacctgccttaaacgtggctggctatgcggcttcatttgtagcgatgaatatcagttttgaatatataaacagtacgttctttgctgctgcgagtgatgtagaaggaggattcttaggtattcaaaaaggtataaccatgattgttatatattgtgtattaacgctttcagctacattagcatgttgtaagttaatgcatttattacctgacactatctttaaatggataggcggggcttcttcaactgttcttggcatgttatctactcatgctgaatcaggtatgttaaaagctcaggctgctgttggggcaagtatgcaaatggcaacggctggtcaaagtggaatgctcaatacggctaaaagctttggtcaaactttaggtgatagattaaaaccacagcctaataatactgcaactaatggagataatggtgaaggttcaggtgaaagtgaagaaaaatcagaatcatcaaataataaacctaaagataccagtgtagatttacaggattttaataaataa

SEQ ID NO: 206245 - DNA, 471 bp, Klebsiella oxytoca
atgtcatattggttgtatttttatacggttcgtagtcttgaagagagtaaatatgaaataaaaagaactacactaagaactaaacgggttgtttcagttattgctgaaatacaagatgctaaagaaataatatgtcaacaagaacaaataagagatttcatgatccattatcttcatcaaagagatattgaggtaaaggacagtgatgatttgagctttgttgttatggatgttgatcagtataacaaatcatcatgtagattttatatagtaaatgaagaggttcgttatcatgagttcataatggactatgaagaagctttaaagataatgcgcattgataaaaggatgaaatataaacttgaaaataccttcaatgatacaaggaagcttcttccgtgggagatctcagagttcaagaaagaagattttgataacatatcgaaagaaggtttacaaaaactcatataa

SEQ ID NO: 206246 - DNA, 393 bp, Klebsiella oxytoca
atgcaatataatgaaatagtaaaagctgaggttttaggttttgttttaaataatgtggaaggttttaatatctttgataacatccatataaaaatgatagatgttcatcatccgggttatgagggaataaatcgtgttcctttctttgaaatagattatagaaaaggatttactttagcaaatacctttaatcatattgatgatgaatacattaatcaaagaacgttgaactatgcccttaacttgtgttttaacagtgagatgagctttaagtatgaacacaacagatttataagtgaatgcttctcatgcacttattattgtatctttgaaaatatgtatagaacattatcagagaaggaaagcggtaaagtgagatggtggattgattga

SEQ ID NO: 206247 - DNA, 303 bp, Klebsiella oxytoca
atgagtaaaggtagaaagaagttcaggccagtagattttcacagcaacaacttggggaataactacataacgatagaaagcatgttatcaacgccgtttcatgagcattcacctgaactgttcgcaaagtgtttagcagaagtcccaaagataaacaggctactcatagacagacgtaagtgtgataacgaagagcattatcaaagggtattggtaatggctgatgtgtgtttaaaaatggcaatgattgaaagaagaatgaaaatagtgaacgaagaaaacagttggtttaatcaaaaataa

SEQ ID NO: 206248 - DNA, 1041 bp, Klebsiella oxytoca
atgactgtatctaaaaaatccaaatctaatattcttcatcttgatattgatgctttcattgctaaagcacgtaatattattcatgaagtctaccataacaaaactattctctctgttcctgattaccagactaaaacagcagcaaacgatcaggactatatcacaaaaccacttacccccctttacgcatgggctggcggtaaacgtcgcctcatcaaagcgtatcgcccctatatgccggattttaagcgtattcgatactacgcagagcctttcttcggcgcaggcgctatgttctgtgaggttttcaatcagcaccgtgaacacatcagaagctaccacctgaacgacattaacccggagatcatcaatctcctgaacaccattaaaagggattgttctggcttcattgacgagctgaaggccattgaagaacgcaaccactataaaacgctggaaggtcaaaaacacttctactatcgcttacgtgaagaataccgttccttaccagtaggagctgaatattcagtgaggggaacggctatgttctacttcctcttaaacaatatgttcaggggtttatacagtcagaaaaacgggcgaattttcacgtcattccagacgaataaaaatggttttgattatgaaaatatcaaaaactggtcaatagcattacagaaagcagtgatcacttgtggaagctatgaagatgtgaaggttaataaaaatacattcctgttctgtgatccgccataccgtgattgctcgattatgtattcaacagattttaatgatgaacagcataagcagtgttattcatgggttcaggaaaaagtagaagagaaaaaatcagtaggtatgttgtgtaataaaaacctgaatgacggtttctttagttcactaccaaccacaacagaaagtgaacatatcaatattgaatattcgcatacaaaggcaaggttaggagcaaacagaagtattgttgagctactaatggtattcaaagaaaaaatggctgttcctgttcttaaagcagcttaa

SEQ ID NO: 206249 - DNA, 564 bp, Klebsiella oxytoca
atgattgaggcattacttaaccagatccgtagcaccggctttgtgcttctctcccaatttgacgctgttttgtcttccccggctcctacgccggaagaacaggaacagaaagacgcttcattaaagatgcttctcccgctgttagagaagaaccatgatgaaagatacctgataacacgtttactcgattacagcgctcaggatctgttagcggtctacctgtcaggccgttccagtagcatgaaagcgtatgcgcttctccagctcatacagaacacatccaaattgtggccgtcaggtttctatcatgctgctgtccgttccggtctacgtctgaatgacgagctggacacatccgggctaacccctatccagttggcagcagcaaaaggaaacgtagagctgtttaagcttcttctcttggatggggcagatctctatcagaagaacaaagacggtatgagtgcttatgatttggtgttgaacagcaataacgcagagctgttaatgttcatgatccgctatgaaaatgctgatatttcgaactaccgccgaaaagcttga

SEQ ID NO: 206250 - DNA, 468 bp, Klebsiella oxytoca
atggaaagacaacaaacaaaactttattttgctatatggaaattgaaaggcaatgaaaaactacaggctattaaatattttattagttgcggtgaagatattcatgaaagagacaaaaacgagttaacacctttacatcaagccgttggatgtggtgatgttgaggccgtgaagcttttgttaacgcttggcgctaaccctaatgctatagacatatacggaagaacgccgctgttctataccgctttcagccctaagtacaatggtcgtcagttagatgaagctctcatagcggggaatgctgataccaccatttacgatgttaacgggcatacacgcgatcagttcgtgtatagcttcaaaagctcgatgttctaccgtccagaaccagaagcagtagaagaacaaccggaagaggtagccccttcagctcctgtgaaaagggcaggaagacgtaagcatgattga

SEQ ID NO: 206251 - DNA, 489 bp, Klebsiella oxytoca
atgaatagcattaatgaattattattgatatacggttcaaacataacaaaaatcaaagaacttgttttagcaggggcaaatgttaactacatatcgccggaaggtttaacgcctttatcctgtgctgaatctgttgaagtggctaagtttcttcttagccgtggcgctgatgtgaacgctaccaatgaagacgggaaaacagccttgttcagcgttagcaacgttgatacttgccgcttcctgatagagaacggcgcaagggtaaatcatgttaacaataaacatgaaacagcattgttttatacaacggatatgaaaaaaatcagattactggttgaagctggatgtgatccattggtaagaagttatgatggcaagcgccattatgatttgttagcgcataatcagaaagtgagttttattaacttcttggctaaccgaaaaaagaaaatggaaactgttaacgcacctttagctcttgccttttaa

SEQ ID NO: 206252 - DNA, 282 bp, Klebsiella oxytoca
atgtcttatacatataaagtcatagataatagcctcttctttattgaagaggaaagtaataagcagtatgaagtaaatgttatttctcatggttttggtcataacatctttcaggtttccatacctgatttaagcccccgaacattggaggctaatgatgctaaagagctttttaatgaagtattagaaatagataatgtcaggcgtagttttaaaagacaaacaccagaagagtttaagtctaagttccagaaaatgaaaaagaaagcttgtccagaataa

SEQ ID NO: 206253 - DNA, 2121 bp, Klebsiella oxytoca
atgaatgaaaaagataatgttttaaagttaacgccgaaagattttaaaagagctttacaggctcaggataatccttggcgtgaaacagaagaatactctatcggtgatgatggtatttttatacgcaccataaagacttataaaaatggtgttgaagatgttaaatgggttcagattcatccgttccctttaatgcctgttgaagctgttagtatgcgtgatgaagaagtttttaaatccgtatacgacgataaagataaaaaacaggtatcttctaatgatacaaaaacgcatattaaagttaagtttcttgatctcaatggtcaggaaagctttgttaaaataccacaatcagaactatcacaaatcactaaacagtctgttttagctaaacgctggcctttgccacctgctaataaaatgtctaaagtggctgacataatgttaaaagtgctggctgatggtagaaaaactgtagtttcacctgcgggtgttcaatacgaaccttgtataatatccacttcaggatcggataattgcggatgggataagggcgaacacatacgagctgggcatcctctttatgtaggtgatgaagagtgtatgacgtttaaagcaggaagcgcagaagttcagttagatatttttaataactggtttgataaagacttacagcaagcttttatgggtgcttatcagcaagcaagctatgcatttgatattatctatcgtgctaacgttaacttcattttagagttaacaggtaagcccggtgatggtaaatcagcacgtttattaggtctttcttctgttgaaggtattccggtaaaaggcatgaacagaacgtattttgatgctacagcctctttagcaggtttagagcgtcatttaccgctgttaaataacggttatgtcttgatggatgagtttgataaaatcgtcaataatgacggtttaaaagtcgcaactcaaatgattttcctcattgctaatggttcgcaaaggatcatagcagaagcgaataaaaccacaacaattagaaaaaacagaccttttaaacttggtgctattgttgcttcaaacacatcaataatagaaagaattaaaggtcattcaagcttcatggcattaaaagatcgttttattgctatcagaactgatgatgatgagattacaggctttagaggtgatctaactattattaacgtatggaaacgtttattagaagaaaactatggacacatttatggtctgactgttgattatatatctaaaaataaaaacaagcttattgaaatgtttaccactctccaaaatgagctttacgaagaggacaaacactttactaatgatatgcgtgatgctgaaatgatcgcattccttcagttaggtgcttttcttgtttctcaggtaattggtaaagaagcagggatagctgctgataaagctgtagagatatataaaaatcgtattattaactctactctacatgaagaatataatcacaagattgttattgagagatttaaagaatggattgctgataacatcggttctattcgcatcgaaggtccagtttatactggttatggtagaagttcggaaagagaacagcttgatcacgctgaacgtcttacaaacaacgctatcatgtctaacagaggcgctatagctggacttgagcaaacaagaagaatggaacacagaacagattttgagggctgtatctggttaaaaccagaagcagaggcaagtttagaaaaatcaggtatttctcttgatgagcttatgttagcagctaaagaactggatttattaccaaaatctaaaaaaggtgaagttaatgaaaaatctaaactaagtgatcaaaaaacaagctggctcgcaggtgttagtaaagaagagttattagatataagaagaaaaaaagaattaaataaatacaatataagtacatatgcaaaatgtatttatctgtctccattcgtagagccagaaggagaagttaaaaatgaatttgaggatgaagtattttattcaaacgtggatcgtgatgatatagattcacttgttgagcaaaatattaatgctcatatgttcgatttaccccaaattgattaa

SEQ ID NO: 206254 - DNA, 663 bp, Klebsiella oxytoca
atgaatatgaataatagtttagatttatcttctcttagagaagagcttgaaaaacagaaaaaagagcgtgaaaggctgattactgaaaatgctctggcagaagtaaaacatcaagcagcattagaagaaggagaaggggagcaatccccttcctcagaagaggctcaggccgtttctgttgacgctgtacctgatgatgtgttgatgggtagcggaagttctaacaaggctatcctgtggcgttgtgcgcgtgatttcttccaaccaaacattaagctgataaaacagtatcaattcccacatgtagttattgaagagtctaaagattgttatgttatctactcttctgatgtagagcttgctgtaagcacgctttacgctcattttgattatgagatagcaggttttggtgtctgtaaagttgaaagcgataatcaagagtatgtagaagaaataatatatcagggtgttttaagaggttttagtgtttttccttccatgttagaacatgaaaaagttgagcaacaaaaatctacacttttagctttaaaaagaattaagcgtgaaagggatgaagaaagcggaatcatgaaagaaagcattaattcttttttaatggactggttaaaaaaatcagaaaaaggcttgatgttgtcaacttaa

SEQ ID NO: 206255 - DNA, 555 bp, Klebsiella oxytoca
atgaaaattatatttgcaactgagccaatcaaatatccattaacgggtatcggtcgttattccctcgaactggtaaaacgattggcggtggccagcgaaattgaagagctaaaattatttcacggctcttcatttattgacagcattccccagattgaaaataaagcggatacccgagccagcaatcacggtaagctggcggcttttttacgccgtcagccgttattgattgaagcctatcgcgtgttgcatccgcgtcgccaggcgtgggcgctgcgcgattataaagattatatctatcatgggcctaacttttatctgccgcatcgtctggaacgtgccgtaaccacatttcatgatatctccatattcacctgtccggaatttcatccaaaggaccgggtgcgttatatggaaaagtcactgcgcgaaagtctggacacggcaaagcttattttgacggtatctgacttttcccgcagcgaaattatccggctgtttaactatcctgccgatcggatcgtggctttgttgaataaatcgaacttttgctga

SEQ ID NO: 206256 - DNA, 141 bp, Klebsiella oxytoca; identical to SEQ ID NO: 36145

SEQ ID NO: 206257 - DNA, 306 bp, Klebsiella oxytoca
atgaatacaatcaacttcaacgacatataccaaacaataaaatccaaaaatgttaatgatgggttttcagctctaaattaccttttaagagatctaagtgttttaggttttgaaatagataggaaagattctaccttactttcaacttatgaaaatatttttgtggtgatggatttaaagggtaaggattttaaaatagatgatatacgtgagtatttagaatttatctataaccatattacaaaatccaaaaacatagaaacaaataaacagttagtaaggatatgggagctaaccaaagtataa

SEQ ID NO: 206258 - DNA, 336 bp, Klebsiella oxytoca
atggaatactacgagtttgtagaaacctctgtgttcacgcgagagatgaaaactctactcagtgatgatgaatacaaagagtttcaaacgttcctcatagagaaccctgaagcaggggatttgattgttggaactggcggttgtcgcaaggttagatggtcaaggcagggaacaggtaaaagttcaggtgtccgggctatttactacttctacaatccggcaggccgcttatacatgcttatcatctatccaaagagtgagaaggacagtttgacggcagcagagaaaaaccagctcaaagcggttgtagcgggttttaaaggtgaagagggctaa

SEQ ID NO: 206259 - DNA, 291 bp, Klebsiella oxytoca
atgcgtaaagagctttttgatgatctgattacttctgctaaggaagctgtagaaatccatcagggtttacgtgagccagctcgcgtgacccgttttgaacgtccagatgttaaagctattcgggctaaggttcatatgaaacaagatgattttgccagcctgatcggggttagctcttctcttgttcagtcatgggaacaggggttaagaactccggcaggtgcagcgttaaagctgttgcgtgtcatcgagcgtaaacctgaatttgttcaggaactacgtgaagcataa

SEQ ID NO: 206260 - DNA, 654 bp, Klebsiella oxytoca
atgttatcgttaaatttagcgttagaacgtttggataaaataagcaaatactttgttcttaactcccaaaaagatttgatttttcgagatgcttatacatttataatggagactgtttatcactctgttaaaagcaaaataacaaatttagatgctgttagtaatggtggtcaactcattgaaatgaaagcaccttttaacttcatcctatgtagaacagggcgtttcattgttttggacaactattatacaatcttaccaaaaaaagatcgggatgattgggaaaggcatatacataatataagcatagaagaattcatttatagcttcgacaataatacaacaaggtatttattacttgattgtaaatattactttgaccagttcaatattacacgtctggattttaatattatttcaatggtatataacactttttatgaggttttccagttagacagattttatgatccagtagtaaacagaataacagccgatgagattgaaaagcatataaacggcctacagtttgataaatcatcttatgatgaagttatcaggaagaaaacatatacctactttctcaggcttctcaggttcattgaggggcatgaagagacatggtatttaccaatgaagttagaatacaaataa

SEQ ID NO: 206261 - DNA, 195 bp, Klebsiella oxytoca
atgtcctacctgaccacaacagggagattatatttcctatccctgacacgtcctgtcactcacgtatgctacaacatatcctataatacaatatactattatattatagtacgctgttatttgtattctaacttcattggtaaataccatgtctcttcatgcccctcaatgaacctgagaagcctgagaaagtag

SEQ ID NO: 206262 - DNA, 195 bp, Klebsiella oxytoca; identical to SEQ ID NO: 206261

SEQ ID NO: 206263 - DNA, 654 bp, Klebsiella oxytoca; identical to SEQ ID NO: 206260

SEQ ID NO: 206264 - DNA, 291 bp, Klebsiella oxytoca; identical to SEQ ID NO: 206259

SEQ ID NO: 206265 - DNA, 336 bp, Klebsiella oxytoca; identical to SEQ ID NO: 206258

SEQ ID NO: 206266 - DNA, 306 bp, Klebsiella oxytoca; identical to SEQ ID NO: 206257

SEQ ID NO: 206267 - DNA, 1977 bp, Klebsiella oxytoca
atgttagataaagaaccattgctttctttcaggaaagcacatttaaatgatgaaatacaaatagactttaaaacagcaacaacaaatatagccgtgtttggtggaacaggaacaggtaagacaacgggcgtatgtttccctgctgtttacaatctgattaaaaatcactgttcaggattgatactggacgttaaaggggattacacaaagttagcacgtcagatcaatgaagaaatgaaaaatgataaaatttacatattaggtgttaaagaagattgttctagatttaatttaatatctggtatcgaaccggaaaagctaaaagcatttttaaactacggcgtgagttctatccgtggaaatgtagataaatattggggttcaaacgggatagaagacactgttttagtgtatgagttagttaaagagtttgatattaatcctacccttgcggatctctattacttgattactaatcctgatgacctacaggcaatgaaaaacaactgttcagaacagttatcagaaaagataaaaaggcgtatagcttcggatgggtttagtattttcaataacaaaaaagataccgatgaagctaccaaaagagaacaaagatcatggcagttttcagcattaaacagcgttctaagacctttttatgaagacccgtatctaaaccatcatttttgtaataatgatcatacagtttcttatgcagacattatttataaagaaagaaaatccttagtgctggaagtgcctttttctaaatatgctgtttcatcattgttcattttaaaggtggttaaagcaacgttcatagacagtataaaacagcaggatataaaccagctcacagcaaagggatatggtgaagataagtttacattcatgttgatagatgagtatcagcagttccttacagatgataccgatccgtcagtggatgataacaactggttcgacatatcgaggggctacggtcatatcaacattatttcctctcagtctgtggattcacttgatgctaaggctgggcaagcatacacaaaccagctcataggcaactgtatgaacatagttcatctggctactcatgctgtcaggagccttgagaacatcgctacccttgctggcagtccagaacgcgctatacaggctcaggatacgttatcaggtcagtcagaggacattgcctttgtctacatcaacaaaagccagcagagccgcacaggggcgcgcgtattggttcatacaggaaaatcacaacatagcttcatgaacagattcatctatgcgactaagccacagctgcaggagctacccggaacgggctatgtagtgcctgaaaaagtgaatgcgttaagcgtcttactggaagcgttaaaggaagataaaaaagaagagaaaacagaaatgcaccttttagaagagttaataaatatgaaagaagaacaaaataaatggatttataatctttgtcctacctatacagttcaaaaaagattatgcgtgataacaacaaaaagcttttcagacgggtttaatgatttcaatgttgtattgaataatttaaatatcggatttgaagaggtagtggtacatccaattatatataacaacaaaatagatttggatttacttaaagagatactgattgaggataaagaaagtctgtatgttatcgtcagagggggaggtgatttagaacacttcattcttaatgattttaaggtacaggcgttgataagtgaatgtatgtataacattagatactcagaaagtgagttattaatagcagtaggacatgcctccgataaatttgaagatttctttgaaatggttccagatgcgtatgaagcattaacaccgactgatttagcttacaaaataaaaggcgatattattttaaatataagaaaaagaaaatgcggtattatgaccaattcatgtattagttataacgctaaaatataa

SEQ ID NO: 206268 - DNA, 435 bp, Klebsiella oxytoca; identical to SEQ ID NO: 156798

SEQ ID NO: 206269 - DNA, 543 bp, Klebsiella oxytoca
atgttcaacattacaaagagaaagaaaaaagggttttcattattagagttgttattagtgtttgggattatcgcagcgttgatagttggtgtctttatgatctatccaaaaattagttctggtcagaagatagatagcgacataaaaatattgggaacattaaatgctgggataaaaaatctctacgcggggcaagcagattacacagggttatcagttgacgctataatcaaatcaaagattgttccagaagatatagtggatgataatttaatatgggatagctggggcgctaacgttcttatagaaccgtattatgatggtagtttttatatcgggtttgaaaacgtttcagttgatgcttgtcctaagttcgtgtctcaagctggagcaagttttttcaaaatagtagtaggttcaagagaagttaagaacacagaagcaaatcaggatcttgatatggcaactttagcaaatgcttgtatcagtaatgatgatgggtatggtggaagaccgataacagtatatttttacgacaaataa

SEQ ID NO: 206270 - DNA, 558 bp, Klebsiella oxytoca
atgataaatagttttagattattaaaaaacagaaagagtaaaaaagggttttcgcttttagagatattattagttcttggtgctatcgcagcgttgatagtagcggcttttatgatattcccgaaagttcaggcttcacagcgtatcgacagagagagcaggaacctaacagctatacaagctggggtgaagtctctatatggcggcagagcgaagatctcaagcattaacactgatagcttcattgcttctaagaacgctcctgagaacatgatacaggatggaaagcttatcaatgaatggaaaggcaacgtatcggttgagtattcagggaaccacggcaaatacaacattatctatgatgctgttccagcttctgactgttcaaagttgatagccgctgtatcgggtaatttcgtaagcatagacgtttataacggaaacggcggtacgcaggttaagaaccttgaagaagggaaaaacattgatatagccgcaacatcagcagcgtgtttttcagaagataacgccaccattatttttgcttcaataatataa

SEQ ID NO: 206271 - DNA, 363 bp, Klebsiella oxytoca
atgatgagtaaagttataaacataataaaagaatattcagatgaagagagtaaaagaggaaaggcattacaaaaactttcatgggaagcatgtaaaattggtatttatgttttttcttatggttttttacaggttcttttatctgactggatagggattagggacgataaagaagcaatgctgaaattgtattatatcatgttctcaggtggttttttattttacgcagcggcaatgatgccgtgggtattccatcacaagaaaaacatatttaatctttgttctactacattcaaattatcgacaatagaaaaagaagtaaaagaagaaattaatcaaaataacaaaggagaatcaaaatga

SEQ ID NO: 206272 - DNA, 1182 bp, Klebsiella oxytoca
gtgaagggtatgcggaagatcaagaggggtaaaagcttcgcaggtgttgttcaatatgcattgaagccgggagcacatcataaaagcgatccagtcgtcattggcgggaacatgttaggtgattcagcctctaaactgatcactgaatttgatgacactaaacagcttcggcccgatgttcagaaaccagtttggcacaactcgctacgattgcctgacggagaaacattatcaaatgaccaatgggtaaacatagcagatgactacatgaagaggatggggttcagtgatacccaccttcgttgctatgtgcttcatgacgatccggctggtcagcacatacacattatcgccagcagaatcgacatagccggtgggaagctctacttgggtaggaacgaaaaccttataagcacacggatcattagtgaactcgaaatcgctcacggtctgacagtgaccaagacagcaccatccctcccaaatcaacaaccgaagcggaaaagaatctctcgcaacgaacagatgctttcagaacggactggccttccctcctcaaaaaaagctctccagcagatactcgataaaagtttggcagatacacctgaccttttaacttttatcaagaggctggaagaagcagaagtcggctggacggcgaatgtcgcttctaccgggaaaatgaacggcttctcattttcttaccgcgatattgctttcaaagcttcgcagttaggcaagggttactcttgggcaaatcttcaaaagcaacttagctacaaccctgaccacttagaagcgatacgaaccaacacaccaacaaaagaccaccctgctgctcctgctcctgctcctgctcctgctcctgctcctgctcctgctcctgctcctgcaacagttttgaaaaccgctgagagaaaggaaagtatcggtaaaaaaattgcagaactggaactacggctcagagaagacaaacggaacgaaatcgtagaaaagattcttcaaaagaatgcagtcaaacagcaaaagcatctcaggctcaccggctggattccctttttacaacggctcatagagcttctcagaaaatatggaaggagcatcctccacaaggttcctacaaacttctcagaagtctattcaacacatcatctgaaacccgcaagaaaaattcgtttatag

SEQ ID NO: 206273 - DNA, 480 bp, Klebsiella oxytoca
atggagttagcatttaaatgtataagaagaagattagatcaagataacactgtcaaaacacttattaagttaacacaaaatcagttggattttatagataatcatatatctaaaaactcaagatctcttgctgtttctcagttgagtaaatgggcaatagaaaaacttgttagtgaaagtaaggttttaaatatctcattcttagaagatggttatcattttacagaaaacgataccgatgtaggtagcctacatattgtatcgcttgataaaagttttaacccagaaagtaaatatgtatcaatagtagcgagtaaagaagtaatagatatattaaaagaaaaaacaggaaacattgctttaagtaaagctctaccagcattaaccatttatgctttgaatgagcttatagcgaaaaaggaaatgtatgtttatgacagcgtaaataacatcaatcaaataattaaacaaaggagttaa

SEQ ID NO: 206274 - DNA, 327 bp, Klebsiella oxytoca
atgagtatattagagtttttatcaacggctatagttttcggtattgttgctttatttataacattcgtagtaaaaaacataaggaaaagcattaagtttaaattatatttcaaatcgttaataaaggttggtattacattgatagcactaatgttcgtttccggtgtaatatccaaagacattaacatatttattagtttgatgtttgtttattatttaaaggttttatatttctcaacattgctttcctttgtttattttgttggaagaaatatatttatgagtataagaacaaataaaaagaatatgaaaccaaatgcaatataa

SEQ ID NO: 206275 - DNA, 522 bp, Klebsiella oxytoca
atgagaaaaggatttaaaaaaggttttagtctcatagagctgttgttagttcttgccgttgctacaggcgtagtagcggctacgttctacgggtatagcaaggttcaggcgcataacagggtaaacagagctacgcatgatctggcgagtatcagtaaagcgatgaatgccattctgacgacaaggccaacgatagctgaggctaatactatgctgaccagctcaaagactttaccctcttctatgctcggtaaaacaggctcgttcgttaacgcctacgggggaaagctcactataaccgctcatagcggctcagatgacttctatgatgtttcctactacaacgtaccttctgatgcgtgtatagagcttgtaagcgccagcagagcgatttaccgcactataaccaacacttcctatagcccgaagataacagccgcttcaggcgtgagtgatatagcttcattctgttccgggtttacctcttccagctcagtgatggtctttactgacgcagcctga

SEQ ID NO: 206276 - DNA, 294 bp, Klebsiella oxytoca
atgaaaaagattctggcggtatgcgtgttcgggctggcctccttccttaccgggtgtggtgatgatggtatctatgggaactacgtgaacaaacagtacggcgttaggctcgacgttcaaaaagatgttatcaagtttaaagatggcattttcaacgttaaagaatgggatgaaagcaaaaagcctgtatacattgccagaacgcagaacaaggatttaggatcatggacgtttaaaatcgaaaaggtaaaacagggcgtggtttatcagggcgcagtgtttgaaaaagattaa

SEQ ID NO: 206277 - DNA, 318 bp, Klebsiella oxytoca
atgaaaaaatatatacaaaccgaaagctacattgaccaacttcaaaccctcattattttgaaaaacttcatgaatgaaagatatgaagaagaaaactgcgagatcctttataccacggataacggttatccatctgttgtgttttgtggcggtatttatgaagtaagcattatacctgttgactataaacaaggattagaaggtgatgttatgtttatagcttctgtaggtaatgaactggttaagttcccaagcttaatagacgctgttgaaagtttttattcatgtatcgatgaagcaataaaacaagcagcttga

SEQ ID NO: 206278 - DNA, 303 bp, Klebsiella oxytoca
atgaaaaagaaaaccatgattgaagaaatgagagaaagagcaaataaactttcaaatggtgaagccctcattttattagaccatattttaaaaagagaagggcaagaggcaatgattagtatcttcatgaatgaaatgcctcaaatcaaaaacaggataatttatggcaacttcaatctggaaggttgtagaaatatcaacactcagttagctaatgagctgatagcttatatagagcgtgaaaaactcatggtaatactggaatctaatctaaaagaatgtgccataaagaaacgtttataa

SEQ ID NO: 206279 - DNA, 1035 bp, Klebsiella oxytoca
atgaaaataaaaccagtaaacctcaacaaaacattaaagttattggaaggaacagaagcagaaaagccattcattgaagatatgttgttatacatggatcaggctaaagagtacgaagaaaagaaagtattacaaagcaacttatatgaagaacttaacagcagcttagtatatcgctataaaactattgttaacaatgcgccaagagaagatttatccataattgctatttcaggtgaagaaaccattggttctaatgttgatgtttttcttgagaatacagcagttagatttaaagtcagggataagcttaacgaaagcggctattcagtagcagtaaaggttaaagacggtaaaacagttttagacgttgatatgaagcaagcgggctttacagcacttaaaacgctctctaacgagctggaagagcttaaaccgtgggtaaatgactacatggcaacactcaaagagcaagtgagtgatagcgttcagtctcaggctttacctgatacgatagaaccctacaagacatcatgggtagagcttccagaagaaagacgtattcttgttaaagttcatcctgaaaacatggcaacatttaaatcaaagttttcttcccccaaatgggaaaaggatttaaaagcgtggcgcatatctaatcttcaaagcaataaagataaattgaatgattttagagatcttcttgaactaagaagaagacaagaacatgaaagcccgaaagaagttttatctaaagtcgatacggttatagatggtaaaccacattattatgagttatcacacaaagtagaacatgaaagtttaacaagtaagttcgatacattaacactcgatttaaaaagtgatgatggttcatatgatggggaatggcataaaaggattggttcgtttgagtttgaaaacctatccgataaaaatgaactaaataaaaaagctaaagagtttttaactcaggctatggatttaagagataatgatttaaacaacaaatcaccgcttaaaatgaaaatgtga

SEQ ID NO: 206280 - DNA, 171 bp, Klebsiella oxytoca
atgatgagttttaataaagatgatttgatagttgaacgcacagaggatattaaatacattgctagattaacaaactacaataaaaagtatgtgtttacaagaaactttatacatggaacaagagctgtctcttatacacatctgacgctgccgacgagcgatctagtgtag

SEQ ID NO: 206281 - DNA, 402 bp, Klebsiella oxytoca
atgggctttccatcaccggctgcagactacactgaaaaaccactctcactggatgcgttatgcatccataaaccccatgctacgtactttatgagggcaggacaggcatatttaagggctggcatacaaaagggcgctacgctcgttgtagacgcttctgttaagcctttcgatggaagcattgtgatagtggctttagggggtgagttcgtagtgaaacggctaaggcttcatccagctccggcgctgttgccattggattacgcaggaaccccgatacatatcgatctggaagatattgacgagaacaacgctacccggattttcggcgttatgacgtattgtgtaaacgacatgcgaacaggcgagttcgacgacacgccttatggcttagatggctaa

SEQ ID NO: 206282 - DNA, 1137 bp, Klebsiella oxytoca
gtggttgttgtatctggtgttagcggtgtaggtaaatcgactttactcaaagagatagcaaaagaaaggcatatacattattcaaatcctacttataactgtattaagttcggcattaaacatagcgatcttattgctattgatgatgtgagagaaacggaactaaaaaacgttatacaaaaaattcaggatggtgtagctaaaacaaacataaaaactaaagcgatcatagtagttgataagtttgataagtctgttcttgatagcgttgtattgaaaataaagcattacagaatggtaaagccaaaagcaaaaggtgtcttaccaaaaataaaagagtatcaagagcttttaaaatcaatagaagaacaaagatttcttactgataatgttcagatctcatgtttgaacgatttgtatcaaatagaacaagaattgaagtatttgagagatttgaatgaaaagtatgaatgcgaagctgttttacatgaccataactatacacaattagctcttgatttggatgatagcaaagctaaagtagaagagcttgaaagtgaaattgttgagttgaaggctttaatgaaagaatatgatagcatttaccataataaaagaagtaagttagaagaagaaaatgagcatatccttaatcaacttagacaggataacattaaaaatgaagagctaataaaagagaactacagcttacacttaaaaataaaagagcttaatgatatactttatgaccaaaacgaagaaaaaatagaacttgaaggttctattcaggagttagagcagtctctttctcaatacctgaataaaattcaaacatatcaaaatacagtggctgtttttgaagataaaaccagacttcttgaaaaagctaataacgatcttgaatgtgaaatagattatcttaatgagaaagtgcattgccttaaagaagagttagataatgaagctgaggaaacagcattttttaaagaaatgtcagaagactttattactcagataaaatggttaaataacacgattgaggtttatcgaggtgaagttgatgaagacaccatacgcagagttgaatacacggttcaacagctcagggaaagtttcggtgatgattatgaggtctga

SEQ ID NO: 206283 - DNA, 270 bp, Klebsiella oxytoca
atgataatagaagaagtaattattaatgacgttaagattgttttatcgagaggaaaaggaggtaaaggaggtgaaaacaatgaaacatataagttctatatctacatagtgaataaagatgtttcagtttacagggtaggtaagctttcaatagttatatggcagcattcgatttacacatcagataaggcattaatacaggaagctcaggatttagcaagcgcagtattcaaatacaaaacagaaaaacttaaagaggtgattttatga

SEQ ID NO: 206284 - DNA, 336 bp, Klebsiella oxytoca
atgagtaatagcaaaaaagagacagccagagataaaatgatctccgatttaactaaatactattttactcgcaaagggaaaaaaacgtatttaacaacattagaaaacaacaggtatttattcgctaaaaatgataaggatgaaggtttctatctggtttcatcaaaggataatgatagcatcattgatttaaccaagagcatttatatggaaataattaaagaagcaaaagaacatggtttaaataataaatatcatatatacgcaacgggatgtttgtttgctagtccgttaatagacttcaataaaatatccaatgtggaagtaaacttttaa

SEQ ID NO: 206285 - DNA, 351 bp, Klebsiella oxytoca
atgagtaatgaaaagaaattggcaataacaagcgatatagtgttttctcttgatacaaagataaaaggtaaagattatgtttatgaagttgagcatttacatgcttcatatcaaacaggcgatattacagattatttatctttaaaaatgaagagcaaggataaagatagtgatttcaaaacagaaactatcaatatggcttattttgataatctgaaaccagatcagcatgaagattttaaaaagaagataaaagagtttgctaacgaagcttataacagaatggaaatagacatgcagcctgtgtatgaggaaaacatgaaaaacttacgttcactaagctttaaataa

SEQ ID NO: 206286 - DNA, 561 bp, Klebsiella oxytoca
atgtcaaaaaacaaaggaacagattacttttactttaaacccttccgttcgggttctgttagctttccaaaaccaaatgaagcaatctatgtgatagatgttttatcgagagatgatatagtttactttgatgattttggatatttgatttcagaaagagcgttggaggttttaaaaaaacataacttaacaggcgtaaaggtggataatgctactgttaaatttagtgcgaaacataacataagattcaaaaaccagacattacctaagttctacagattaataccaactgagatagtggataatgaacttagagaaatgtttttggatgagaactataatcttataatcaacaaaagaataaaagacattataacaaataaagatttgatacgtcttaaacatgcttattttgaagaaatccagctcgaagatgtattagatgattatgaggatgaagctgaaacacctgtttataaaaacgaaaacaaatcatccctaaaacagatcattatcttcaccgttgttatggctttagtcgcatatctattctttaaataa

SEQ ID NO: 206287 - DNA, 1392 bp, Klebsiella oxytoca
atgattgttatttatacgagagaggagctcaaaactgtttggatgcaaattgcttcttctctaagagggatcgaaaattgtaatgataaaatacttgaaacagaaaatgatgaattaattgaatactggcagagtgttattttacctgatttgattcacaaaggagaaagggcattaacgagggatgaaactgtactatatatccaaaatgactgcctatgtaagcgtattaagaaagcaatccgagatgatggaagccttacagagcaaaatgatattaatttcattgctaagatgatttctgaatatgcagtcgctgaaaatgccgtcattccagattatgtgacaaaaagtatggttgtaggggatactgccggtattaaatggattcaaagtggtaatatatttatcagtgtgttccataaggataaagatgatcatgaaagtgatggtgagagaatttggcaaacactaaatgaatcattaattgaatggaacccatcttactatcaaattatcaagtcagagattcaaaatactattgaagccgaagcactttctttcaataaccatttagctaatgatggttatggtcaagctggatggttgaatcaaatattaaattccgcttctgatgaaattaaaaggaaaaacattgagtttgtttttagtaatttatctgaagaactctatgaaagattgaagggaaataaatctttagtaggcttcattaatgatgtttttgaaacatatacaactgattttaaaagtagtggagaagcgaaatcattagagtattgttcaaaacaaatgaatttacctgcaaatgcaagctcatttaatgagatgtatcatgctttgaacatgaatctgtcttctaaaaattttgaagaaggacatatttcgacaggtacaattttcttcgatactgaatctgaaaaatggtatttatgtgtttctgctgcctgcgatcttgtgcctactcagggtaatgatccacatcataaaagattaagtcctcatcgtttaattaaggtgttagaacttttcaatgctaaccagaataaagcattacctaatgcagaacaatccaagtatatttatgtaattcataagaataccagaaagtatttatctatatttgaaggcgataaaactttaccagtagttgattatatggttgttttaaatcacggccataccgttccgggggaagagaaaaatatactttcagcggtattcttgagtagcatggatgacaacgtacaaaatgtaccagttaaactgaaattaaagtcccagcttcgaagtggttatgctgaacgataccaagctattgcgtcgcaatacagttctagaattggtgtagattatgtatctatgatgccttaa

SEQ ID NO: 206288 - DNA, 276 bp, Klebsiella oxytoca
atgaaggtggtgttatttatgataatcaaatacaagaaagagaggtggtttatgacaaataagaagaaacaacgttcatggacatacagaatttttatgttattggtgctaatttcaatagcaggtgtggcaggtatagcctttggttgtataagtgaaaaaatgctaccgtggttttgttcatttatcattttatggcatataaacgatatttttgatttctataaacttatatttggacctaaatacaataagccagatgatactattaaataa

SEQ ID NO: 206289 - DNA, 294 bp, Klebsiella oxytoca
atgaaaaaagacataacaagagaattgaaaagtttgggtttacataatggtaatgagttcatagcaaaagcagcgttgatagaaggggagagagcagaagcaatattagagctgatagaacgcttgggaagacgcaaaatcattcctgatgctgttcagcatggttttaatcaggttaaggctacatatcgtttaagcggctacatcaatcaggcactaactgttatagcgtttaaagcttatgtgaacgaacccaaagagaactttaaagcagatatacactggagtatttaa

SEQ ID NO: 206290 - DNA, 258 bp, Klebsiella oxytoca
atgaaactgaacaactacctgagcaagttctttgatgttgaagagaatgaagtggaaaacgatgaaggtgaaaaaatcccttctctgtggctctatgagaaaggggaagactctgaacctgtagttatcctgaaacagacagaaaagcccggagaatggcgcgtaggagatatttactcagctctaacgaatgatgcccggctatccgaagaacagatcaagaaactggcaaaagctggaatgatcaccaaaaactaa

SEQ ID NO: 206291 - DNA, 387 bp, Klebsiella oxytoca
atgaaattaaataacccacttgaagtagcaacaataacaacaaacgttttagcgcattatatttatcaggcaatatcagatcttgataaagaagactttattaaatatgacaacgttgattatatcaaagattatttagatagctctattgattgtttaggaactgacggtttttatagtagcgttctaaattctttctacggcatgaatcatgattatggtcatgactattttgatacagcagaagagttaaaagagtatgttttaaaagctaacttatatcttatccatgactctttagctgttgatgatgtatcagatgaatatgatgcttgtaagcaggttttagaaatgcttgaagctgacagaaacgataacgatgaatag

SEQ ID NO: 206292 - DNA, 258 bp, Klebsiella oxytoca
atgaaaaaaagcttagtattaattgccacaacgctattaatgatgacagtatcagctcaagccggcgttattatcggtggaacgcgcgttatttataacggtgataaaaaggagacttcaattagcgtaaaaaatcctgacaaatcatcatatctgatacaatcctggagcgatagcggcgaaaaaaaaacgataaatcaccctttatggttactccaccgctctttcgtctcgggcctggacaagagaacacgctaa

SEQ ID NO: 206293 - DNA, 390 bp, Klebsiella oxytoca; identical to SEQ ID NO: 202120

SEQ ID NO: 206294 - DNA, 1164 bp, Klebsiella oxytoca
atgagtaaaaaatttctatcgctaattacccgcaccggggcagaaaaaatggcggccgcgattgcccgtggggaaaaagtcactttttcaacaatggccgtcggggacggaagcgggagcacgcccgcacctgatgaaaatcagacccggctggttaacgaatgctttcgcacgagtcttaacagcctgaaggtgactgacagcgaggccagtattattgcggcagagatgataatcccgccagaggcgggcggattcactatcagggaggcggcgctgtttgatgaaagcggtgactgtctggcggtggcgagcgtcccggaaacgtataagccgcttcttgctgaagggtcgggacgctttacggttatcaggctctggctggccgtcagcagcactgaaggggtggaactgatagtcgacccgggtattgtcctggctaccgttgaggatgttattaatatcagcaatgagataaaggattacgctgacaaccagctgagtgaccatacagcctcgcgcaatcatcctgatgccaccctcgacgagaagggatttacccgtctcagtaatgcgattgacagcgacagccaggagaaagccgccacgccgctggcggtcaaactggccgttgaagccgcaatccgcgcagcatgggaactggataaccctgtcggtacggtgaagttttacgcgcggaatgttgaccctaatgagcgctatccgtggacggaatgggtttacaccggtgaggataaaacgatccgtgtcggtaaggctgacggctcggacgttgccacgacaggcggcagcgataccgtgaccattgaacgtgccaacctgcccgccgtgcagattgatgtgagcggcgaaaccagcgagcagcctgagcagacgctgactacagcggaaaacggggcacataaccaccagggcggtgacggtgcgccgggtgaacagtggcgggaagggacgcacggcacggataaccagaaggatgcgaattttaacctgaccagtgatgcgccaacgcattcgcatgacgtcattattccgccgcataagcactcgacaaccggcaaaaccgcgaacctcggcgaggggaaatcgttcagcgtagtggaagcccacaccctgctgatgtgctgggcgagggtggcgtag

SEQ ID NO: 206295 - DNA, 822 bp, Klebsiella oxytoca
atgatcgatacgtcaactttaccggtcagcgtcgccttccaggtatcagagacctctttccatgtttcatctttgggcagattctccggacggatcggaatctctttgagcaacgtggccgcgccaatacgcagtttgttgttgccagggctgctgatcaccgcatcagtggtgcaccgcacaaaagaggacagcttgtatgtccgcccttcgacgacgcttacagattgcgtgatttgcaccgtgccggcggcgcaaacaagaattttgctaccagaatggggcgcactcgccttgataacactggatacgctgttccctgcagaccaccctgccaggtcacgctcaaaggaggcgttaaccagcaaattgctcgggttgcttttggcagtatcggtatcgctctggatatcgctcagcgagttattcagggtggtgatgctttcactctggctgctaagggttttatcctgctgggttacggtcgactgcagacccgtgatcgccttgctattcgcagatacaccagactcaacacttcctacgcgattatccagcgtagacaatgccgccccttgtgatttaagggtgttgccctgctcttcgaccttctgggaaattgtctgtaccgcacttgcatcggccttctggccaaggcttgtttgcaacccggtaatcttgcttgcctgggaagcttgttcagtggacagcgtatgcagctcttctgcaacagaggctttgtttctgttgaattcagtctgcaaggattcacgcgcactcgcttccgcagcatcggcggtgatacgagcatttttctcctga

SEQ ID NO: 206296 - DNA, 444 bp, Klebsiella oxytoca
atgagcctgacctcggctggtgcatccaaacgcaacggcctcggtcttacgctccccataacgggccatcgcttcctgatcttcaacatactcaacgttctgcttatagccgtcctgtttgttgttataggtaatcagagcaacggacggccgatcttttcgagcagagcctttataggtaaacaggccatcttttacgtttgcgttggtaaacagcatgacagggtcagacgggctgtcctgcatgatattcaccatgccaccagcccaaaaaaccatcccacggaaagcgccggcaatatcctgaatcagacgataagcgtcctgacgactggtgatctgggtgttgattgcaaagcgtttttctttgccaccaaagccatcatcaacctcttcgtcgcagtagcgaccgatctgataaagctggccaaggtcaatcattga

SEQ ID NO: 206297 - DNA, 537 bp, Klebsiella oxytoca
atgaattacttagctgaattaccattcgttgacatcttcgatgccaaagccaacaaggcttttttctggcgcgtcgacaatccactcgattataagtgcggcgtgaatggggcgaagacgttcgtagagtttatcgagaagtatccatttatgaacaacagcaatgttctttatcggatcgcgtgcgatatgagcgactcagggcttattaaatcggaatcagcaagagggttcttcaatacgctggatacattgcttacaccgaaaagtgaaatatcagccagtggagcaactaaaatcagaggcagagcacgtcgcaccatcaatgaggtagcatgtgatatggggatcacaagcatgaaacttctaaactttcttgctcttattgggtggatagacaatgcaactgtacagccaaccaatgattcgcttactgaaggcgtgttacgaaaaaacagcaagatgccgtttggtttcacaataaccagaaagggtgaacgcttgattgcgagcaaataccaagcattgagtaaataa

SEQ ID NO: 206298 - DNA, 600 bp, Klebsiella oxytoca
gtggctctttcaaatatacaacttcaaaccatcattaataattctattgacaacccacattatttactgctgaataatgacataagaatacaacgggcaaaagaaacaaataaaaaagaacatgctagagggttctattttggagatgagcacataaactcattaaaaagtccaaatatcgatccatttcatatatacataatttcaccagagaatcaatcaagaagagatgattactcgctggtcatattccctttcgacattaaaaaattaattcatattattgataaaatagacggcatagcacttggacacatccaactaagttccaacttcaatgcattccaaatacacaaaccatcaaaaagtaaaagatgctgtggcgtaggatattctatgaaagttgataatgaagacaatttgtggaaccttatcattgaattaaaaaaacatctacttttacctgcgggaaccacaggaaagctatctagtatctattatcaatccgggctacctagacatagaaacgaaaataatacaaatcaaaatatattagaatatttttctcttataacttctgatacaataggtcacaaatag

SEQ ID NO: 206299 - DNA, 357 bp, Klebsiella oxytoca
atgaaacaggttaaaatttcgctactagtaacacttttgtctgttttttcatctacgactgcacttgcggctaaacatattacgatagatcagcaaaattatataaaagccactcttgagccaaatttacttgatcctgattcagcaaaatataaatttcctgactacatcgaaagcgaatcaacatattgtttccagctaaatgctaccaatccatatggcggttacacaggctatcgatgggtccagatcccctacaagagcatagtttctaaggagaaaaatgttccggtagatatcaatatccttcccaaggaagtcttcgaagaaagctgtaaagaaataggttacaaataa

SEQ ID NO: 206300 - DNA, 531 bp, Klebsiella oxytoca
atgcccaacaatattactgatataacatacggcatcccagcagaagtatggcctcgtgactactccaatgtcgagtttggcctacaatactaccgggcaaagcatatccctgtaagagtaacaaccgatgatgctcaggtattttgtctttatgttaatggcttacttacggcacgtaacaaactagatctatctcccaccatcggaaataaagatcatcgagttcgtctccccttggagcgagtcagtactatagagactatctcgccaggtgaggttagcgtcgaatttatggggcgcgtaaccatttgtcctgattacgtggataatcggccatcacgccgagacttcttcaaaatttgccgtcaagcccatgaggcgcagaagtctataagggtctacatggcggatggccgtgaaattgtaggaaagtcaacaggtgttgatgcctgccatctcacgttaaagactaatgacgagcaagaaatcgttattctcttcgattgggtcgagcgcattttaccgttttaa

SEQ ID NO: 206301 - DNA, 612 bp, Klebsiella oxytoca
atgattacatttttactgaatataaagaatcagtattatcatttggccgttacaaatatcgtccaagatcttatgaatgaaactaataatttgaattataccattgaaaatcaatgggatatagattctttagctaaggcagatataatctttatggacatggtagctggagagtggtatctctgcaaccgtatgtttcaacaagcgaaggaaaattttaaactgattattattcaagatgataaatttatcatgaattctaaaaaattacccaactgtttgcaaagtgcctcttttatgcctccacatacatctgtttcctattataaagaagagataggtaagctattggaagatttgaggatattagaaaataaaaaaataaataaaaatctgtatcgctgcatcggctgcagatgcaaatcgctgactgaggcgcaaaaaaaagtcatttatgcatttaatgttggtcttagcccgcgagaaataggctcagcgttacaaatcagtcacaagacggtttatgcacataaaaagagtattatgaacagatttaagttaaagagccgttatgaattcagttgctttgttcaaagatattccaaacaataa

SEQ ID NO: 206302 - DNA, 402 bp, Klebsiella oxytoca; identical to SEQ ID NO: 200222

SEQ ID NO: 206303 - DNA, 300 bp, Klebsiella oxytoca
atgagcaaagtatttactgctgaatttaaacttgaagcggcaaaactggtcctcgaccagcgctacacacatggtcaggctgctaaggcgatgaacgtcagtctctcagccatcaaccgctgggtaaaatcgttacgtatggagcgccaggggaaaatgcctccggggttacctttgactccagagcagaccgaactcagggaaatgagaacacggatacaacgccttgaaatggaaaacgaaatcctaaaaaaggctaccgcgctcttgatgtcggactctctcaacagtactcgataa

SEQ ID NO: 206304 - DNA, 204 bp, Klebsiella oxytoca
atggtaagactgctggccaccttagaggttatgacggtatttacaactgtttgcgctggcaaaggtgttgtgattcgccagcacataccagtaatgcaatgtgctatctgcctcgatttcctgcaccaattgtacaccgcagaattcggataccagaggagcatggtcgatgtagttttcatcagccagttccttatccggtaa

SEQ ID NO: 206305 - DNA, 138 bp, Klebsiella oxytoca; identical to SEQ ID NO: 200251

SEQ ID NO: 206306 - DNA, 1080 bp, Klebsiella oxytoca; identical to SEQ ID NO: 200252

SEQ ID NO: 206307 - DNA, 2652 bp, Klebsiella oxytoca
atgtctgtgaactggactaaagctgagttttttaagtgcgctttgcaggtaaaccctgcgggctataacaaatatcgcggcaaagaatcactcagcgaagaggtctacaaccagcaactgctggaggcatgtcttgaagctggggttcaggttgttggtattgctgatcatggtgctgtggatgcggtggacagacttcgtcagctctttaatgaacatggtattgttgtttttcctggttttgagatttgctccagcgagaaaattcattttgtttgtttgtttgatgaaaatcggacagtgcaagagctggaacgttatttgagtaatttggggtatgaagaccccgatgactgtatttcaccatcaaagctcagtgctgtgcagatcattgaaaaagtagatagtctggacggatttatttttgcagcgcatagcactcatgataatggtgtactgaaatgccgtatgaaccatgtatggaaagaaaaagcattgttggcggcgcagattcctggaacggttgatgacttaaaaggggttgaggatgatttttaccggaaagccatccagaacaaactccctgattatcgtcgtgagcggcctattgctattatcaacgcagcagatgttgctcagcctgaagaaattaaaacagcaggagcatcttgtctgataaaaatgaccaggccatgtttttgctcatttaaacaggcatttttagatcctgaatcacgggtacgcctgaatgcagataagccgcatagctatgcttcggcaattgaaaatatccgttttattggtgggtatctggatgagaccgatattattttttccgaccatcttaatgctgttattggtggtcgcggaacaggtaaatccactttgctggaggctattcgtttcgccctgggtaaacagccttttggtgattcagcacaaaagcagcatagcgcaattattaagagcaacctagggaatggtgctctggtccaactgaaggtccgctctgctgcaatgcaggggcgtgcatttaccattagccgcaaatttggtgggcaacccatcgtaacggacaatgaaggtaatgtttcgccttattctccggatgatttacttcctgggctggagttatacgggcagaacgaaatttacgaaatgactcgtgatgcgcagagtcgcaatcatttagtggagcggtttcttgaaggtgaccataaccagttcgatgtgattatcaacaaagcgttgactcgcctcggagatagtcgcctgactatccttaatgctctggagcaaaaggcggaggcagaacttgaagttgcacggctgccgaaattactggagcaggcagaacaatttaaacaacttggtctggatgaaaaactcaaaatcgttcccttgctggaaaaagaaaagcagcttagttcacgccatcaggaagaattgtccagagtacaggatgctcttctaacattaaaagatagcctccccgatctagcttatctcagcgatgcggtgatcaatgttctgccgcatcagtctcttcttatccaacagcgtgatgtactccagcgggtgcaggagcagacggcgatattagtccagcaactggatgaggttgttcagcgttcatcagcagagcttgctcctttacaaagcgagttatcaggtctaatcggtgcagaagaagctcaacttgaaaaggcttttaaagatatcccggccagccagggaaaaagcgggcgacagattggtgcagattatcaaacgttgttacgccagattgcttctattcgtcctaaagcaacggctctggagaataggcaaaaacaacttgatgagctatacctacagcgaaaaagattacttctggagcttatccaggcgcgttctcaacgttccgctgcgttggcgaaatcagtcaaacgcctgaacagaaaactagatgaaaaagtgcggctcaatttgcagccagaaggcgatcgtcaacctctgttgcattttctggagcaatgtaatctggaaggggttggtccacggcggcttgcttgggtgatggagcatgattttacaccggagaatctggttgagagtatccggtgtggtgaattagccttgcataatgctgggtgggggataacgccgaccgtcgcgcaggcattgttgcgcttgagtgaaaaacagcttctggaactggaagcattatcgctaccggatacgatgcaaattgagctgaatgtaatgcatgacggtggcggtgttctctggcgtcatattgatgaactatctaccgggcaacagtgtacagctgtcttgcatttattgttattggaaaatcaagatccactgatcctcgatcagccagaagataacttggataacgcatttattgcagagcgtatagtgacagagctgcgcaaagcgaagctgtcccggcagtttttatttgccactcataacgctaacataccggttttcggtgatgctgagtggattggtgtattgagcgttgaagagggtaaaggacgtattcttcctgagcaacagggggctattgatttgccggagatccaacgcctggcggcgaatattctcgaaggtggtcaaagtgcctttaatcaacgccgggaaaaatatgggtttaaataa

SEQ ID NO: 206308 - DNA, 180 bp, Klebsiella oxytoca
atgcttaaaagcgagttactggagattattgctacctttatcaacggcatgcagggttctgaaactgaagaaaatttgtataatcttcgctgttatcattacagcttaggttctggcgaatccaaggtaacaggtaacaggactcggttgtcactaaaacaaactagtaaatacaagtga

SEQ ID NO: 206309 - DNA, 4020 bp, Klebsiella oxytoca
gtgactgacctgaccagtcgcgttgactcagcggaagggaaactggccagtcagagccaggcaatcacaaagctgcagaatgacctggccacgacgaactcgaatgtgagtaaaaaggcggatcagagcgcgctgacgtcactgaccgggcgagtggagaagacggaaagtggtctgactgctgcgaacagcaatatcacttccctcaacagctcaattagcgccgcaaaagcagccggggatgactatatacctaacccggcatttgatccttcctacgatcgtatggggtttgacgtcgtatcatgcggcgctgatggcgtaccagtggattgcccgtttgcatacgtggttcgcctggcaggtcgtgatcatatcccaaagataaacaatattgctgtcacaccgggtgatgtcttcgagatgtcggccctggtagcctgcggcgccggtcaggccgattttaatctctatatcgccagcggcacctcagcgacggaaggggttaaggcgagactttctggcggtaacacgaaaaccacagcggtctggaagcgtgcaacatggcgttttactgtgccgtccgacacgaatttcctgcgccccttcctgcaggttaaccagagttcaccctttggtacggtctggtatgcagcagactggcatctgcgcaacattaccgcagcgaaccgcgcacagaaaaccgccgatgccatcgcgtcagcagttgataccctgaccacgaaagtcactcagcagggcgatacgttgtccagcataggtactcggaccacgacgcttgagaatgggttgaaaacgacgaacgccaacgtcaacaagaaagcggatgcgagtgcgctgcagacgctgcaaaacaccgtggcggagcagggtaaaacgctgacaagccaaggcagcagtctgacgcagctgaataacgccctgagtgataccacggccagtctggctgctgacggtaaaatccccggcaacctgatttccaacgggtcattcgagcgtggtcaggatgcgtttaccggatggggaagcgtcgggtctgttatcagtgcgctgtcgccgaactacggcagcaaaatcgcgatgtgtggtgtgggtcttgccacactatcccagaaggtcccggtaacgaagggcaacacctataaaatcggtgtgtttgcccgtgcgcagagcggttcggtcatgcaggatcagggcaataacaaactgcgtattggtcagtcgtccctgctgtacgatcgccagtttaacaccgcagaccttcctaccggctcctcatgggttgagttgaccggaacatggaaggcgacggtagacgggatggtcgatgtggcgatctactcttccctgaagtctggcgctcagtattttgacgacttctattttgtggatgtcacggatgaagtgcatattgcctccaacgccggagccatcaatagtctgaccacgcgagtgacgaacgcggaaggtaagcttgagagccagagcaacagcgtcacgtccctgaataacagcattgtggccacacagcaggatgctgatgcagcaaaatcaatacctggcaacatgctggtgaataactcgtttgagcgcggttttgacggatggacaaactcgggctggagcacgctggcggcgcagaatccgaagtccggtaaatacataatccaagctacgaaaacatccagcggttcaacggcatgtgaccagatagtgaagctgaccggcggccatacgtaccgaatcggtgcctgggttcgtaagtctggcgatttagctatcagtaataccagcaataccaaaattagcatccgcaatagctcgggaccgctgaaagacattacgatcccggtgagcgttggtacagcatggacttacatcagcggcgactataagccgacagcagacgtagagttaattgtttctcttcgtaccagcctttcagcgggttacctgtatattgacgacgcattctgcatcgatgtcagcgatgaagtggccaataccctcaatgcttcagccataagctcgttgacaacacgagtgactagcgcagaagggacgttgacaagtcagggtaacagcataacaaaactgcagaacgacttatctacaaccaattcgaacattagcaaaaaggcggacgcagctgcgttaacggcgttaacgaatcgcgtaacgcagagcgagaaagacattgagacccagagcagccagacaacttcgctcaagaactctttgagcactgttcaggcaatgggtagcaacccgtggtttgatggttctctggagacgtactccgataaccagcagatcggcggctcacgtgcggtcgtcgtcagctctcagaaacgaagcggaacgaagtcgttgcgtgtttcccgcggcgccggtgagggcggaaacagcgataaaaccatcggtaagtggattgctctgcgtgaaaatgcggtattccgcattgaactctgggcgatgatgccggcagatcagtcgccatcctctgggtggtcaacgctcgttggtttgcagacccaaaacgctgccaacaacaataactggccgacggcaatcactatcaatgaagccgcattgggtgcaaaaggcgcatggaagaaattcaccggtacgctccgtgtagccgctggccacactcgcggcgcattttgggtatctacccgcggcacaactggcactggtacaccggggtatgatctgtatatcgatgacgttgttgtcaccgatatcaccgacgcaaaagaggctcaagattcggctaatgcgaacgcatccgcgctcaccagccttacctcacgtgttaccaatgtagaagggcaggtgacatcccaggcgtctcagctgtcctctttgacgtcccaggtgaatgatgcgtcttcgaaggttgatcagatggcgcagaccatcaccaacaacgagaaaacgcagtcgtcgctgaataccagcttgcagtcgcaaattgatgcgcaggcatcggcaaacatcaagaaccagacggagttgaataacgccaccacttcgctggcagcaattaaatcaactcagcagacccaggccacaacgattagtgcgctgtctcagcagcaaacgaatttaacggcccaggtaggaggccagtctgccgagctgcaggagctgaagaaaacggttgttgaaaacggcaacgttaatagcacctggatggtcaaaatggaaaccaacagcaacggtaaaaagtatgctgctggtatcgctttaggtatcgatggcaaaaatttgcagagccagtttctggttcaggctgatcgcttcggcttaatcaatacctctaacggaaacacgaccacaccatttgttgtggaaaatggcgttgcctacatgaatgccgctgtgattaaggatggctccatcaccaatgcaaaaattggcggtgaaatccgatctgacaatttcgttaacggttcaaatggctggagaattggaaaagacggtagttcacagttcaacaacgtagttattcgtggtgaagttcacgcaaatactggtgtgcttaataacgtgactattaacgagaactgtactgtgcttgggaccgttcaagctaataaaatagttggtgacgttgtgacaatgaccgaccgtgtagttaagaactggccctctacagccgacacatcatcaggcactcgttatcctatagctactgtgcagggcatgccgtttgagcgtcgtatggtgtttaacgggtctattattattcagcaggtttggcgtcaaaacgtaacaatccgcgttgatgaaacagttgtatggacatttgattcaggtaacgaaggtaaaaattttgaaacttcaattttctccattcgtataccggcatcaaattacggccaaacgcagaatatcacgatccagtggcctaatcgtggtgatagcgggcagttccgatttacaggggttatctccatgtacaggacaaccggctccatctctttggcttaa

SEQ ID NO: 206310 - DNA, 1446 bp, Klebsiella oxytoca
atggcaatgtacgaagttggctccattacgggggcggcaaaccaaacaaaggtaactggagcgtcaactaaatggtctcaaaccgctctaggaattcaggagggttctattcttgtcgtttatcgcagtggaagtgcagatctttacgctattaaatctgttaacagtgacactcagttgacactcacgaggaacattacaacagctttctctggcgcgaaatatggaattatcacatcagaaacagccagtacttcatcttttgcaaaccaactagccagcgcatttaccctttggcgtaacgttgttcaaggatggtctacagcactaacaggtagtggcaatattacaataactgaccctttaacgggtgtatctgtgaccgttccagcaatttcaggaatggcgaaagcgtctgatctcacagcacttagcaactcgctgaaagacgtagcgaagactactgtaacaaacacatttacgcagccgcagacgttcagtaagggcgtgacgttcagtgccactattacagtggcggggcaaatactcaggaagaacagcagtacgcagttcactgcgattgacgccggaaacctagaaatcagcagcgacacaacgccgtacattgattttcaccacaaaggtagctctgcagattatacgcatcgaattatcaccgaagacggggctttagcggtttatccggggctgcgagtccgtggcggtctcggggtttatggcattgctacgcagtacggcgatctgtacgggcaggggtttatcacccgtcttaacacagatccaagtaacgtagctaacggcacaatcattgcctctccacgcgtcacaactaggttcaacactcgcggcagtgacacaaatgttgacggcggacagggggccatgtggtttgaggagcaggtggggacgaaccataggctggtcttcatgctgggtggtttcagtcagcctgtccaatattggcaacacttgccggatgggcggatctatagtagttctcgcggcgatgttgcatttaacgggacgtccgacgaacggctgaaacacagtatagaaccgactgacggccatttgtcagtcgatcgcattcgtcagcttgagctggtgacgttcgtctataacgatgacgagcaggaacgggtacgccgcgggattattgcgcagcaggctcagctggtcgacaaacagtatgttaagcaaattaacacgtcgtatattctcaacggtgagagagtggacgatgaccgcctgcaactcgataataacgttatcctaatggatacattggcggcggttaaagtactgattcagcgagttgaagaacttgagaataaacttaactcatcagaagggagcgacgctataaatacaaacaagaataccttcgatacaggcgtggctatgagtagtgagcaattaaattaa

SEQ ID NO: 206311 - DNA, 768 bp, Klebsiella oxytoca
atgcatccattattaacatttatcgcaaatttcatagaaaaactgatttccgatgtggaaacagtggttgagaaagtttccgatatttttaccaaaggggcaagaaggaaagatatagaaaccaaaataaaagatctcgaaagggagagagagttcttaattaagtacactataaagaaaaatataggcgctttttcaagcgttactactgacgcattaacagggaaaatttatagtacagcaatatcaaatgctattgcaaaaaaactggttgcatataatgttgactttaaaaatatacgtcacgttaataaaaccttagaggaactggagatgattgcgcttatagagcgcgatctgaaaaaaagggaagaagctgaaaataaaaataaaaatgaaactgtagtaaatttgtttttattaaatgaaaaaagtaagttattgaaagcaaaaaccttggctgttgtcattgtcattgccagtgcattaacggtatttttctttggacttccaatttggtctgttcttattggtttaataccattaatacttattgagatgaaagatagagttatgacctatcgtgttgccaaaggttattttggaagaaatgcgccagaggcaattcagttggtaaaatttataagagaaaatacagataaatttgattctaatgatagcggaaatggtagaagaaaagttctcaacccagagaaagaaaaaaatgtaagcgcagatgatactgtgaaaggatggcaaaatgcttaa

SEQ ID NO: 206312 - DNA, 411 bp, Klebsiella oxytoca
atgcttaattttgatgtcatctctaaacgtttaggccaatgtttagatattcttttgctaaaacatccgatgcgtacagtgtttggaatctttttaggttatattttatatacatgcctctatactttaaaagaatatttcaaaacacatctttttgcagttgataacgttcattatattggttgttttattctggggattttaatatttcatacaaatactattattgatgtttataatggaactgctatggatgaggaaattagcaatttaataaatgctataacaaagcgaaccgatttgtcagaaccgcagaaagcaatgatgataactgaaattattcaaaatgagattaataaattggggaaacgaggtctggaagaagtagcaaaaaatgtcattcagaaatga

SEQ ID NO: 206313 - DNA, 1233 bp, Klebsiella oxytoca
atgcctgttttgttaatcctcatacttggggtagtgatgattattttctgggatgccgttaaggaaaacgtagaggttataggtacgcttgtcacttcacttgccttttttgctactgcctgggctgcttacgaggcaagacatagtgcaaaggcggcaatgaaggcgacccagctaacggcggcttcacttcttgaaatgaaaaaagcttcttttaaggaatggtacggcatattacttgaacagcataataagttgcttgaggacgttaataagactttgctcgatgacagtgagcttaatgttaaattgggcatgaatgtcatcaagggcatttattactatgcaaccaaaaaacctgcttacataaagtatattaaccacataattttaattctgacttatttggataaagacttctatctaccatcatcagcagataatgaaaagagatcttacatagaacagctgcgcaatagcattagtccaaaagtaagcctactgatttctatttttggccttaatatcgataataataaaacctacgatgcaaagaaactttacaacctcctgaataaatataacttctttgaaaatcaagttttttttgaagatgcaatatcgaaagttcattacttagattcctatgctgctgaaattttcaacaaagaatatcgaagaaacgtagaattttatgttgatgaaatggttcgtggttgtgtaccctctaatatcaaagtgtcacgcccgcataacagcattacgttcgcagtgctgtggtcgtataacaatccttgccaacaacatttgttgcaaagattcaatgacttgcctctacatatgagaaatagcatcaagctgaatatggaaaaatcggccgaaaaagtggccgagttcgattcttggcttcctaatattatcggctgggagcttaatatatctggattcaaaaatagagttatcaaggacgaaaaagagctaaaaaggctaataaaaatttatattaaacatcctttcaatagcagactgacaggtatcttgttgactaatggagttactaatagattcgctgaagatatagaaagtaatctagataaatattttttatataaagcatatttaaacctcaatactaatcccatgaaagaggaattgattgacggaatagtgactaaagttgaggaaatggttgatatttacaaatcagagctcaatgcattcagttttaaataa

SEQ ID NO: 206314 - DNA, 531 bp, Klebsiella oxytoca; identical to SEQ ID NO: 200273

SEQ ID NO: 206315 - DNA, 396 bp, Klebsiella oxytoca
atgctggatattatccagaccgccaacgtcctgactcgtcaggcacaccagttgtggttatgcggtcagatatcacaacaggttcatgaccgaattatcctgcaactcctgagctcactgcaggttgctatggacaagattactaaaatactgaacgtcgaaaatcgtgtgaatggaaaatacgacatattaccattcatccagagcattaagcggtttaaatcggtggaactttatattgccagtctcgaaccgaaggcccttgctcagtccggttacattgacatttcagctgatacaggcagtgagcagacattaaaaccagaggaagtggcaggctctggcaagccatctgacaaaacacaatcttctgtcactcctgtttcggcacaataa

SEQ ID NO: 206316 - DNA, 1380 bp, Klebsiella oxytoca
gtgtccggccacgtcgtcggtcacctccggcgcactggcagacggcgcggtggtatcaattgtcagctcaaacgccggggagcgctcgctgacgttccccgccttatccgtcaccgtggtgctcaggctgtggctgccttcatccagtgcatcaggggtgtagctccagcgtccgtcctcgccggcaaccacggtacccagtacggtatcgccgtcgtagatcgtgaccgtggcccccgcctccgccgtgccgctcagggtcggcgtggcatcgttggtcagatcgccgctggccagcgggccggtgtgtccggccacgtcgtcggtcacctccggcgcactggcagacggcgcggtggtatcaatcgtcagctcaaacgccggggaacgctcgctgacgttcccggccttgtcggttacggtggtgctcaggctgtggctgccttcatccagtgcatcaggggtgtagctccagcgtccgtcctcaccggcaaccaccgtacccagtaccgtgtcgccgtcatagatcgtgaccgtggcccccgcctccgccgtgccgctcagggtcggtgtggcgtcgttggtcagatcgccgctggtcagcgggccggtatgcccggccacgtcgtcggtcacctccggcgcactggcagacggcgcggtgatatcaatcgtcagctcaaacgccggggaacgctcgctgacgtttccggccttgtcggtcacggtggtgctcaggctgtggtcgccctcgttcagggtgtccggcgtgaaagtccagcgtccgtcctcaccggcaaccaccgtacccagtaccgtgtcgccgtcatagatcgtgaccgtggcccccgcctcggcggtaccgctcagggtcggtgtggcgtcgttggtcagatcgccgctggccagcgggccggtatgcccggccacgtcgtcggtcacctgcagatcgctgaccggagtcacgactgtgtccaccgtcagctcaaacaccggggaacgctcgctgacgtttccggccttgtcggtcacggtggtgctcaggctgtggctgccttcgtccagcgcatccggagtgaaagtccagcgtccgtcctcgccggcaaccaccgtacccagtacggtgtcaccgtcgtagatcgtgaccgtggcgcccgcctcggcggtaccgctcagggttggtgtggcgtcgttggtcagatcgccgctggtcagcgggccggtatgcccggccacgtcgtcggtcacctccggcgcactggcagacggcgcggtggtatcaatcgtcagctcaaacgccggggaacgctcgctgacgttcccggccttgtcggtcaccgtagcgctcaggctatgaggaccttcgctaagctccggtaa

SEQ ID NO: 206317 - DNA, 945 bp, Klebsiella oxytoca
gtggctgccttcatccagtgcatcaggggtgtagctccagcgtccgtcctcgccggcaaccacggtacccagtacggtatcgccgtcgtagatcgtgaccgtggcccccgcctccgccgtgccgctcagggttggtgtggcgtcgttggtcagatcgccgctggtcagcgggccggtatgcccggccacgtcgtcggtcacctccggcgcactggcagacggcgcggtgatatcaatcgtcagctcaaacgccggggaacgctcgctgacgtttccggccttgtcggtcacggtggtgctcaggctgtggtcgccctcgttcagggtgtccggcgtgaaagtccagcgtccgtcctcaccggcaaccaccgtacccagtaccgtgtcgccgtcatagatcgtgaccgtggcccccgcctcggcggtaccgctcagggtcggtgtggcgtcgttggtcagatcgccgctggccagcgggccggtatgcccggccacgtcgtcggtcacctgcagatcgctgaccggagtcacgactgtgtccaccgtcagctcaaacaccggggaacgctcgctgacgtttccggccttgtcggtcacggtggtgctcaggctgtggctgccttcgtccagcgcatccggagtgaaagtccagcgtccgtcctcgccggcaaccaccgtacccagtacggtgtcaccgtcgtagatcgtgaccgtggcgcccgcctcggcggtaccgctcagggttggtgtggcgtcgttggtcagatcgccgctggtcagcgggccggtatgcccggccacgtcgtcggtcacctccggcgcactggcagacggcgcggtggtatcaatcgtcagctcaaacgccggggaacgctcgctgacgttcccggccttgtcggtcaccgtagcgctcaggctatgaggaccttcgctaagctccggtaa

SEQ ID NO: 206318 - DNA, 342 bp, Klebsiella oxytoca
gtggcggtagccgaggaggttctggccgcggagcagcatctgcaggggggtcttcggcatggcctttttgagctcgcgcaggcggacccaggggtcctcgccgaggaagcggatgcaggcgtcaaaggtggcgccgccccagcattcaagggaccagtagcccgcgtcgtcgagctgagcggcaaccggcagcatatcgtcaaggcgcaggcgggtggcgaaaagggactggtgggcgtcgcgcaggacgacatcggtaatggcaacggtcatggattcctccgtgaattaagggttaagtcggcgatggtggtggagagcggcggcaatcaccggctttaa

SEQ ID NO: 206319 - DNA, 159 bp, Klebsiella oxytoca
atgagcatgcaggtgcagcttcacgtcgtagcgttttttgatttcactcaccagctcaaaggcggcccccggggtgagaatgccggacatgtctttaatcgcgatggagtcgacgccggtttccagcagctgttcggtcaggtccagccaggtctgtag

SEQ ID NO: 206320 - DNA, 381 bp, Klebsiella oxytoca
atgctgggtgcagtggaacgtcgcttcggtaacagcctgccagcatcccctgttgagtggctgacagacaacggttcagcctaccgttctcatcagacgcgtcagttcgccagaatggtaggactggagcctaaacatacggcggtacgtagcccggaaagcaacgggatggcggagagcttcgtgaaaacgatgaagcgtgattacatcagcatcatgccgaagcccgacgggttaacagcggtaaagaaccttgcggaggccttcgaacattacaacgaatggcatccgcatagtgcactgggatatcgttccccacgggaatatctgcggcgacgaaccagtcatgggttaagtgataaaaagtgtatggaaatatag

SEQ ID NO: 206321 - DNA, 231 bp, Klebsiella oxytoca
atgagccgacgcgccgaccgcctttttcaaatcgttcagatcctgcgcggaaggcgattaactaccgccggactgctggccgagcggctcggcgtatcggagcgcacgatttaccgcgatattcgcgacctttcgctctccggcgtcccggttgagggggaggccggaagcggctaccggctgctggcgggctatgacctaccgccgctgatgctgacaacccaggaatag

SEQ ID NO: 206322 - DNA, 273 bp, Klebsiella oxytoca
gtgccggttgaagagattttgccgatgcagcgggataaatggcaggtgttagaaaacaccccgctgtatgccatctccaacccggttagcggtagtaaagagaatttactgtctgcgggcagggagctgattgagcaaggcgcggatgtactgatgctggattgtctttgctaccaccagcagcatcgcgacatattacaaaaggcgctggatatcccggttctgttgtcaaatgtgctggtttcgcgactggcggcagaactattagtttaa

SEQ ID NO: 206323 - DNA, 498 bp, Klebsiella oxytoca
gtggggctggatgagcctgcgcattcagtaacgactgtcgatcaccacgccttagtcgcttctcatctggttaaactgcgcgggacctgtcgagatggccagcgtatcgatgaacctatgccgacgatcactgctggcggtcaacatgttggggaagttaaaacgacattggccattgatgaatacgatgaggagcgagctcagcaggtgctggcgttcctgcaggaatactgcggggagggctgtaccgggctggtggaaatcgacggcgtaacgtatcgcattgttgatatcgggatgcgtatgctgcagccgcgcgagctctatcgcgcgcagggtttcccagagtggtacatcatcgaccaagactaccgcggcgtgaaatacgccaaagataagcaggtggcgcgctgcggaaacgctgtaccgcctccttttgctgaggcgcttgtgagggcgaacttatctgagatgtgtcaggctcgggaggctgcataa

SEQ ID NO: 206324 - DNA, 411 bp, Klebsiella oxytoca
atggtcaggcgtggattggcgggatccaggggggggaaagacattgataatgaagaagtgaaggcgctgaccaaagagctttacggcatccgccctaaaaacttaattatcacgctgctgtacggctttttgtcgcatttcaatatcaaggagatctatgcgattgacagccattatcatgttaaaagtgagagagtaaaaaccagttattctgagctttggctggaaattggcggcgagaagcatcgtcgcggctggtataaattaccgccgagcgagataaagaaaagcctggaagaggttaaaagcaagcaccgcagccagtttatcaagcgagaaggcttgaaagagctggcacagctggatcttgccgccgcgctacgcgatatttgcgtcaagcgtaacggctaa

SEQ ID NO: 206325 - DNA, 1743 bp, Klebsiella oxytoca
atgaaaacgcagaaattcgtaagtgaactttttttagaaaatgggcagttcattctagttggcttaactgggagaactggttctggttgtaccacagcagcaaatattttagaaagtaacgagacagtttttcctgatgtggataaattaactgatttttatagtggtttagatttacaaagatataatatagtcaaggatttcactgaaaatcattgggaggcattttattcaattaaggttagtgatttactatcggtttatttattagcaatgcaaaaaaatgagcttttagacttcataatatcttcaactagagatagcattgataaagataaattgaacaagatacttaatgaaggagcattttcaaaaacacagcttagaaaaataaggacggatatcttaaaagcacttatcgatcatagtcaagaattagatctagataacctagatgtatctaacataagaaaaacattgcatttggttaggtttttcactaataacttcaaaaaagaacttaatgaaataaatacagggctttatgtatcaacttatcaggctgctggaaaatcagttagacggcttggtgaaataaaaacaaattatgaggcagaagaatttgatccaaaatcggtatttcatttgcctgaaactatcaatagggttattaagctaattagaaaaagccaagatggtaaggcattagtagttattgatgctatacgtaatccatatgaagctaaattctttaaagatagatatgctgcattccatctggtatcaattaatgctccggatgagcataggaaaaaatatttacagaagctacataagttttcatctgagcgcattaaacacattgatgatattgagtcaggtaaaggggataaagacaatcaatataaacatttaacgaaccctaatgtaactaaatgcatagaaatttcggatattcatctttttaatcctaagaatgagtttgataacaataacatacttaaagcacaacttgcatggtatattgctctaatgaagcatcctggattgatcactcctacagcgatggagcgagttatgcaggtcgcatatactgttaaattaaactctggatgtatatcgaggcaggtcggtgctgttgttacagataatgataattctattaaatcagttggttggaatgatgtagctaaaggacagataccatgttcaatgagatcactcgatgggttgatcaatgattttgattcgaaagtatatagctcatatgagcgaaatgatgctctttttagaaagaaagccaaaagtaatttaataaagtttagagcgattgaatcaagttctgaaatttttaaaggacggactttgtcatattgcttcaaggatattcataatagtctagatgatgataaaaaggggaatcaggtccatactagagctttacatgctgaagaaaatgcctttttacaattatctaaatatggcggcattggtgtgcaaggtggtaagttgtatactacagcaagtccttgtgaactttgtgcaaaaaaagcatatcaactagaggttgctgaaataattttcattgatccttatccgggtattgcacaagaacatattattaatataggtaataacccacctaaattaattcaatttagaggggcaattggtaaatcatatcatcgattatatgaacaaattattcctatgaaagatgagttggattatttatcaatgtaa

SEQ ID NO: 206326 - DNA, 471 bp, Klebsiella oxytoca
atgttggaagtcctgctagtgggtttggcgcaggccagtgtcctagtttttcagtgtaccgaatacagatggcagtgtaagcattccagcttcagttccatgcacttaggcccaacgaaaacaatagagctttttgttgggcctaaaaggttcggatttaatgagttatcttcggacttcgcgggacaaattgagggcacaaaaaagcccgcagggcttgcgccgtgcgggctttcaggacttcatcggatgactctggtaatcaccgatggagaattttggtggagctggcgggagttgaacccgcgtccgaaattcctacatcctcggtactacatgcttagtcagtctttacattcgcctggcacctgcggacagacacgccactaccagactagcctgattagttttaacgtttcaaccccaggcagggcctccacgcgatctcttttgggtttgacctctctttga

SEQ ID NO: 206327 - DNA, 423 bp, Klebsiella oxytoca
gtgtcgtatcgcgaccatctgtaccgtgtgatagcgaagcacgccagtgaatggtattacggcaaggatgactcgctctggaagacatacctggatactttaaccacggacgcaccgttatggaaaacgtacctggaagcgtttctggataagatgacatggatgaaagcagtatccgaaaagggcgtagtgctggggcccgaaccgtggcatatgcatccgattgtatttttaaatgctataaggaaagggaagccaaaaattacgcgagaaatgctcaggaggatttggaatagcccaggcaatgtttctgacgctgttcttgatattgttgctgaagagttttcgaataaatttgaagcgtgtaatattaataccaaaaatagactttatcatttttttgcgcaaattttcaagaggtag

SEQ ID NO: 206328 - DNA, 675 bp, Klebsiella oxytoca
atggtttttcccgttattaaacaggagcggttatatcagaaaattgccaatatcattatgcaattaatcattgacggcgtttttaaacccggcgatttcttgccttccgaacgcgatctttcgcggcaactaggcgttagtcgagcgtcgctacgagaagcattaatagtcctggaaatatctggttgggttgatattcagtcggggaatggtattcaggtttctttaaagtcagataagaatcatcaacgtacgcattcactggcagatattcttcaggctcgtcatcttgtcgattgtgaatgcgcgagattggctgcaaatgcaaataatcaaaaaaaaacggacgaattatttgaacttgtcagattaatgactgactctattgagaataatgcggtttctgagttttattctattgataaaaaattccatctggcgattgccgaggcatcatctaataaaatgctttatgagttttccgggttgttatgggccagccgggttagtattccttatgtaggcctggaaggtaagagttctgatattaaaacgttgatcgaactaaatcggcagcatgaaatgattgctctggcgattaagaaaggggatgagctagcctctctgcaggaaacaaagcagcatctggaatatattattaatatcattgattag

SEQ ID NO: 206329 - DNA, 1272 bp, Klebsiella oxytoca
atgttatggattttccttgtagcattatttggctctctttttattggtataccggttgccattgcaatgctgcttagtgccgtcatcatgctccacataatgggtatgtttgatccgcaaaacatcattgaaaacttaatgatgggagccaacaattttcccctgatggctattcctttttttatgctaaccggtgaattgatgaaatccggtggcatctctctgcgcatagtcgactttgctatgagcatggtggggcatattaagggcggactgggctacgtggttattatttccggcctgattttcgctggtctttcaggatctgccgtagcagatacggcagctctgggtgcaattttgatacctatgatgatctcaaagggataccctgcccctcgctcaaccgcaattatttgctcagtcggtattatcgccgttgtattacccccgagcattcccatgatagtctttggcgttactgctggcgtatccattactaaactatttatgggggggattgttccagcttttcttatggctttgggactttggctagtatggcgagcccagcatcgaaatactgaactcggaacaatgccgaaaaaaaatgcccacgaacgctggaaagcatttaaagatgctttttgggccttattattaccggttatcatcattgttggcctgcgtgggggtatctttacgccaacagaagcaggggtcgttgctgcaatttatgccgcgatcatcggtattgcttaccggggaataacctggagtaacttaccagatattttctttaatactgtaaaaacaaccggtatcgtgatgttcgttgccgctgctgcaatggtttcagctttcgctattaccgtcgcgcaaattcccactgagataatggaagtattgtccgggctaacaaaaaatccgacagtaatgctaatcctgataatgatatttttgctgctggtcggttgcgtcatggatcttattccagcggtattaatatttgtccctgtattaatgcctattatcaaaagctatggtattaacccaaattattttggcatattaatgatactgaatctttccattggcttgattacaccacctattggcaccgttctttatgtaggttcaggggtatcaaaagtttctattggtaatatatctaaaagcattttaccttatttattggtatactttatcatcatgttttcctttgtctttttcccagaaataattatcactccaatgaactactttagctaa

SEQ ID NO: 206330 - DNA, 462 bp, Klebsiella oxytoca
atgaaacccagtctcattcttaacaatttactgaaaattttatcttttagtacattatgtcttatgacaatactggtattttgtaatgttattttacgctatttttttcattccgggattccctggtctgaggaactcgccaggatttgctttgtttatgcaattttcattggcattattattgctgcgcgctcccatagccatttaattgttgacttcattacctccagactatcattgaaaacccaaaagtgggcatcactcattgcaaacttattatctattttcattcttcttattattgttgatggcgcatgggatctcatgcaactcactaaagatttgaaaatgccggcaactgaactatcaacatcctggctctatctggcagcttttatctcatccatagcctatatcattattctagttattgatagctataatgatctacgcaacaaataa

SEQ ID NO: 206331 - DNA, 987 bp, Klebsiella oxytoca
atgattagaaaaattgttggtgcagctttaatagctatgatggcaaccagcggtactgcaatcgccgcaaaaaaaattatcaagttaggccattatatgtctgatactcatccacaacatatcgctctgaaggagtattttaagaaaacaatcgaggacgaaactcagggacgttatgaaattcgtatctaccctaataatcagatcggtggcgaagatcaggttttaaatggcatacgcaatggcactatcgaaatgggtattacagggttactgctgcagaatgttaatcccgtatttggtgtctgggaatggcctttcttgtttaagaataacgctgaagccagaaaagtacttaccgattcacagatcgccaaagatattatggataaacatgctgaatatggcataaaagtacttgctattggtatgaatggattcagggttgtctcctcaaacaaacccgttaataattttgctgaatttaatggtcttcgtctaagagtcccaatgaataatatgtttgtcgtatgggcaaaagccatgacaatcaacccgcaaagtatgccattgagcgaagtattcaccgctctggagcagcatgtcatcgatgggcaggaaaacccttatgcgctcatcaaggaatccggactttatgaagtacaaaaatatattatagaaactaatcattcattttcacccggcctccttcagattagcctcaagacatggaaaaacatccctgaggaagatcagaaaatcttcataaaggcagcgcaaaactatcaacaacatgagtgggatctcgcgattaaagctgaaggtgaagtcaaaaccttcctcaaagggcatgatatcaaaattattgaacctgacgatcaatttaaagcagatatgctgaaagctgtacaacctatgtatcaagaatacttcaataaatatgattgggcacaaaaaactgttgaagctattaatgcagcaaaataa

SEQ ID NO: 206332 - DNA, 474 bp, Klebsiella oxytoca
atgcaatacgaagcaataccgattcttgtcgatattattgattccagactacagcatgctcttgtatgcggcgtaccatgggttctcaatccagaaaaagataacgttaaagacgaaatttcacgtataacccgtgggcggatggctgaagtcgttgttgaagcctctggcgccaaccaatccattcaggcctctctggattatgcatccttttccgggcgagtatccctgacaggctggcctaaagaagcgacacaactaaaaactaacattatcacctttaaagaacttgatatccgaggagccagaacgagcgctggcgagtttcaggaagcaattgaactgctagccactaaaaaaatagatagtactgtcattgtcagtaaaattatcactctggaagaaattccatctatggtcaaagaattatcacaacaccctgataaatacttaaaaatcaatgccgttctataa

SEQ ID NO: 206333 - DNA, 462 bp, Klebsiella oxytoca
atggctcgaccgaaaaaaatcgttgagacgccggggcaggaaaaagcggcaccggaagaaaaaacgctcgttactgaggggcagttaattactgctgaacagaacggcgcgcagcagcagggtaacggtagcgacgtacagaacgttgaaggcaagttggtagtcaccattgatgaaccgcagccgagcaaagaggcactgttgcttgcaggccgcaacgccattctcgccacgctcaacgcgcagggcgctgccatcgttgcccgcttcgaagagtacgccttcactgacagcctcggccacccgctgaccaataacctcgatttcctcaccctcgtacacaaagccactgatgtaagcactggcggtacggcggagcaggtgacaaacgaggaaggcaaaaagcaacccgtacgcagcgcgccggtattaaccgaacacggctggcacgttccgggctaa

SEQ ID NO: 206334 - DNA, 216 bp, Klebsiella oxytoca
atgcaactcctcaccttcgccacgaaagatgccccactccagcgcctcattgcgggcaataatggcgtgcagcaaggtaagccaaaggataagaaagaagtgtttctttcacatatccttgcacgcctgaacgaactctttataaccgataacctcacggacaaggacatgattaattatgccttaaccgtgcgcgataaattatcggaaaaataa

SEQ ID NO: 206335 - DNA, 381 bp, Klebsiella oxytoca; identical to SEQ ID NO: 206320

SEQ ID NO: 206336 - DNA, 171 bp, Klebsiella oxytoca; identical to SEQ ID NO: 166046

SEQ ID NO: 206337 - DNA, 1011 bp, Klebsiella oxytoca
atgaagcctatgccagttggtatcgacattgccaaaaacgtaatgcaggttcacttcgtaaatacagatacaggcgaaatttttaacaaggcaatcaagcgcgcgaagtttattgagtttttcaccaatcgttcaccctgcctcattggtatggaagcctgtggcggcgcacatcactgggcccggcagttaagcaggctcggccatcaggtgaaactgatgccgggcgaattcgtcaaagccttcaatatccgtaacaagaatgatacggcagatgctcaggcaatctggcgagccgttcagcaaccgggcaaagccgtagcggtgaagacggaggatcaacaggccatgcttgccctgcaccggatacgttcacagctgatgaagttccggctgatgcagaccaatgccctgcacggtttactctcggaatacggtgaagtgatgcgtaaaggacatgtcagcctcgtcagaaacgtccccgagatacttgcccgcctgtccggacggttaccggctgtgctcatagacagtctgcgcgaacagctgggtgaagtgaaacgaactgacactcgtattacggacatcgaaagacggatacgcgaactgaacaaaaacgatcccggcgtaaaagctataagcgaaatccccggcgtaggactactgaccgccaccgctgcggttgcctcaatgggggatgcggacaccttccgttcaggccgggagtttgcttcctgggtggggctcgttccgagacagaccggaacgggcgggaagatccagttgctggggattcgtaagcgaggcgacaagtacctgcgaaaactgctggtcaacggcgctcacagcgtcatacagaatgcccgtgagccgggtccctgggtcacagacttgctgaagcggcgtccgataaacgtcgtctccgtagcgctggccaacaaaatggcacgaatcatatgggctgtgctggcgcacggcaggccctatcggaaggaagctgctcataactga

SEQ ID NO: 206338 - DNA, 708 bp, Klebsiella oxytoca
atgggatttaatctatcagattgggaggttttacgttatttgggatgggataacaataccatttcaaaggcaacgaatcacattctttggaatattccagtatatagatttttcgataaaatggaatatgcaaaaaaatttgcatctggtgagagcattagaattagcacactaaatatatgccggggatatgaagatcaacagcggggtgataaagaggagggtaagcttgtctatagtacaggggactcagttttaagtggaacatataagactccatttaacggtatttctggtgaagatatgaccgattgtgttattagcggaactatagattcagcaacgatacttgatgcgtatgtattatgcacatcaatgaattacaatccatttaagatggggagttttggatattgctgcgttaaaattgatagcccattaaagctagcttattttttgacgaaaaaaatcaggaatgagttaggggatgtcgttggtaagtgtgagtttcaacctgttatttatgattccatatactttgccggtgataaggatttgcccggccctattgggttcgtaaaaaacaaagaaatttattttgaccagcgggagtatcgatttatttggtttttaaaaaaagaaatcaataatcttgggtatatagatattcaatgtgaagagttgagcgaattctgtaagcttttttga

SEQ ID NO: 206339 - DNA, 1065 bp, Klebsiella oxytoca
atggaaagcaatctcgcagcccctccgaaacacagctctaattgtttcgatataatacgccatgctgcagcatacctggttatggttagtcaccactatgctttgaatggattacctgagccaaagctatttggatcaacaaagctaggaacacttgccgtaatcattttcttttctatatctggttatttaataacgaatagctatttgaattcatcgaatacatattcgtatataaagaaaagagccttgcgtattttcccaggactaatagcctgtgcaataataatgacttttttagtttttcctttttttggtacaagtaaccatgctttggactggttgttatctatcaacccgataaaatctttactgtactttagtttctttggctctcctggcgctggggaaatagttaatggtttcacaagtgattacgtattcaatgattcagctaatggtagcttatggtcactgaagtttgaatttttagattacattgcaatcctgctaatctttgcaattatcaaaaaaccaatcttagggtcaatcatatttatagctctctcagttttgggtgttcttataaataataaataccacatatcagactattatttttatcgggctgctgcatattcaattcccttcgcgatgggctctcttctttttgccaccagacatatatggcaaaagcatcatgtagtaaaatacatcttgctggccttgggattcatcgggttgctggttctacctcatagcaccgaacttagtttgccacttctctttttggctcctgtaattgtcataatgatcggattctcttttagggatgttctcataaaagggaagtttgatatttcttatggcgtctacatatacgcattccctttacagcaaattttcagcaattatttacctgacgagtttggacaatcattcattatgtctttaattgcaacaacaatcatagctcttgcgtcgtggtttatggtagagaaaaaattcctcgcaagaaaatacaatcgagtaaacctgcccacgggtgcagttcctataaagtaa

SEQ ID NO: 206340 - DNA, 711 bp, Klebsiella oxytoca
atgcgagcaacagcgaacaaaaaagtagggaacactaaccatcccatagttgattatgttaatgatgtaaatagaaaaatctctaatgatgcgattgagttttctcagggggcaaatttttatgttatggaaacagcatctggttcacgtgcattccttataacaaatcaggaaagggaacaactggaagagtcgaataagggatgtaaattttatttgagggatgaaattaaacgaggtgaagtactaaagttgattgatgaattttcatctgatggtgtgaatctatctttagatgtttttaaattaaacgagaacaatgacttggtgttttctgcatgcatattgcattttatagggctggataatatatcattgagtcttcttaaaagtgcttttatcaatgaaagcatgaagttggggcagcttcattttgtctatcattcgagcaaggttgccgagagacttaaacaacgagttaactcatctcagccaagaaaccgtaattatgccatggctattaaaataattagagatacatgggatttatacccagcagcaagtaaaaatgaaatgtgttcgaaacttcatcttcattttaaagggactgtcagtaaggacacgatcaagcgatggataaaaaaatcaaacttacaacctccgaaaccagccaagtacactgctttttcattagttatcgactctgattaa

SEQ ID NO: 206341 - DNA, 570 bp, Klebsiella oxytoca
atgaatgataaaaatggcctcaacggtcagggcttcgttcaccctgaaaactgcaacgatgatatttccgttattaatttcgagggtgcaaaagtccgtattgcgaagatcagcggtgagccgtggtttgttgccgctgatgtgtgtgcagctcttgagatagtcgatcacaaggtggcattacgtcgccttgacgaagatgaaaagggggagtgtttaatacccacccttggtggtaagcagctcatgaggacagtttgcgaatccggtttctacaaattgatcgcccgcagccgcaaggccagtacgcctggcacattcgcccaccgtttcagcaattgggtatttcgtgaggttatcccgtctattcgtaaaaccggctcctacggtgtgccgttcgcgttcctgaatgatttcagtaagcgtatggcggcgtaccagcaggaggccagtaaacgcgggtacaaattgcagcgttgcaaagaggcaaagcaggcgctggaaagtgaagaggcggagttatggcgtaagtatcagcctgattttctggagggggtgagcgatgcatag

SEQ ID NO: 206342 - DNA, 2139 bp, Klebsiella oxytoca
gtgaaaaatgcaccaaacgttaaaagcctgccaaaggataaatttgtcgaggctgttatttttgccggggccgatgcttactcccacgcgaaaggctgggaagaaggcatgggtaagcagattgccagtgactcaacgccgccagtctggctggggccaaagcaactggctgaactggcgaacctgcgcattattgacaaagggcgacgctgtgcacgcgtctatctggccggggatattgaaccgctaatgattaatgccatcggtgaaaagctggcactggctggcgtacaggatgcgaaattgtacaagggcattcctgatcagcagccggaggactggcgcgattatttaaccagattgcgggaggatgccgaacgcggcgaaagtctggttacggaggttaactggatgaaccgaaaacgcgcaccggcggatgagcttgccccgtgtgttgagtcccgcgcgggcggtctgtattgggtcacaccgaaaatcgacaggcaatctggcgaggtgatccgtccgggccagtggttgtgcggagaagtcgaagtgctgggaactggtgagggcgacggtattgattttgtgatattgcgctggaaacccaccggaaaccggccggaacgcacggaagcgatcccggcgggtgatatcggcaaccgggaaggctgggcacgtctgagcaaccggggattgcgtgttaccgccaagccgcaactgcgggccattctcgcagaccatctgacggacagtgataccggtgaactgtggaacgttgccacgctgtcaggatggcagcacggcgtatacatcatgcctgacggtgaaatcattggtggcagtgataaacgcgtggtttttcatggtcgaagtgcgacggcatccggttacaccgtatcgggtaccgcgcaaagctggcgcgaatctgtggccgcgctggtggaaggcaatgattccatgatgctgggcgttgctgctgctctggctgcaccactggtgggactggtgggagcggatggtttcggggtgcatttctttcagcaatccagcgcaggtaaaacaacaacagcgaatattgccagtagtctttatggcaaccccgatatgctgcggctcacctggtacggtacggcgttgggtattgctaacgaagcacaggctcaccatgacgggttactggcgctggatgaggttggccagggagcagaccctaaatcagttgccacatccgcttatacgctctttaacgggtctggaaaactgcagggggcgagagaaggcggaaacagggagttaaaacgctggcgaactgtcgcagtgagtaccggtgaaatggatatcgaaaccttcctgttcagtaatggcatgaagcccaaagcggggcaactggtacgcttgctaaatgtgccgctggagaaatccaccgcatttcatggtttgccttctggtaaggctcacgctgatgcattacgcgatgcctggacaattaaccatggtgccgccggccgtgaatgggtgcgatggcttgccgaccaccagcaggaggcccaggcggccgcagtcacagcacgtgaacgctggcgtgggttaatcccggaaagctatggtgaacaggttcaccgtgttgcggaacgctttgccgtgatggaagcggcgctattactgtctggccatattactggctgggatccgcagcgctgccgggatgctattcagcataacttcaatgcatgggtgaaagagttcggtaccggaaacaaagaacaccagcagattattgagcaggcggaagagtttcttaacgcttatggcatgagccggttcgccccactgaattatgatccgcgagatttaccgatcacagagctgatggggtatcgggacaacggagaacgcttcgacgaccctatgctgttttatgtactgcccgcgacgtttaaaaaacacgttgctggtggccacaacaaagacgccactgcacaaattctccatgaagccggaatgctcaaaaagcccaccagtggtaaaaactggcagataagaacgccacggcttaaacatctcaacaacgccagaccgtggacatacgttttactttttgccccggaatcaggggaaacagaaacggattaa

SEQ ID NO: 206343 - DNA, 1713 bp, Klebsiella oxytoca
atggcgttttatacaggtgcaccactaagcaataatgctctgcctgtggaaggtgagcagcctcttttacgtacactgggaacctctgtttctgaaggattcaacgaggggccgatagtttcgtggggggaagaatcccaacttgcccggctgaatatggatcccgcagcagaacggtacagccaggaggatgcaaaacgcctcttcggtgagcacaaaattgaatcaatcaacgttccctcgtcgggattaacaaaaccctatgttgatgcggtcattcaaaatcaccaggcacatcttaaccgccagcagatcctgcagggagcaccctctggaatggttgctacgccacttaaatttatggctaatctggcggggaatattgccgacccgggaaacatcgctatcgggcttatcccctttgtcggtgaggccagagccgcaacactcctcgggcgggctgggcagtggtttattcagggaagcgcatatggtgcaatacagacggccgcaacaatgccgctggtcgcagacgggcaggcggctcagggtaacgattttaccatgggggagtacgccgcaagctttctgttcgggacgattggcggcggtattattcatgctggtggcggtattgtcgctgatgcgctccgggcgcgggatatgtccgcttcgagggtcaatgaaataccggatagccctgtcgatactccgccacctgtccgggtacatggctcagagccattacccaccgtatcggatgttatccctgattctccttcgtatctcgccagagcacccgttgatgacctcgcccgcagtattgagcgatacagggagcactatgcacaacaaacggcatacaaagatattgtcccctctcatgccgacgaccttcagcgacaggcagagaaacaaataaccggcgtaagtgatttgcagcgaagggcaaaagacctgacaacggaaggcgaatcactggatgccaccctgcccggactgataaagcagtatcaggggcaacagatgaaatacagcgaggctagggcagtggctcagcgcgacatcgataatcgtcggcagcagcttctggcggaggtggacagccttaatgcacaaatcagcgaacaccagaccggcgcgagggcagcgcaggaaatggcttctctggcccgcggcgaaatatctgaaccccttgcccggcgagtggaaaagcgagcggatgaaatcaggctatcgcttcgccagtcccccgttgcgcagggagtcaaaagcgcagcgcaaaagctgggggaagccgactggatggttcgcaatcaggcgatgcgatcggctgttgctcagatgcgaagaggggaagacgtcaacatcgaaccatttttaaatctggtggatcctgagaagaaaataacggcaattgatgacctctctgcaccccgccgtacgttctcctctccggatgatatttccgccagcgccgcaggggacaggcagataaaagcggcagctgataccggaacaacagaagatgcgctcaggcaggccgaagaaaacctccattatgaacgtcagattaatgacgcgatttttttagatgatccggcgttcgccgcgttaatgaaacagattgaccaggaggcagcagacacctccatggaaaacgcgataaaagctgcggccatgtgccgtataggaaaactgaatggccagtaa

SEQ ID NO: 206344 - DNA, 375 bp, Klebsiella oxytoca
gtgagactgaccagccgcaaaaaagagatactcagctactttgagccggataaccgcgaatgggtaacgggcgagatcggtgcacctccgtttgacgtgtccggggtggcctacctgcttcacggcatggagtcgttcgataagcgccatcaactcgaatcaactaggcgcactctcgaaaacatggtagctgatggcctactggaaagggtgacggtgtacgagcggcggcaaaaccgccagcaagggcggggtgacgctcccggcgtctggtgtaacgtgacgcgctacggacttccggggcggtgtcaggtgatgcgggatagctctggaggtgagggggcgatagatggtgagtgtgtgcgggtaggctaa

SEQ ID NO: 206345 - DNA, 369 bp, Klebsiella oxytoca
atggtgcagagccagagccaggcgacgaatctgattcggaggatgacgcagaaccagaaccagacgacgaatctgaacatgaagagccggaaacgcctgatccagatagtttaccatggggcgacgactctgaagatgacgactctgaagacgacgactctgaaggtgacgacgactctggttccggtgatggtgatgacaccgaggatggcgatggtatccctggcgccggtgatggcgactctgaaagcgatgatggcgacggtgaagagtttgaggatggcgaggaagagtttgagggcggcggcggtgatagcggtgcttcaactggttccggtgatattccagccccctctaaagaggatttag

SEQ ID NO: 206346 - DNA, 699 bp, Klebsiella oxytoca
atgtcgtctaggttgaccggtaatcagtttggtcagatcgctacctgtgtagcagctgcccgacacatggctgttcgtttcggtggcaatgtagattttggctcttttgacagttattacagcgatgcagtaacgcgccggcgtctgattgagggaatcgaagccctcttcgacgctcagcgcattggcgactcagaactgtgttatctgggtaacgtatttggccgcgatcacatgggcaaaggcgtgattatctcatctatcgaggaaggtgatatagccttccgtcctgctgactctgagaggacagtcgaccgcgtccagcatatgagcgccagacttgcagtccgtcgcgttcagggtgatatggcacgatatggccagcgccataagtccagagcgttcagaaaggtagaaatgtcagtaacgctgatgggtgaaggtgctttgtatttcggtatttgtttcgatgatgaagtaaagacaggtttcattgtgacgacgactgacccaggcgacgcaaaagagagccttcagtacgccaccgaagtcatgaaaagactcgctaacaccatcactgaagattggccgactatgattgacggcttcttcgagaaccagccagctgaaagcgaattggacgagttcagcggcattgaagcacttagaaaatcaaaccccctctggggtgcgtggtaa

SEQ ID NO: 206347 - DNA, 813 bp, Klebsiella oxytoca
atgagcgctattcattcaactggtaaagaaaacagcaacgcagacctgatcgccatgctgtcagaactcgactgtctggacgagccaaacaccggcgaagatgatgtcgttgaggtgaaaaaaacctccgccatcacaactgacgacctcttcagtgagctgcttccactggtggcagcgcctaagtcggaagtaaaaaagagcgagaaagaggttatcgcgacgttgttgggcgacattgaagatgaaatcgaggttgtaaccccaccaccagctgaagaaaagccagtcatcgaggctgaagctgagtcagttatcgagacggcgccagttatcgagccagagccggaaaaagagtccgagctggcatcggcgccagagccagcgccagtaaaaagagagcctgcagcgcgtcgtaaacgcttctcgatggatcagctttctgatgaggcaatggagagcctgggttttgatcgcaaagccttcatggatggatacaacgcgtgtccggttaaagcgatggataaggtgcagaacgtcatggcatggagccaggggttgtctgacctgagcgtctacaccataatttccgtgacccacctgattaaatcaggatcagcggataccgctgggttccgcctggctatgatgagtaacccggaaaaaccatatccatcctctaccgcctcagctcaggccgggcagatgatgagcatcctgccggtgctgggtatggcgacgaaagacggtaaaatgctcaagctcaacgaagagtcaccgctcgtcaaaaaattcaaaagcgaggcgatgtaa

SEQ ID NO: 206348 - DNA, 354 bp, Klebsiella oxytoca
ttggacatgaagcgttttttcaaaatgaaaagaccgtgcgcagactgccccttcctgaagggaggggggattcatctcgaagaggggcgtatcgagcagattaagaacgatctggttgaggatgatcagcggccattccagtgccacaaaacgacctactctaccggcggagcctatgacgaggactctgaaaaataccttccttcaggaaaagaggcgtactgtgctggcgctatggcattcctctacgccaaccgaagaatgaacgttccgatgaggttgggtttgatttatggcgcactggatattgctgatttagaagccagcgtcccgcttatcgacaccagtctctga

SEQ ID NO: 206349 - DNA, 615 bp, Klebsiella oxytoca
atgttcgcggccggcgcccacgctggtgtaggtcagaagcgcaaatataccggtgaggattacatcaatcacccgattgcagtggctgagattgtgcggaagaacggtggcactgatgagatggttgcggcggcgatgctgcacgacaccatcgaagacacccaggtcacgttcggccacatcttcagtctgtttggggatcgcgttgctgaaatggtcgacgccctcagtaataaggccgtgccagaagacggcaatcgtgaagcacgattctttattaacgtgaaagctctgcgtgagtgtctggatatgcagagccgcgttattaagctggctgacctgattcataacactgagtcgataaccagatacgaccagaaatttgccgcactgtatcttgcagaaaaggctttcatggtgcgagtgctgtttgccgacactgagatcggagtgtcggacgaagagatagggtccagagatggaaaacaccctcttcttatcgaggcggagagtattattgtgaaatcactgaggcagctgccagaggaacttttctacgaatccgaccgcatcaatgcgagtctggctgaaaagtggaaagcgctggaagcctga

SEQ ID NO: 206350 - DNA, 219 bp, Klebsiella oxytoca
atgggcaaattaaccggcaatgtggttagagttaccaagggcactggttacggcagtgatcactacgggccatgcgaactatgtggcaaacatatgtcggaggcgtttacatcccgcatggcaagagagcgggttagagacgacggctctttgtatcttgaccatgcaagtccgaaagttttcgctcatgaggcttgtatagtggatcatttcaaatga

SEQ ID NO: 206351 - DNA, 324 bp, Klebsiella oxytoca
atgtataacaaactcgcattttcagaagtagacgaatccatcgtaaacgacgctcaggaactccttgatggcaattttgctgttatcgatcagcgtttcgtcgttgagctgctgctgattgacgacagcatccccgtcctgtctatcgccaaattagatgggcatgagctgacagatccgacagcgtttagcacgcacgattacaaagagatgccaaagcgttatttcactggcgaagagattagcgactctgccaccgaagcgtattactcgatgatccgccatcgcaatgttgatgactttttggggatgttcaccagctaa

SEQ ID NO: 206352 - DNA, 534 bp, Klebsiella oxytoca
atggacaagacagacttcacatacggcattaatgcagaaaaggaaagagatctctcctttgtcatgtcgtacttcaagcacattcagcgttcgaaattaactataagggtcgtggcagcgaacggtcagacgttttcgatgcgtgttactgggttcgacatgaaagccagccgcgtctacctcagtccgatgtcagacgacatgaaagccaaccgcgtcattatccccgttgactacatcatctcggtagaagtcatcgcagcctctgaggtcgacaccacctataagggtcaaacgacactcaagcgcggggatttagaggatgagggctacatacgctcaggcaaggacttctttcaggtaatccgattcgcgcaccagcagaataagtctataagggtctatctctcagataatcgggttttggaaggtgcgtcgaccggcatgaatgagcaatcggtaggtataaggctttcggacggaaagaccatccaagtatactatgattgggtcgaccgaatcgttcctctttaa

SEQ ID NO: 206353 - DNA, 153 bp, Klebsiella oxytoca
atgaagcgtagacttatttttgtgatgttaatcacaaaaaaagagttcatcaaaaacgtaatcgctatccaggaagagatcatgaaactgcttaataaaatcgtcgctttcttcagtgctatgaacgtaaccttcggtacgttcaaccactaa

SEQ ID NO: 206354 - DNA, 2529 bp, Klebsiella oxytoca
atgcgtaatctcatttattccgatttaacgcccaaaggattatctcttttaataaagcgggccctctattctgtatgtatggtattttctttatcaacgtcgatttatgccattgaatttaatacagatatgatcgatgccgaagatcgggaaaacgtcgatctctcgcaatttgaaaaaaaaggctacatccctgttggtacctatttagtacgcgtacaaataaacaaaaatacgcttccgcgcgcctataatctcgaatggataaaatcggataatgaaaatgggtctctgctttgcctgactcaagaacatctaacagaatttggttttgcggatgcgtttatcttgtctctacagccgctgaacccgcaaggttgcctcgatctgagccataaatcggacctggtcactcgcctggacaaagcgaatatgatactaaccttaacggttccccaggcgtggatgaagtatcgggccaaaaactggaccccgccggagttctgggacgtgggggttactggttttatcatggattataacctctacgccagccagtatgttcccagccatggcgacagcaaccaaaacgtaaatacctacggtacgctgggtttcaacttaggcgcatggcgtctacgcagcgattatcagtacgatcagtcgtttactgaaaataactccaacggcagcaacagcagtctgccgcgaacctatctgttccgccctattccatccctggcgtcgaaactcaccatggggcagtatgatctcagttccgatctctacgatacgttccattttaccggcgcttcactggagagcgacgaacagatgctaccgccggacctgcgcggatacgcgccgcaaataagcggcatcgctcaaacaaacgccagggtcaccgtttcacagaatggccgtactttgtatcaaacttccgtttcccccggaccgtttacaattaccgatctggggaccacgttgcaggggcaactggatgtcaccattgaagaagaagatgggcgtaaaagcacgtttcaggtcggttcagcctctatcccgtttctgacgcgtcagggccagatacgttataaaagctccgtgggcaagcctacatcaaccacccacaacgacattaacaacccactcttctggacgggagagatttcatggggctggctgagcgatatctctttatacggcggcgcgatcgttaccgccgacgactaccaggcggcgaccagcggaatcggctttaacctgaatagctttggctccctctcctttgatgtcacacgggcagaggccaatttacgcgatgacaatgaaggcaagcagcgtggcttcagctatcgcgcaaactattctaagcgcttcgaggaaacgggcagtcagataaccttcgcgggttatcgtttttcggataaagaatatgtcacgatgagtgaatatatcaattcgcgtgatggtaacaataccaacaataatgaaaaagagagctatgtcctctcatttaaccaatatatcgaaccgttggcgctaaacagctatctgagcattacgcgcaatacctactggaatagtgataccaataccaactattcattctccgttagccgcaactttgatattggcgatttcaagaatatgtccgcctctctggcaatgagccgcgtgagctggggcgatgatgaagaaaatcaatactatttctctatttcagtaccatttgaaaacaaccgcaatgttacctacagtttgcaacgctacggcgacgacgccgctacacaaactgcaacatactatgacagttcggaccgcaacaacacctggaatttatccgtatctggcagcgataaagactatagcgatggcgaagcggccttgcgcggttattaccaacactactctccctggggccggctaaatgttaacggcagcgtgcagcccagcaactatcgcacattaagcgcgggctggaacggttcgtttacggcaacgcgttatggggcggcattccatgattatagccccggtaatagttcccgcgtcatggtggatgcggatagcatctctggcgttgaagtgaataacaatcgcagtaagactaatatatttggtatttccgtggtcccatcggtgggtaactatactaccgccacggtaatggtaaataataataacctacctgaaggtgtcgatgtcactaactcggttattcgcaccacgctaaccgagggagccattggttatatgccgctcagcgcgaccaaaggctatcaaattattggcgtcatccgcctggaagatggacgctatccgccgttgggcgttaccgtgacagataaatcgaccggtcgtgatatcggactggtggccgatgatggcttcgtgtacctcagcggcgtgcaggaaaatagtatcctgacgctcaaatggtacgataaagcctgcgacattacaccacctaaccacagtaatgctgatggtcaggccgttattttaccgtgtaagtctcaacattaa

SEQ ID NO: 206355 - DNA, 381 bp, Klebsiella oxytoca; identical to SEQ ID NO: 206320

SEQ ID NO: 206356 - DNA, 381 bp, Klebsiella oxytoca; identical to SEQ ID NO: 193288

SEQ ID NO: 206357 - DNA, 303 bp, Klebsiella oxytoca; identical to SEQ ID NO: 96991

SEQ ID NO: 206358 - DNA, 381 bp, Klebsiella oxytoca; identical to SEQ ID NO: 206320

SEQ ID NO: 206359 - DNA, 141 bp, Klebsiella oxytoca
atggatctcaagacaacgttgctgataaagctgtccgggctgtgctcaaaattgagcagaatattgaagaagctgcctacatcaaacagcgccgtgattcactcctcagtgcgcgcaacgcagaacctgaaattcccctga

SEQ ID NO: 206360 - DNA, 1407 bp, Klebsiella oxytoca
atggctaagtataaggcgtatccggagtataaggattctggggttgagttgttaggtgaagtaccgctgacatggcgcgtatttaaattaaaatttggtttgtctgaaccactggtttatggggctaatgaggctgcattagacgacaatccagataaccctcgttatattcgcattacagatatgaatcccgatggtactttgcgtaatgatacttttaaatcgttacctaaagtcatatccgaaccatatatgttaatcgatggagatatactgttagctcgaagtggtgcgactgttggtaaatcgttttattataaatctatttttggaccatcttgctttgcaggatatttaatcagagcgagatttgatggtgataaaatagttccgcgattagcatactggtttttccaatcatcaatatactggcaatatgttagtggtagtcaaattcaggctacgattcaaaatgttagcgcagaaaaatattccgatttgtatctatcagcgccgctagggtacgcagaacaagcactaattgcggacttcctcgatcacgaaaccgcaaaaatcgataacctgatcgagaagcaacagcaactgattgaactactgaaagaaaaacgtcaggcggtgattagccatgccgtcaccaaagggctaaatcctgatgtgccgatgaaagattctggtgttcggtggttgggggaagtacctgcgcattggataaagcagaaattggttaatgtttcagaggggtcaagaggaagttttgttaatgggccatttggcagtgacttgcttgctgaagagcttagagatcatggcgtgcccgtagtatatataagggatattaaacctactggttactcccgaaagagcactgtatttgttacaccaatgaaagccaagcaacttgatgtatgcaaacttgagcctggaaatgtcgtcgtttctaaagttggcgatcctcctggggatgcatgtgtttatcctgttggagaaccgagtgcaataatcactcaggatgtaatacgaatcagagtaaatatggcgcagtttagcccggagtttattgtttatcttttgaactctgattttggccgtatggtggtcaatgatataagtgttgagggtacaagaaaaagagtttcacttggagatttcaaatctacaagatttgtgtttccaccgcttaaagaatcactagatattgttagatatttaaatagtgaatgtgaaaagttgagctgcactattgctaaagctactcaggcagtcgcttttatgcaagaacgccgcaccgccctgatctccgccgccgtcaccggaaaaattgacgtccgcgactgggttgccccggatacacaggatattgaggagccacaggaggccgccgcatga

SEQ ID NO: 206361 - DNA, 1359 bp, Klebsiella oxytoca
atgatgatccaggtccgggagtatgcgctgctgacttgtgataactctcaaccagcgagtatggatttggggattgtctctgaggcaaccttttcctggcttgagcaattgcaacaaaagtggagtggtacctctcaaattctcagccgggaagggaagcggtttttgcgtttgggaagctatgtcggttatctacaatccccgaatggtgactcaatcgaaattctgccaaaaaccacacttgaagctcccgctgagatagtagctcttcgccagcttttacgtcgaatgctaagtgcctctataggaattacacctcgagaggcgaaccaggccgtattgcaacgtagtgaccagccgttacatgaatggataatcagtgagtttttacgacatcttgctgatttggtgcgcaaaggactacgtttcgattatcaccttattgaggacgaacatagcgcgttcatccggggtcaattgaatgttactgcacaaatgagaatgcctccgggcagagacgctcattttcatgtgcgctatgcggagttctcccctcagcgcatcgaaaaccgtctgttacggacggctttggatttggtgcttaaaataaccatacaagggcagagctggaggcaagcaaattcccttcgtcaccaactggatggcatagagccgatttgtggcggtacaacacaaccgatgggacaatggagcgacggtaaatatctcctcggctatcgcaccatcaagccatggtgccaacttattctggaaaaactgaatccggattttcagcatgggttacatcaggggatctcgctattgttcccaatggaaaaactgtatgaatgctgggttggacgtggtttaaccttatctttgcatcacgattatcagcttatcgggcaggcaaaacatcattatttactagaacattcacctgctggtgaaagtgtttcccagcaatggttcatgcttaagcctgattttctcatcataggaaaacaggcgatagtactggatgctaaatggaaacttttagacagccggggagataacagtcagaaaaagtatgaaatcagccaggctgacctatatcagatgtttgcctatggacaaaaatatcttcaaggaaagggggatatgatgttaatttatccgcatcaccgatcctttgaaactccgctaccggcctttcgctttgatgaaaatttatctctatggtgtgtgcccttcgatcttgaatccggtgagttggtacaaggtgagtggcaaggttcaatccactgttttccccgtaacgaggcgataacggcccatgatgatcaacctagtaatcatgaatttattgagtgctaa

SEQ ID NO: 206362 - DNA, 345 bp, Klebsiella oxytoca
atgatcatcaatggcatgttctgggtgttgtgctctggtgccccatggcgtgatttacctgaacgatacggcccatggaaaaccgtatataaccgctttaaccggtggtctaagtcgggtgtgattaatattattttcaacaggttgctttcttctcttgatgctcacggcctcgttgactggtcagctactgcgctggatggcagcaatatccgggcactcaggtgcgccgacggcgcgcaaaaaaacatcccgatatcgccggagatcatgggctgggtcgctctcgcggtggttttggcaccaaaatccatatggcgacggatgcaggcggtctcccgttaa

SEQ ID NO: 206363 - DNA, 624 bp, Klebsiella oxytoca
atgacaattgatgtaaatattctgagtattagcatcatttgtgtggttattcggtttgtgtatgttgctagcttccgagtgacaagacatcagtatgtcacgggtaaaaatgccactgccaaaagcatcaaaaaactaagagaactgtcggctttacatcatgtaattaagaggttgttccctaaagtagacacgcacaaagggttattaagaataatcgtgcgcaatagtgcgcattccttacaggaaatggaaagagctgccctcatgttgaatgacgatgttgatggcggttcggaacaacataaagatatttttgaatctgcatcacttgcatactgcaatagtttccaagtcatatcaatgatttctcaaataattgttgaattagaaccattgcataaaaatggcgtatttattgaagaaatgtatagctatttaactgagaatggtgtatttgaccacgaaaatatgctgaaagcagccgagagatatggatcagagaccgccgtgatggcgcttacagcgttcctgagtcgctcgggggaaggtttgacattacttcagaaacgggtggaagcaaaatcatttggacaactggtgggagggagtttacctccttaa

SEQ ID NO: 206364 - DNA, 738 bp, Klebsiella oxytoca
atgacccgcgcgtcatcgatgtttatctggggcactgaggagaaaagcatgctgaaccttaccgattacgcggtttcctacggccagagccagattatacaggggctgaatctgtcgattgcaccgggtgagattgtggcgctggtgggccgcaacggcatgggcaagactacgctgatgaagtcactgattggcatgatcgaaagccgtgtgggaaaagtgttatttgacggcagcgatattatttcgctggccagccatgagcgcgtgcatcgcggattaggttttgttccgcaggggcgtatggtttttgccaccatgacggttgaggaaaatatcagaaccggcatgaaatccgccagagacacccgcgtacccgaccatctgtatgactattttccggcgctgtgggatttacgtaaacgcatggccggaaatttatccggcggccagcagcagcagctggttatggcccgcgcgctggccgggcaacccaaattactgttgctggatgaaccaacggagggaatacaaccctccattattaaagagatggcgaaaatacttcgccgcattcgtgaccaggaaggtctgactattttggtctctgaacaggtattaagttttgttctggatgtatccgacaggatcgtagtgatggaaaaaggacacatcgtacatcaggaacaacgtgaacatgccgatcgcgaaaagatcgcatcttatcttgccgtttaa

SEQ ID NO: 206365 - DNA, 750 bp, Klebsiella oxytoca
atgaaaaaatccaaccgggaaattatcctcgccgtagaagggctgacggtgtcatttaacggatttaaagcagtagatgatttttccatgtacatcgatgaagggcaaatatacgtgatcattggccccaatggagctgggaaaaccacagtgctggatcttatttgcggaaagacgcggctgaccggcggcagcatcaaatttaaagataaagaaatcagccgaatgaaagaaaataaaattgtgcaaaccggcgtgggtcggaaattccagaacccgtcgatttatgaaaatctgacggtatttgaaaatctggaactgtcgtggccgaaagggagaagtgcatttggcgcgatgttctttcgccgcaccgacgaggttattcaggccgtcagacatgtcgctgaggaaatcttcctgactgatttcctcgacgtgcaggccgacctgctgagccacgggcaaaaacagtggctggagatcggcatgctgctgatccagaaccccagcctgctgatgctggatgaaccggtcgccggtatgtcggtgaacgagcgggaaaaaacggcacttctgctgcgcaaaattgcagctcgacgctcggtcctggtaatcgaacacgatatgcagtttgtcgaagatatcgccgaccacgtcacggtaatgcatcagggcaaggtgctatcggaaggcagcatcagcaaggtcaaaaatgacccgcgcgtcatcgatgtttatctggggcactga

SEQ ID NO: 206366 - DNA, 1128 bp, Klebsiella oxytoca
atgaaacaacttaaaccgtatccgtttgttggtcttgccctgctggcgctcctgctgctggtgatcatgccgctggtgctggatatctttcgcctgaatctgatggggaaatatctgacttatgccttcgtagcggtggggctggtgctgtgctggggttacagcggcattctcagcctgggacagggcgtattttttggcctgggcggatactgcatggcgatgtttctgaagctggaggcatcgaccccggccgatacccgaatgcaaaccacaccggggatccctgacttcatggactggaaccagctgacggccctgccttcattctggtacccgttccattcattcggattgacgctgctggccattctcatcgtcccgacgattttcgcctggatcctcggcagtgccatgtttcggcggcgtgtcggcggcgtgtactttgccatcatcacccaggcgatttcagccattctgaccatcctgattataggtcagcagggctacaccggcgggatcaacggcatcaccgatctgcgcactctgcttggctgggacattcgcaccgacagcgcgcgctacctcttgtatttcgtcaacgccgggctgctgatgctagtgctgatggccggctattttatcgttaacagcaagtttggccggctgatggtcgccatccgcgataaagaagatcgggtacgtttttccggttacgacgtggcgagtatcaagacgatggtgttctgcatcagcgcgctgttctccgcgattgggggggccatgttcaccctgcaggtcggctttatgtcgccggggtttatcggcaccgtggcctccattgaaatggtgattttctgtgcggtcggtggccggggttccctgctgggtgccgtttttggggccttaatcgtcaatgcagccaaaagccgtatatcagaaagtttcccggaactgtggaccatcgcaatgggaatgttgtttatcggcgtggtactggtgttccccaaagggctggcggggatttatcagcagcatgttcagccgcggctggcgaaatatattccgggaaaaacagcaagaaaaagctggaataaatcgaaggcgaattcgggagcagcaaaatga

SEQ ID NO: 206367 - DNA, 3354 bp, Klebsiella oxytoca
atgaccgttcagcaaaaagcattcaagtcccggcgacagtacaatcagtgggtgaccaaccagacgctggaggatttcgcgctgcgctacacgccgctttcggcgaggcgctggagtgcagggcgggtggtgatgaccgcactcagtgcgattacctttcttgcgctcgaggccataggaggggcgctgacgctgacctatggtttcagctatgtggcgcttgccgtgctgctggtcagtttgatcatctttctgctgtcaatgccgatagcggtcacggcggcccgcaacgggctggatatcgatctgctgacgcgcggggcgggatttggctatctgggttccaccgtcacctcgctgatttatgcttctttcacctttattttctttgccctcgaagcggcgattatggcgatggcgctgaatatgctgtttgggctaccgctgcactttggctatctgatagggtcggtagtggtgataccgctggtcacctggggatttacatttatatctcgttttcagcagtttacgcacgttttctggctgctgctgcagctgctgccgtttgtgatcatcctgttgcgtgatagcggagcggttagccgctggacccactatcagggttttatgtcggcgaacgggtctttcgatttgctccagcttggcgccatttgttccgttttgctgtcactggtcagccaggtcggcgagcaggtcgaccaggtgcggtttctgcctgcggcacagcctggcaaaagctggaaatggtggtgcggcgtaatagccgcagggcccggctggatcgtgattggcgccgtgaaaattatgctgggctccttcctcgccgtgctggcctacgagaacggatttggcaccgagctggccgtggaacccacgcatatgtatatggtggccttcagctacgtcaccagttcatcttcaacgatgctggcactgaccgggatctttgtggtgctctcccagctgaaaattaacgtcaccaatgcgtatgccggttccatcgcctggtcaaacttctttctgcgcctgacccatcggcatccgggacgggtggtgtggctctttttcaacgtgggtatcgccctgctgctgatggaactgggcgtttaccgggtttttgaggatatcctgggtatttatgccgttgcggccaccgcctggcttggcagcgtggtggcggatctgacgctgaataaatggctggggctacggccacgcgagatcgagtttcgccgcgcctacctgtatgacatcaatccggttggcatcgggtcaatgtgtctggcgatgctctgcgggttatcggcactgatgggctggttcggcccgatagcccatgcttatgcctcgctgctgtcgctgctggtgacgtttgtcgctgcgccgctgatcgcctggtcgaccgggggccattactatctggctcgctcccccgtgaaggcaattgttgatgagtgctgcatttgcggcaaccatttcgagaaaccggaaatgagctattgtcctttctatcagggcagcatctgttcgctgtgctgttcactggatgtgcagtgtaacgatgcctgtaaacctcaggcgcgctatggcgagcagctgtttaattttctgagttatttcctgcgaggaaaaatgctacgggcgatcgatcccagagtctggagcttcctcagcattttactgctgttcagttcggtcatcggtattctgctgatgttggtttttgtgcagatgcgcaccgcgttttccggcgaagcggaactgctggccgccgcgctgtggaaggtcttcttcattctgctgattgtcaccgggatcaccacctggctgtttgtgttgaccaataaaagtcgccagattgcacaggaagaactgcggctgcaaagcgaccggttactgaaggagatcattgctcacgaggcgaccgacgggcagctgaagcaggccaaagaggctgcagatgaggccaatctggcgaaaagtcgctatctgaccggcattacccacgagctgcgtacgccgctgaatgccatgctcggctatgcgcaactgctggaaaaagccgatgatatccccccggcgcgaaagcgcggcattggtattattcgccgcagcggagaacacctggccaacctgattgaaggcctgctcgatatctcaaaaatcgaagccggtaagctggaaattcatcgcgaaggagtacgcattggcgagttggtgcagcagttggtcgcgatgttcgatcagcaggccagtgataaggggctgacctttaactacaaccccccacactgggtaccagacgtggtaatgactgatgaaaagcgcctgcgccagatcctgattaacctgatgtccaatgcgataaaattcaccgatcgtggcgatgtgacgctggacttccagtatcgtagcgaagtggcttttttctcgattcacgacacggggatcggtattgatgaagccaatcttgaacgcattttcaaaccctttgaacgggtatccgaagacagcggccgggtgggaaccgggctgggcctgactatcacccgcctgctgacctatatcatgggcggcgatctgcaggtcgaaagtgtgcgtggtgccggaaccacctttaagctcagcctgatgctgcccagccacagtggggtgagctatgtaccagcggaggcggcaccggtggccggttacagcggcccgcgacggcgagtgatggtggttgacgatgacgaatcacaccgtctgttaatgaacgatctgctgaccccgctgggttttattgtacacaccgccagcagtgcggcggcggccatgcagcttagtgtggagacggtgccggatatctggctgctggatgtggcaatgccgggaatgtcaggctggcagctgctgaacaggttgcgtacccggggagacttgcagccggtgataatggtttcggcagaggccgatgagggtaagtggcggaacattaaaaaccgcggtgaagttcgctatctggtcaaaccggtgcagatgctcctgctgctggaaaatatgggtgaaatgctgaacctcgaatggatccgcgagggcaccaccgtggcccgcgtggcgggcacggcggcaaaagctacgctgtctgcgcagcaccgccgcgagctgattgaggcggccagcctgggctacgtcaggggctttcgggaactgttgagccgtatgcgcgacgaagggcagatcggtctggccgaggctgagcagttagaagagctggcagggcgttttcgctttgatgaaatagtcagtaacctgaacagatccgcaggagatcgagatgacagcctctaa

SEQ ID NO: 206368 - DNA, 906 bp, Klebsiella oxytoca
atgacagcctctaaacccaccgtgctgattgttgatgacgatatcaatacggtcagcatgctgaatgataatctggacgaggcgggttttaccgttctggtggcgctggaagggaatcaggcgctgtcggtcacgcggcagatcacgccggatattatcctgatggatgccgttatgccgcaccttgacggctatcagaccagccgctgcctgcgggaaagtccggggctgcgctatacgccgattatctttatgaccggtctgagcgaaacagaaaacattgtgaacgcgtttgatgcgggcgtcgtggattatgtggtgaaacctatccgcattgaagagttgttggtgcgaatgcgcacccatttgcgaaattccagactgaccgccagcgcgtggaatgcgatggattttgtgggccagtctttgtgcgtttttagcgctgaaggcaagctgctgtgggcaacgccgaatgcctggcaactgattaaaacctgctgtgatgcggatttccagccgagccgggcggtggtgcagcgtttgctcagctggttgagcaacgcgcaggccgtgatgcatcccctcgacctttcactgttgtcgctgcccgtcagggtattctggtcgcgccagacggcagataatgagtatctgctgcgccttgaagaggtggttgagcaaacggacgggcaggaaacggacgctctgcgcagcaggctgaagctgacgcagcgagaggctgaagtgctgctgtggattgcgcgcggtaaaagcaataaagagatcggtgaaatcctggagctcagtccgcgtaccgtcaacaagcatctggaactggtgtatcgaaaactctgcgtggataaccgcacagccgccgctgcactggcactgaagcaagtccggtga

SEQ ID NO: 206369 - DNA, 585 bp, Klebsiella oxytoca
atggacgtaaaacagttgcaggctctggctaacgaactggccaaaaatatcaaaacccctgacgatctcaaccagttcgatcgcctgctgaaaaaaattagtgtcgaagcagtgctcaacgccgaattgacccatcacctcggctacgataaaaatcagcccaaaccggcgaccaacgcccgcaacggctataccaaaaagaccgtcatcactggcgatggcccgctggagttccgtacgccacgtgatcgtgatggctctttcgaaccgcaactggtgaagaaaaaccagacccggttcaccgggatgaataaccagattttatcgttgtacgcaaaagggatgactacccgtgagatagcggcggcgttcaaagaactgtatgacgctgatgtctcaccggcgctggtctcgaaggtcaccgacgccgtgatggggcaggttagcgaatggcagaatcgtctactggatgcagtctatcccattgtttattttgactgtatcggcctgaaagtccagcagaacagtcgcgttatcaataaattcgtgatcctgccgctgggtatcaatatcgaaggccaataa

SEQ ID NO: 206370 - DNA, 381 bp, Klebsiella oxytoca; identical to SEQ ID NO: 206320

SEQ ID NO: 206371 - DNA, 303 bp, Klebsiella oxytoca
atgaaaaaaagaaatttcagtgcagagtttaaacgcgaatccgctcaactggtccttgatcagaactacaccgttgcagctgcggccagtgctatggacgtggggctttctaccatgacgcgatgggtaaagcagttgcgggatgaacgacagggcaaaatacctaaagcctcccctataaccccggaacagattgaaatacgtgagctaaagaaaaagctacaacgcattgaaatggaaaacgacatattaaaaaaggctaccgcgctcttgatgtcagactccctgaacagttctcgttaa

SEQ ID NO: 206372 - DNA, 573 bp, Klebsiella oxytoca
atgtcaaaaacaataaagagcattgtattatcggaacctgaaaacatattcataaaaaaaataccttatccgcttaagccgcagaatcatgtcttgataaaggttgaatctgtcggtatatgcggctcagacattggcgcctatcgaggcacaaacccattagttacatatccaagaataattgggcatgaaattgttggcactattatagaagccggcgatggtcttcctgaaaacattaaagtgggagatcgagttattgttgacccttatatttactgcggcacctgctatccttgcagcataggcagaacgaattgttgtgagtcattaaaagtcatcggtgtacatatagatggcggcatgcaagaagtctgctcccatccagcaaaattagtccataaaattccgcataattttcctgtggagcaggctccattaattgaacctctaacaatagcgctccatgccttgcatcgagcaaaactaatcccgggtgagcacgttgttattatcggcgcaggggcaattggcctcatggcagcactggttgccatgggctttgttgaataa

SEQ ID NO: 206373 - DNA, 456 bp, Klebsiella oxytoca
atgtcgctgccgctcagtgacaccctgagcttcaatacggagaccttcctcacctggtctgaccgccacgacatgatggccagcttcggggtgaccccggagaaggcggcccgcacgtcgttccgggcgcaccgggcgggagggggggcgcggggtgaccgcgcagtgggggctggactggcagtacacgccgcaactgaggttctcgggtggcgtccgcgtgaccggactgacggctgcggcggcgaaaaacagccctctcgtggagaaaaacgtctcgggcgggctgttcatgaacgccatgtaccgcttctgagggcatccgatagctgctcattcatgaagtccatcgaccagcattcattgctgctttcaggcaccgcaagtggttcaggcttgtctcgtttcagtcgtttctttggcttaattcacatgttcagagacaacccgcagtaa

SEQ ID NO: 206374 - DNA, 381 bp, Klebsiella oxytoca; identical to SEQ ID NO: 206320

SEQ ID NO: 206375 - DNA, 405 bp, Klebsiella oxytoca
atgttttctaaattctcagaaaaccttataagagtggctgccttatttgaatatttcgacggtgacaattcaggagttatttcctcaaagaatgttgtaaacgcctcaaagattgtgattttttattattcttacttactaacttcgggtggtttacgtagtgaaacagtggatcagaatgctgatttactctatgcctggctggtctctcgcaaagataactactatagttataccacccatataaacaaaatggaaataagaagaaaaggaccttataaattgagaaataaaatcaaactcaacgccgctttagaattccttgaacaagaaggaaaagtgggtattcagaaattgagaaacaacaatggaactatgggcgaaacaatcgttatcaatcgataa

SEQ ID NO: 206376 - DNA, 381 bp, Klebsiella oxytoca; identical to SEQ ID NO: 206320

SEQ ID NO: 206377 - DNA, 1845 bp, Klebsiella oxytoca
gtgaacttgcttggcgtagttgatgtttcgctgcttagcggcaacaactttgactttaccgtcgcgagtggaacgactcaggatgtggtgctggatatttccggcgggacaacgctgagttcggcggcactgatcaatacgctgctgcttctgctgggcggtaccgataccttccaggccgatctcgcggtggtgaatacggcgaccggcgaagtggttgcgttggcgtcgaatgcggtgactatcacggcgggaggcgtcagcctggattacagcggtggcgccagcttcagcgatctgccggaaggtaactatacggtggtgatctcgtcgccgacgaataccggactgctgccgacgctggtgaacttcctggcaaatatcagcgtggtgaccgcggtggatgttgcggtaaccgattccgtaggatacgagtccgcgattatcagcggtaacgtcctgcagacggatgctggcggggatgttggtgatatcggtacggatattaccgtgactagcatcattgcgacttcggtgccgggggcaacggcggaaacggttagttcaggtggaacgattgtcgagggcgcctacggtacgctggtgatctatgccgatggttcttacacctatcacgcgaccggggacgctgattctgtcggccaaacggaggtctttacctacaccattacggatgcggatggtgatacggctaccacgacgctgactatcaatattggtctggctgatgatactgatagcgatgcggattcggacagcgattctgactctgacagcgattccgattctgacagtgattccgactctgacagcgattcggattcggacagcgactcggatagcgacagcgattccgactctgacagcgattcggattcggacagcgattcggactcggacagcgactccgattctgacagtgactcggattccgacagcgattccgattcagacagcgactcggattcggacagtgactcggattccgacagcgattcggactctgacagcgactccgattccgacagtgattctgactccgacagcgactcggattctgacagtgattcggactctgacagcgactcggactccgacagcgattccgattctgacagcgattcggattcagacagcgactccgatagcgatatcgaggctgtaccggatagcaacagcccggatgtggtgactcaggacggaaacctgaataacgtcagcggcaccagcggtcaactggttggcctgacgctactcagcaccgtcgatgtctcgctgctgtcgggcaataatctgcgctttagcgtgggttccggaaccgttgaggatatgacggtgtcggtgaacggcaactcgctgctcacggcgagcggattgctgaccaccatcgtcaacctgctgggggctggcaacaccctgagcgccgatctgtcggtggtgaatacggtcaccggcgaagtcgtggcgattgcggaaaacagcgtctctatctcggcgagcctgcttggcgggctcacctatagcggcacggcgtcctttgccaatctgccggcgggcgactacaccatgattatctctgcaccggaaagtaacggcgccctggtatcgctgatcaacgcgctggcggaggctcaggtagcaagcttcgtcaacgtggacgtgacggactccgttggctatagcgtcggcgccattgaaggaaactggattggcccctatatttccagacactttttatcgcttaacccattactggttcgccgccgcagatattcccgtggcgaacgatatcccagtgcactgtgcggatgccattcgttgtaa

SEQ ID NO: 206378 - DNA, 321 bp, Klebsiella oxytoca
ttggtatccgcgttggcctgcggaatatctgagtcgctgtcagagtcggcatcgctgtctgaatccgagtcgctgtctgaatccgagtcactgtcagagtcagaatcgctgtctgaatccgagtcactgtcagaatccgagtcgctgtccgaatcggagtcgctgtcagagtccgaatcactgtcagagtctgaatcgctgtcggaatcggagtcgctgtctgaatccgaatcgctgtcagagtccgaatcactgtccgagtcggagtcgctgtggattggcccctatatttccatacactttttatcacttaacccatga

SEQ ID NO: 206379 - DNA, 381 bp, Klebsiella oxytoca; identical to SEQ ID NO: 206320

SEQ ID NO: 206380 - DNA, 381 bp, Klebsiella oxytoca; identical to SEQ ID NO: 206320

SEQ ID NO: 206381 - DNA, 2397 bp, Klebsiella oxytoca
gtgctggacaacaccgccagcggcgatatgcaggacagcggccagggcatcacggtcaccagcgcggtatcggactccgttgacggatcgaccgcagtgaccgtgaccagcgctggcgtcaacgtcacgggggcctatggcgtactgaccattcactctgacggcagctatagctaccagttgaccaaaggcggagccgctgtcggtcaatcggatgtctttagctacaccattaccgatgcagcggggaatacatcgaccacttctctgacgatcaatattggaggaaatatcgaaccggcgcaggccaatccggatgcgcaggagacggacctgaccgcgacgttcgataatcttaatggcgaaagcggtaccgtcggacaactggtcggcgtctcgttactcggtaacgtcaatgtaggtttgcttaacggcaatagttttgactttgacgtcgccgccggcgcgaacgaaaaagtgctgctcactgtctcggggagcactggcctgagcctgggcgcggccttgagcacgttgctgagcctgctgggcggggcatcgtcctttacggcggatctctcaatcgtcgataaggcgaccggcgaagtggtgcaggttctgaccaacgccgtcaatattaatgttgacggactgggtctcagcctgggctacagcggcggcggctggtcctcaatgttaccttcaggatcgtacacggcggtggtctcttcaccgaataccggcggcctgttgggcgcgttgctggacctgaacctgggcacctttatcaacgtgtcggtcaccgactctgagggctatcacaccgacagcctgacggggaacgtcctgcaaagcgacggcgacggcgacgtggcggactccggggtaaatattaaggtgaccagcgtcaccgccacctcggttaccgacgccgatccggtggcggtcaccagcagcggaacgacgatagccggtgcctggggatcgctgaccattcacagcgacggtagctatacctatcagccttatggcggtgtgaatagcgtcggccaatcggaggtctttacctacaccataaccgacagtctgggtcacacggcgagcacgacgctgacgttcgatatcgacagcccggcttcgctggcggtgaatgacgtggttgcgctgaacgtggcaacggcgctggcaacggtgaatgttccggcgattgacacctctgggctgaacaccagcggtaagtcgagcgggagcggagtatcagcgagtaagttgattaactttagcgtgggggccgatcgcgaaatggataccctctcggtgaatgtgaactacaccgcgagtggctcagtggtcaataccgtcaggattgacagcacggtcagcatttatcacgtactcagcgatggcagtaaggtcctggtatggcaagggacgccgacagaaagcttgaccacgattatcggcgccacagctagcgctacggatacgctaacgctaacgggtgtggcattgagcgaaggaaattacgagatggtcctggcttctaaagctactgccactctggataatttcgtcaccacaccaccgaactatacggtaggcgcaacgatcgccggtacgacgatcgataccgcaacgcattatacggtggcaggaaccaacgtcagcgggaatatccagaacggaaacaactcgggcggtacggaagatttccatggcgtgctgtatgcctcatacaccgtcgccggacatacttcctctggcagtgccgaatcctggaccttccacagcaacggcagtatcaccaccagcgacggtagtagcgtaagcgcaaccagcgtcacaatttacggtgactatggcaacctgacgatggcgaataatggttcttatacctacagtctgaatgcaggtctggatgtatcgacaatcacccacaaggaggtctttgcctacacggtgaacgacagcaatggcggctcttccgcggcgacgctgaccatcgatctgcatccgcagattaccggcagcgtgaacggcgacgatattcacagcaccgcttatgacgataccttcaccctgggtatcggggccgacacggtggtttacaacctgctggctgatgacaatagcggcggcaacggcggcgatacctggaaggatttctcggttgcgcaaggggatcatatcgatgtgtcggcgctgctggttgactgggatggtaacagcagcagcctgggcaactatgtgaccctgagctacgttggcaataacacggtggtatccatcgaccgcgacggcggggccggagaccatcaatcaacaaccttaattacgctggaaggggtgcatatcaattcgctcaacgagctgattgatacgaataactccaactaa

SEQ ID NO: 206382 - DNA, 381 bp, Klebsiella oxytoca; identical to SEQ ID NO: 206320

SEQ ID NO: 206383 - DNA, 417 bp, Klebsiella oxytoca
atgattgccctggttattttgttctatatggactggaagctactggataaacatggtaaggcaagtttttcaaaatggtggattcttttttcgccagtttatattgctaaacgttgtaaagccgttggtcaggggaaaatgctgttgctggtctggcttggggtctggattgtatatggcatcgggaactttgcattcaacggtagcaaagcgatgctggaacgtacagcatgtgaggtggtaacggatatctatcataaacagttacgtcaatactcacagcaatgtgagaacgtaacgttaactgaaagtgaagggaaacagcactatggatttgctcaacttagtgatggtacaactaaagatattaccgtgaaagaacaattagatggtaagattgttgtatatattgaatag

SEQ ID NO: 206384 - DNA, 417 bp, Klebsiella oxytoca
atgattgccctgattattttgttttatatggactggaagctactggataaacatggcaaggcaagcttttcaaaatggtggattcttttttcgccagtctatattgctaaacgttgtaaagccgttggtcagggaaaaatgctgttgctggtctggcttgggatatgggttgtatatggcatcgggaactttgcattcaacagtagcaaaacaatgctggagcgctcagcatgtgaggtggtaacggatatctatcataagcaactacgccagtactcacagcaatgtgagaacgtaacgttaactgaaagtgaaggaaaacggcactatggatttgctcagattagtgatgggacaactaaagatattaccgtgacagaacaatcagatggtaagattgttgtatatattgaatag

SEQ ID NO: 206385 - DNA, 321 bp, Klebsiella oxytoca
atgcagtcggctctgttaccgccaccagcgcagcaggcgatggcgagggccgctctccactatcgttttggtgaagaccaccagcccgtcactactgctcagatactgacgccacgtcgttacgaagaccgcagtgacgacctctggacggtgtatcagcgggtgcaggagaacctgatgaagggaggactcgcggggcgcaccgcacaggggcgaagcaaccgtacccgtgctgtgaacggtatcgatggcgatgtgaaacttaatcgtgcgctgtgggtgatggcagagaatatgcttgacctgctgggacaggcataa

SEQ ID NO: 206386 - DNA, 381 bp, Klebsiella oxytoca
atgctgggtgcagtagagcgtcgcttcggtaacagcctgccagcatcccctgttgagtggctgacagacaacggttcagcctaccgttctcatcagacgcgtcagttcgccagaatggtaggactggagcctaaacatacggcggtacgtagcccggaaagcaacgggatggcggagagcttcgtgaaaacgatgaagcgtgattacatcagcatcatgccgaagcccgacgggttaacagcggtaaagaaccttgcggaggccttcgaacattacaacgaatggcatccgcatagtgcactgggatatcgttccccacgggaatatctgcggcgacgaaccagtcatgggttaagtgataaaaagtgtatggaaatatag

SEQ ID NO: 206387 - DNA, 489 bp, Klebsiella oxytoca
  misc_feature (430)..(439): n is a, c, g, or t
gtgaccgggcaagccaccgatgactggacgcggcggctgacggagatccgccagctgatggcggagcaggcggccagccttgacgccagcggcgactttccccgccacaatatcgcgcatctgcgccagcgcggctttttgtgcctcgccgtgccgcagcagtacggcggagcgggggccggtttagccgaacttcagcaggcggtcgccgccatcgcctggggcgaaccggcgaccgcactcattgtttgcatgcagtatctgcatcatctgcgactggtggaaaacgttggctgggccgagccgctgcgtcagcgggtttttcacgatgccgtcgagcggggcgggctgatcaacagcctgcgggtggagccggagctcggctcaccggcgcgcggcggcctgccgcaaaccctggcgacccgccgcnnnnnnnnnngccctgccgcaaaccgtggcgacccgccgcaccgggggctggcaaattaa

SEQ ID NO: 206388 - DNA, 609 bp, Klebsiella oxytoca
ttgctatccggtacagcctcgatatcgctatcggagtcgctgtctgaatccgaatcgctgtcagaatcggaatcgctgtcggaatcggagtcactgtcggaatccgagtcactatccgaatcagaatcgctgtcgctatccgagtcgctgtcggagtcagagtcgctgtcagaatcggagtcactgtcggaatccgagtcactgtcagaatccgagtcgctgtccgaatcggaatcgctgtcagaatccgagtcgctgtcagagtcagaatcactgtcggaatccgagtcactgtccgaatccgagtcgctgtcggaatcgctgtcagaatccgagtcgctgtcagagtcagaatcgctgtcgctatccgagtcgctgtcagagtcagagtcgctgtcggaatcgctgtccgaatccgaatcgctgtcagagtctgaatcgctgtccgaatccgagtcactgtccgaatccgagtcgctgtcggaatccgaatcgctgtccgaatccgagtcactgtccgaatccgagtcgctgtccgaatcggagtcactgtcagcatcctggattggcccctatatttccatacactttttatcacttaacccatga

SEQ ID NO: 206389 - DNA, 315 bp, Klebsiella oxytoca; identical to SEQ ID NO: 151383

SEQ ID NO: 206390 - DNA, 621 bp, Klebsiella oxytoca
gtgctaaataaaacaaaggcagctttgcagagctgccaatgtcactaccaagtgtttaatcaagaacagaataccaggatcagcgctggtggtcaaagtctgagcgagttgcataatcacaactcagtgctggtgggcttttcctcaaatcgaggagaagtgtctaaaacatacatccgccaatggcggacgttggcccacaccgctaaaaactacccagacattgggtggtatcactctttgtcagcttccttggcttgcttgcgctggcgacgtttgatttcgcctttgattgaggcgaccacaaaaccggctgtactttcaccttcttctttcactttctcaagttcaccaatcaattctaatggcactcttgagacgatttgttgtgatttgttgtttcttgaacctgttgccatgtctgcatttccttttgattggtggcattcagtatatgcaaaaataaatcacaatcaaggcttgaaagtggcattcactttgttctatggtaagtgcatgccacctgttaaggtgaagcataaatggcaacgccccggagtgcttggaaccactaccgaggcgtctaaccaaaccgttatacgaggtaacgatcatggctga

SEQ ID NO: 206391 - DNA, 720 bp, Klebsiella oxytoca
atgaataatatgaattttgagaaagtaaatgaaatgcctcaggttgataacctccttgagcaggaaaagagtttaggtgttaggttttttgcagaagagaggtggttatcatatagaaaaaatcatttagatgaagatttttccatatcaaaagatgagcttgattctgttgttatacctctttttatttccatgcatgagtacggagttaatgggggtgagactttagattttgttaaaaatgttttgtgtaatgccagtcaaaatgggaaaaatttaaaatctgcatttggttttattaaatattttgctgtcgagcagttgagcatagtatttgacaatacactcagcaatataatgtctcgcgttaatgatgagataataggtcattcgctaattactcccgagaaagtggttcctgaaataataatgactgctttgaatgatgagcgccctgtattattcgaggaaagagaggttagagcaatttatagttgcataaagtttaatgaaaatccaccttatgataacgatatgatttctttgataaaggattccgtgattaatagaaatatatcattaccgtataataatatattggttgatgtgttccagagtagtatggaagctccttttaataatcagcaagtgaaagataaagagagtcccttatcaaaaaaaaggcccaagaaatccggagctgtatttctatattattaa

SEQ ID NO: 206392 - DNA, 231 bp, Klebsiella oxytoca
atggctgacatttttcgcggcaaagtgacacgtaataaaacatatctggtttccggttatgcggtaacgccaaaaggccatacccgcagtgcagaggcaaccgtagaggcgcttaatcgtgatgaggcgataattctggcaacagctcagttgcgctgggaggggttaaagtactttaaggctctcagagtgctggaaataacatcaccattaatcagcaaactgcactga

SEQ ID NO: 206393 - DNA, 408 bp, Klebsiella oxytoca
atgttttatatgaccgttatcggtcagggggtctttatgtctcagaatcaaatcgatgaaaaagaaatcatctctcaggatgcgaacttgtggaacagagattattcgtggctgttttctgaagaaaactattggcggctggatgacattattaacatttcaagattgctcgaagacttacttgattctaaagctgaaatgaagtgtgaaacaagcgtatcggccggtcagatgagcagtcttttcagggtgatgcttaaagaactgaatgcaataaagtcagagcttcccaggaaagacaggatattttcacaaggtgaggttgatctgggtttaagtgctgtcaggttattcggtgtacatcgggttacagaaatgattaatgaagctacacaaggcgaccattaa

SEQ ID NO: 206394 - DNA, 2661 bp, Klebsiella oxytoca
atgtacagagaagatttacgcacagatattataaagcgtcttattgctgatttccagtttaaagagcaaagcggttatttgcggcaaggcgtttgccctcactgtaagaaaaaggaattattcaccagtctggataaaccctatgtattacgctgtggacgggagaataaatgcggcggtgaggtaattgtaaaagagcactatgctgatttatttaataactggtcggagcgctatcagcggacggaagccaatccccatgcagcagcagaagcctatttgcgtgaagggcgtggccttgatacggcattgattgccggatgttacagccaggaaagctatcaccagaggggtataggcagcgcgacggttcgctttgcattgccgaacggcgcttactgggaacggatcattgaccggccagagcggtttgaccgtaaggccaattttggtggtcgctatgccggccagtggtgggccgcccctgctcaaaatcttgccgggcaaaaggagatctggctggtcgaagggattttcgacgccatgagcctgaaccagaacggcatagcggctgtgtcgctcatgacctgcaataactacccggataaagccttacaggaactggcggcgttgtacgctaaaagtccgcgtccggttctggtgtgggcgctggacagggggcaggccggggagcgcgccatacgtaagcatgttgagcgcagccgtgttgaaggatggaccgctaacgcagctcttcccccggaaggtaaaaaaaaggctgactggaacgacctgcatatcagaggcaagctgacagtcagagatctggatgcttaccgctactatggcgcgttgcttattgcccggagcgccagcgataaggcgttgctgatgttcaaccgaaccgagagacacgagtttcattttgaatacgattcccgcctgtgctggttcaagcttgatgtggatcggcacatgaaggcggtcgagcgcatccagatggccgagccggatttagatgaacgggacgcgaaggccaaagcgctgaaggagtcgggcgccgtggctgaaattgccaattgttacccgacgccactgtatttccagaagtcggaagcaacggacgaggcctggtattacatgcgtgtggattttccaaatggctccccacccgttaaggctacgtttactgccgcgcagctctccagcgcctccgagttcaaaaagcggcttttgcatgtggctaagggcgcagtgtataccggcaacaccaatcagctcgataagctggcaaagcaggatttacccgggattaaagaggtcaatacgcaaaacttcatcgggtacaacaaagagttcggggcttatgtattcaatgacgttgctgtacataacggcacgctctatccgctcaatgatgaggattattttgaaatgcgggatctgagcctgaaaagcctcagtgcatcgccacacctggcgctaaatcctgagctgggtgactttaacccggcatgggggggcgacctgtggcgggcatttggcgccaaagggtatattgcgctggccttctggctgggagcgctgtttgctgagcaaatccgcgctgtacaaaaaagttatccgtttctggaggttgtcggtgagccgggctccggcaaaagtaccctgctggagtttttgtggcggctgagcggccggccggattacgaagggtttgatccgtctaaatccacccctgtggcgcgggctcgtaactttgctcaggtggggaacctgccggtatgcctgattgaaggcgatcgtacgctggacaatgcgaagcaacgggcctttgactgggatgagctgaaatctctgtacaacggacgctccccgcgggccgtggggatcaaaacgaataacaatgaaacctatgagccacccttcaagggcgcgattatcattgctcagaacgccaacacagacggctccccggcatttctggaacgtattattcacctgcataccgaccggcgcgaccagaccccacaaacgaaagccgcagcggaggcgctggagcgctacccgatagagtccatttccggctttgtcctgatggctatcctcaaggaacgggaaattatggaacgtttctttacccgttttgagtccgccgaagcggaggtgctggccgttatgccctctcagcatatccgcattatcaaaaatcacgcccagctcatcgccctgctggaagcgctggagatggtgatccctctggatagcggatgtaccgagaaaacgaaggatatgcttctccggatggcaccggagcgcctcaaggcggtacaggccgagcatccgctcgtacaggagttctgggaggtctttgattatctggattcgacggtgccgggagggatgaatcattcgcgggaaccaggagaaatcgccgttcagttcagtcattttcaggaagaggcgagccagcaccggcaatcgcacgctgacattaaagagcttaaaaagctcctggagggagccaagagcaggcatatcatccgcaagggcgcggtaagaagtcacatctatgagaactacaaccgtaagctgccggcagacagcccggcgaaacgcaatgaagtacaacattgctgggtattcaaggcgcagcattaa

SEQ ID NO: 206395 - DNA, 624 bp, Klebsiella oxytoca
atgacaaataaatatttggaatggggtaaggaaattgctcaaacaggaagtgaagtttctgacctagcgagcgatattggtgttccgggaattggactgatcgctaaatttgctgaacacttttataacaagcagctacaaaagcgtttcgttacatttatatcgaatgcggaagtcgacgaggatttacttaccaagatatcaagtgacgagacatattcaaattgcttttacgctatcttggaaaccgtccgccaaacccattcaaaaattgggcttgtagccttggctctcatctataaggatcattgggacgacgagcagtatctaatcgccgccatgcgcgctttctcacaagttagtgacgcaaccataaatgctttcatctgcttatacgaggagatgccggaagataaaaattacttgatcctaaaagtgcaaaaagataatgagggtaaattccacgagttttataacgaagcagtggaattgattcagcgaaacttttttgtgctgagtaccggaactggaatgctcgctaatgggccaatacagggcatgaagtggtttcatactgagtcgtattacaagtactgcaagtcagcaaaagctcatattgggtga

SEQ ID NO: 206396 - DNA, 267 bp, Klebsiella oxytoca
atgtttacctgtcctcattgcgggcataccgcccacacacgtaccagccgccgcctcagtgattacactgtacgacagtaccaccagtgccagaaccttgaatgcagtgcagcttttaccacgctaaacgcttacgaaggactgatcccccaacgaaggcgcagagatattgccggggatggagcgccacagaaagcacctacgcctgacaaagaaggcgacgggatggcagttaagcccggcgccgaccctgagcagctcctttaa

SEQ ID NO: 206397 - DNA, 138 bp, Klebsiella oxytoca
atgtggtttattcttgaaagcctgccggaaatgccgcttagcgcgctgcaggaggcgggagagatgctgtgcaacggtctgctggagatgatgccggaagccacgatccgctcgcggctgattggcccgggggcttaa

SEQ ID NO: 206398 - DNA, 225 bp, Klebsiella oxytoca
atgactgtacgtgcaaaatttagctgcatatcaatccataaatcactcgacaaccattctgctgtcgtcaatctgagcgctgtaacgactagtagtactgagaacgaaacctggtcgaagtatacccccagcggtcaactacagatgctcatctctaacttggcagtcctcggacagtttgagcagggcaaagagtatttcatcgatattagccctgcagactga

SEQ ID NO: 206399 - DNA, 543 bp, Klebsiella oxytoca
atgaaaaaaaatcaagatgttatcgggcgtagaatcgaaagcacatttaaggcattagtacaaaaagactatgagcaggctcttatcaatctattcccagcaatggataatactgcaagggcaagaaggcctaatgcaaaagttggagaaaggatcaagttgttcatcagtgacgaagaagtcctgatatccggcttggccctgcgcaagatttttaaaggcgttaaatttggcgagtacacccttcctgaagcaatctacaaaatggcaagaaaccctatgatgcataacggtgagcttgacaaaaggatggaatttgtcgaacagggcatgttgctgattggtgaaaaatggattatgccacaatcgttcatttgggcaatgatgatttcagttattacggctccagaaaactcatcagagtttttattgggaaaggctacttttacactttatggtcaacagtttaatgtgtccgaactttggggagacaagtcgaaaatattcgaaaaattccctcctattggacaagcttacccatag

SEQ ID NO: 206400 - DNA, 234 bp, Klebsiella oxytoca
atgcacaaacaactgtcggccatatgcctgatgacgatgttgatcgggagctgcgcgaaaactttacccgcaaaacctgaggtcatcgacactgcgtgtgactgggtgcggattatctacctaaccgaccacgatatcgacgcgctggacaagcagacgaagcgcgacattctggtgcacaacaaatcagtgcaggctaactgcccacaatcaaccaaaaaggctacgaaatga

SEQ ID NO: 206401 - DNA, 339 bp, Klebsiella oxytoca
atgactaacgacacaattcaatctctacttcttagtttcgaagataattatcatctcccgctactacaggaagtgaataaaacatacattacagcaacgcctgagagcctcctgaacgctgtcagacatacagagcaagccattacagcccttgagcatcttcaaacctctgtagctcgtttggtggagcgtgacggtagcaccatcaccactgatcaggcgtggagagcagcgaatgcccttgaggagcttgcttgctccctgcaattcatcacgcttgagttgggagagcttgccgttagcattgcggagaaatgcgcagtaagtgaatttgaataa

SEQ ID NO: 206402 - DNA, 285 bp, Klebsiella oxytoca
ttgatacaatacataaaactgaataacacgaaacagattcaaatcaacgatagcgggaagggcgtttattacgcgcttgtctggttctggaaaggcaggaaaaccaaaattacctacggcgagttgtccgataaatccggtgtaagtgatcatgggatcagattctggcttagtgctctacgcaacattggtgtaattcagatagaggatgagagtagctatttatcattcacgctgaaacaaatcgagcgcgacaatgtagaatttatctactccaatttctaa

SEQ ID NO: 206403 - DNA, 165 bp, Klebsiella oxytoca
atgatgaacattcgttttagtccagaagtttacgaggcactccgcgaagccgccacaattaaaggcgtaagtattccggccctggttaactccattgtcaaaaataacatcctacaacaagaggaacccaatgaaagaaaagaagcaagtagtaaaattcgttga

SEQ ID NO: 206404 - DNA, 960 bp, Klebsiella oxytoca
gtgattaagcccccgatcaaatgggccggcggcaaaacccgtgttatgccgcagctgctgaagcacttgccgaaagccgactgcctgattgagccatttgtaggcagcggtacagtgtttatgaatacggaataccgccgttatgttctatgcgatagcaatgcggcgctgattaacttcttcagcgtgctaacgcgtttcaccgatgaactaatagacgttgcccgatcgttctttacggatggtaacttcagcgaagactattacgcctgccgtgatggcttcaatttcattagtaaaaaccgcctcgccgcaatcggcactgcgcgtaaggtgcaatgggcggcgacgttcctgtatctcaatcgccacggatttaacggactctatcgcgtcaatcagaaaggtgaatttaacgttcctttcggaaggtatgccgcaccttatttccccgaaaaagaaatgcgtctgtttgctgaaaaagcgaatgacacaaaagcgattttcatccatagcgattttcgccactccatccctgacgttatgcaactggcatatgacgctattatttactgcgaccccccctacatcccggccagcaaaaccgccaacttcaccgcctacggcaagccatttaccctggacgatcaccgcgctttggttacggcgctgctggacgttaatcgccagcacggcacccgctcggtgatatccaacagcgatacaccggaaacccgcgagatctattccgctttcaatctccacgccttcagcgtccgccgttctatcagcgccagaagtcgcgacatggccggtgaagtgattggcgttcttcgcgtttgtgacggctgcggccgttctggtggcggatattgcccggattacggccctgtgatgggcgcttccacttacgacgcaatggctgcagcgggcgcattcgacggtgcggagggattctga

SEQ ID NO: 206405 - DNA, 381 bp, Klebsiella oxytoca; identical to SEQ ID NO: 193288

SEQ ID NO: 206406 - DNA, 999 bp, Klebsiella oxytoca
atgctttcaattataattcctctatataatgcggagttgcatgttccaagtcttataaaaaacataaaagagctcgatttcagtaacatagaagtaatactagttaatgacggttcatgtgattctacagaagcattggttactgattttataaactcctttaatagcgtaaatttaaaatttataaataaacgtaatggtggtgtatcttctgcaagaaatgttgggttacagaatataaacccaaaatctctttatttaactttttttgattgtgatgattggttttattctgaagtgttgaattcatttttagtggagatacagtcattacctgatccagatctggtgttatttaattatgtgagaaattttggggttattagtgagcgcattgatcacaaactgaatggtgtattttctctttctgaaaacttcgtcatgttatacacgtcaggtttgattcaaccttgctggaataaagtttataaaaccagtttgattaaagaaaatcatttgcgctttgaggaaggtattagcatgggcgaggattttcgttttaatatttcctttcttgaagtttcaaaaaatgttgctgcttttagttcttcgctctatcagtacaattctgatagtgccaactctttaacaaaacgttttttgcctgattcttttgaatattttaaatatggtatttcaaaagtaaatgaattatgccatttgaaagggatagattacccagatattcacaatcgatatattactgccctaaaagatagatttaggaatttggctcttagtaccttatcttacaaagaaaaaaatatattattttatgaggatttttctttcgtaaggaataacttagataaaataaaaactggcagcttatcacctcaggaccgtattatatacatgtttgttcgattaaatttgcctaagtttatttggttggcgttttcttttcatcgcttgattaaatttgaatcatataagtaa

SEQ ID NO: 206407 - DNA, 186 bp, Klebsiella oxytoca
gtggtggaaggcagcggccaggtcaccattggcgaacagaccttcgcttttcaggcaaaagatatcttcgtggtgccgacctggcacgccgtctcttttatctccgccgaagatagcgtgttattcagcttttcggaccgtcccgtgcaggaagcgctcggcctgttccgcgaagcgcgttattaa

SEQ ID NO: 206408 - DNA, 669 bp, Klebsiella oxytoca
atgttaagccctgcccgacgtcaccagatgcgccagcaggccattgaggccgcaaagcagcaggataacccgctgcgccacgccaacggctacgagttgatgctgttaaagctcaatgaagataagcgccggctgaaaaaagtgcgttccgtcgagcgcaaagccgaaatgaaacggctgatgctgccggactatctgccgtgggtggccggggtgctggaaagtggcaaaggcgcacaggatgccatcctaatgaccatcatgatctggcgtcttgacgtcggtgacgtagcggccgcgctagaaatcgcccgctatgcgctccagcacggcttggtgccaacggacacctacaagcgcaacagcaccgcgtacctgctggccgaggaagtggccgaggcagcgacccgttcttggacggaaaaagtggcggttgacgtcgccccgctgctggcaacacttgagttgacgaaagcggaagatatgcctgatgaggtgcgtgccaagctgcacaaaatcaccggctatgtgcttcgcgatacgggcagggctatggatgcgatggaacacctgaaacgcgcgctgcaactgcaccagggcagtggtgttaaaaaggatattgagcgactggctacgcagctgaaacagcatgcattagccagccgctaa

SEQ ID NO: 206409 - DNA, 1071 bp, Klebsiella oxytoca
atgcgcacgaaaactcgctttaaatttaacgccttcatggcccgtctggctgatctgaatggtgtagacaccggcgatatgaataaaaaattcacagtggaaccatcggtgacgcaaacgctgatgaaccgcgtgcaggagtcgtccgcgtttctgaacctgattaatatcgtgccggtcgaagagatgaagggcgcgaaaattggcatcggcgtgtccagctccatcgccagcaccgccgacactgccggtggtgacgaacgtgagactgcagacttctccgcgcttgactcagaaggctatgagtgcgtgcagattaactacgacttccatatccgctacaaccagcttgacctgtgggcgcgttacgaagatttccaggcgcgtatgcgtgacgccattattaagcgccagtcgctcgatcgcctgatgattgggtttaacggcgagaagcgcgccaaaacgtcaaaccgtgtgcagtatccgatgctgcaggatgtggctgtgggatggctgcagaaataccgcaacaacgcaccgacccgagtgatgagtaaaatcaccgatgaagacggtgccgtaatctctgatgttatccgcgtaggtaaaaaaggcgattacgccaaccttgacgcgttggtaatggatgccaccaacactctgatcgcgccgtggttccaggaagacccggagctggtcgtgctctgcggtcgccaactgctggccgataaatatttcccgctggttaaccaagagcaggccaacactgagcaactggccgcggacatgattatcagccagaagcgcatcggcaacctgcctgcggtgcgcgtgccgtacttcccggctgacgcgctgatggtcacccgcctagataacctgtccatctactggcaggagggcacccaccgccgcctgatcgatgaagtggcaaagcgcgaccgcatcgaaaactacgagtccatcaatgaggactacgtgatcgaggattacgcggcaggctgcctgatcgaaaacataaagctgggcgacttcaccccgctggtagaaacgccaccggcaggagagtaa

SEQ ID NO: 206410 - DNA, 852 bp, Klebsiella oxytoca
atggcagcaatcaaagcaaagcgttttcgcatcgcagttgaaggcacaacaaccgacggccgcgtgatttcccgcgactggatcgcccagatggcggcaagctataacccgaacgtatacggtgcccgcatcaatatggagcacatcaagggctacagccctgacacgccattccgtcgctatggtgacgttaccgcgctgacggcggaggaaattaccgagggggcgctaaaaggtaagctggctctttatggcgatattgacccaacgccggaactggtggagctgaccaaaacgcgccagaaaatctacacctcaattgaggtcaacccggaatttgctgacaccggcaaagcctacctagttggcctagccgttaccgatgacccggccagcctcggcaccgaatacctcagctttagtgccacggcaaaagcgaacccactggcatcgcgcaaacagaatgaaggcaacctgtttaccgccgctgaagaaaccctgatcgaatttgccgaagagaccgaaccgggcccgtcgctgctggatcgcgtcaccgcactgttctctgccaaaaagaaaaccgatgacgagcgtttcaacgacgttaacgcggcggttactgctgtagctaaacaggtacagaaagacggcgacacccagcagaaggcgctggctgagctggaaacaaagctgactaaacgacttgcgcagcttgaaacgcaggcgggcaatgactcacagacgctcagcgcactgaaagagaaattgcagggaaatgatggtgatttttctgctcgtcggccacgcgccaagggcggtgatgccagtgcggtgctgcaaaccgactgctga

SEQ ID NO: 206411 - DNA, 1770 bp, Klebsiella oxytoca
atgaacatgacacccggaactatcatcaccgatccccgccgtcaggcggctctgctgtattggcagggcttctctgtgcgccagattgcggagacgctgaaccagaaaacaccaaccgtgcagagctggaagctgcgcgacgcatgggaggacgttgcgcccatcagtcgcgttgaggccagcatggaagcccggttgattcagctcatcatgaaagaggtaaagggcaatggtgattacaaggagatagacgcgctgggccgtcagattgagcgtctggcgcgggttgaacggtatcgcggctccggcaatgaggcagatctcaatccgaacgtgcgcaatcgcaaccgcaaccggggcgaacgccagccggtgattaaaaaccttttcagcgacgaacagacagagaagctgaccggcctgtttatggacggttgctttgagtaccagcggcactggcacaaagccggactggcgcaccgtatccgcaacatcctcaaatcccgccagatcggtgcgacgttctattttgcccgcgaggcgctgattgacgccctgaccactgggcgtaaccagattttcctgtcggccagcaaagcgcaggctcacgttttcaaaaattacatcatcgactttgccaggcaggtagacgtcgacctgaaaggcgagccgattgtgctgccgaacggcgcgcgcctgatgttccttggcacaaacgtccgcacagcgcagagctacaccggcaacctgtatctggacgaatatttctggataccgaaattccaggagctgcgcaaagttgccagcggcatgtcgctacacaaaaagtggcgtacaacctacttttcaacgccctcgtcgctgtcacacagcgcctatccgttctggtcgggggagttgttcaacaaaggccgccgcaaccgggccgaccgcgtagagctggatctcagtcacagccacttggccgcaggggctttatgcgctgatggtcagtggcggcagattgtcaccgttgaggacgcgctgaccggcggctgtaacctgttcgacctggatcagctttcgctggaatacagcccatcggaataccagaacctgctgatgtgtgagtttgtcgatgatgaggccagcgtgttcccgtttgccgagctgcaaacctgcatgatcgacagcctggaagagtggaccgacttcaacccctactcgctgcgcccgtttgagtatcgcactgtctggatcggctatgacccctcacacaccggcgacagcgccgggtgtgcagtgattgcgcctccactggtcgccggtggcaagttccgcgtgctggagcgtcaccagtggcgcggcatggactttgccgcgcaggctcagtcaatcaaagagttgacggaaaaatatgtcgtggaatatatcggcgtcgatgcgaccggtatcggccagggcgtttttcagctcgtccgccaattcttcccagcggcgcgggaaattaagtacaccccggaaatcaaaacctccatggtgctgaaagcaaaagacaccatcaccagcggccgcctggagtacgacgccgggcacaccgacatcacccagtcgtttatggcgatccgcaaaaccatgacggccagtggtaatcgctctacttacgaggccagccgcagcgaagaagccagccacgcagacgtggcttgggcaattatgcacgcgctgctcaacgaaccgcttaccgctgctagcggcgggattaacccttctttcatggagttttactga

SEQ ID NO: 206412 - DNA, 1047 bp, Klebsiella oxytoca
atgagcaaacgtaaaggacgtaagaccttcactgcacggcagcagccgacagataaccagcaggtacacagcagccagccgtttgaggcattttcatttggcgagcccacagccgtgctggataagcgcgatatcatggattatgccgagtgcgtgggtaacggccgctggtatgagccgccggtcagtttccacggcctggcgaaaagtatgcgggcagctgttcaccacagctcgccgctttacgttaagcgcaatattctggcatctaccttcatccctcaccccatgctgagccaactagaattcagcagactggtgctggattacctggtattcggcaacggttttcttgagctgcgtcgcaatgaccttggcgatccgtggaggctggaagtttcaccggccaaatatacccgccggggagttgaagaggacatttactggtttgtaaacgattggaaggagccgcaccagttcggaaaaggctcggtgttccacctgatcgagccggatattaaccaggagctgtacggcctgccggaatatctcagtgcgcttaactccgcctggcttaatgaggcggccacgcttttccgccgcaagtactatcagaacggcgcgcacgcgggttacatcctgtatatgactgacgctgcgcaaagcagctgtgacattgaccgcatgcgtcaggcgatgcgtgatacgaaggggatcggcaacttccgcaacctgtttatgtacgcgccgaacggtaaggcagacggcataaagattttgccactgagcgaggtcgctaccagggatgatttcttcaacatcaaaaaggccagccgcgacgatctgctgagtgcgcatagagtgccaccacagctgatgggtatcatacctgagaactctagtggattcggtgatgttgagaaagcctcgcaagtctttgtaagaaacgagttaaatttcttgcaagaaagatttaaagagataaacaactggactggagaggaaacaataaacttccaagaatactccttgaaggcactagattag

SEQ ID NO: 206413 - DNA, 819 bp, Klebsiella oxytoca
gtgataatatacgatgtgactaaacccggcagcctcataatcggaccagatgaagaatggatgattgaggtcagagacatcatctccggactagaaaattctttctatgatgcaactgtttgccttcacttgttcaatgagtcaaaatcccttgtaagatgggtatccactactgacagagaacgcagtgaatattatgaggcatccaataaatttgcgaaggagttagagcaaaaatacagaagcgaaggtaaagaaattgaccatgctgaaatttattttcagtcatcagtcctagccaaaaaagagcaatggggaaaaggaaatctaccgagagctttacaacataaccaacctaaaatacatgctcgttcttttttatattctcttgatatgtttggcaagtttttacaaactctttttgaatttttaaaacctcataaaggtattgaggacgcctataatgaattcaaaaatgctttcccgacaatcataaaaataagaaataccattcagcacatggatgaacgttcgagaggtttagggaggggatttagaggaaacccaccaccacaattacctctgcgggaagttagaaatccaatgatttcttatgaaggagggttcgatccgcaaagatcccctagaattataatcactgattccctacgtggcgacacctttggatgcacaatagatgatggaacctatcaagaaatagatataaatgatgcatcaatgaaaacacttcaaaaaatactgcagaaagtatttttatctttccattgggatggcggaaagagtaacataccttactaa

SEQ ID NO: 206414 - DNA, 843 bp, Klebsiella oxytoca
atgaatgatgaagatttgaatacgcaagatgtgattgagcggataagttcggcgtatggtgtcagcacgcaaaaggctttggcggaagtgcttggcgtcccgtcaaacagcgtcagcacttgggttcagcgaaacagttttccaggcaaagccatcattcagtgctcattagatactggtgctgatttaaactggctgctgactggtcaaatttccaatttgaatttgcaagattcgtcaccgttgaaaggaaaagcactttatgacgagattttggcgagtggtggaaaacctgttttaaggcgcatccttgacgcctatggttttacaatgcaaaaggagcttggggatttgttggatatctcctcaggcactatcagcacttgggtaagacgagatttcttccccggtgatgtggttgtgacatgcgcgcttgatactggtgtatcgctggaatggttagcgaccggaaaggggaaaatgcgagaaagtaaggaggctagcttttctgacattttaacgataaaaaaatcccgccttgaatctggtgagctaaaagacgctggacgttggcaacctgatccatcaatgattcctgctaactctgatgatttggtttttgtagatggcgttagctcatcttggcttgtcgataattcagcatgcaaaatcggcaatggccgttggctcatcgggatagatggcgcgttcgacgttttcgacgttgtacgactgccgggtaataaagtcaggctatcaaataagtctgttgattttgaatgcaacctatcagaaatcacaccatctggtgctgttgtatttactctggaaaaacatatctaa

SEQ ID NO: 206415 - DNA, 405 bp, Klebsiella oxytoca
atgaaacgttctatttttgctctggctttactcgcctcttttacagtagcagctcaaccctctaacttatttatactgaagaaatcctttaacgaaatgcaaccactgtcgataaaagatagtaatggcgtcattacagttgttttggatgccgcaagtattacgcctgaaatttatgataccgcagtttatagcgtttgttcccctgcatggctacataaggaaaacactgcgtatctgaaaaacactacatctgttcgaattctcaataaatttagtgccatgggttatgtgcttgagaagccaaaagcaacttgtgataaggccggagaagaacaagaagaacagtctaaaatcacaattttgtcgaacacgcatgttactacaatgaaagatttgcagtaa

SEQ ID NO: 206416 - DNA, 297 bp, Klebsiella oxytoca; identical to SEQ ID NO: 16826

SEQ ID NO: 206417 - DNA, 360 bp, Klebsiella oxytoca; identical to SEQ ID NO: 16827

SEQ ID NO: 206418 - DNA, 285 bp, Klebsiella oxytoca; identical to SEQ ID NO: 16828

SEQ ID NO: 206419 - DNA, 333 bp, Klebsiella oxytoca; identical to SEQ ID NO: 16829

SEQ ID NO: 206420 - DNA, 315 bp, Klebsiella oxytoca; identical to SEQ ID NO: 151383

SEQ ID NO: 206421 - DNA, 579 bp, Klebsiella oxytoca
atgactatcaaagccgtacttgcgcagctggctgcgttaaacagcacgatgaccaagagccacgccggagatgatgccgagcgtggggcaaggctgaattttgaagaccataagctgattgctgactgctggcaggccaaagccccccgcgctcaggttgaggagctgaaaaagtccctcaaaactacccatgacctccccgacgcggagcgcaaagcggctttctcagctgttcgccagcacctgctcaaatcaaccgcaggcgatgcgctagagcaggccatgagcggctcccctgtgcagtttgcgccggatatgaccgtgagccgcaacatgagcaccgagcaaatccatctggcacggcagcagcagatcagcgatcagcagcttatccgtgattgtgaagttgctggggtggccacctcgcaggttgtcgaattggcaagccgtctcgaagacactcgcggcctgccgaataacatcagacagcccggcattgatgccgtgcgccagcagctgacgcaatcccaaccgagcccggcagcgcagggcatcgactggagcgggcagggttggtaa

SEQ ID NO: 206422 - DNA, 636 bp, Klebsiella oxytoca
atgagcatcagagaagaaaacgaaaagcacgttgaccgtgtactcaatcaaatttccgtccggctggagagcctgactgtatccgcccctaaactgagtgacctgagcacgctgagggaaaacatgctgcgcctgttaggtgaagccagcgatctggagatcaccgcctccgggttgcgcctgcgcctcgatattgaaaatgagcagattcgctctcttgagtaccagctggggaacctgcaaaagctggttgaggagggcaaagcctgcctgcgttctggggaaccggttcgccctgagtgtggtatggccccggccctgctccctgatgtgcaaaacgaactggtagcggcgcagcaagtggcagcagccacccgcagcgagctctcagcctgtcagcaccagatcgacctgtgtaatgcaaacgtaagccgtgcagccgaggaggcttatctgagcgcccatctggcctacgtgagcacgcttctgcgtgaatccatggatctggctgcgatggctggcgcgaaagttaacagcggtgcggcgacggttacgctggatcgccgtctgggcctgctctttcaaaatcagggcatggtcatggcattgaaaaactaccaaggggagcgccgctaa

SEQ ID NO: 206423 - DNA, 627 bp, Klebsiella oxytoca
atgaattgcatgatttacatgagagccagcactgagacacaagacgccagccgcgcagaggatgagctcaaaacctttgccgcagccaatggcctgacgatctgcggctggtatcgggagaatatctccggcacgcagctggagcgcccgcagctcaataagctgctgcacgacgccgggccgggatttgtcctgctggttgaaaagctcgaccgcctgagccgcctcacccgttcagagtgggagcagttgaaagaacggatcagagccaaacggctgcgcatcgtctgctgcgacatccccacgacgctggcggtattgcagggagaacagccgaccggggcgggcggtttcgacgttcgcaacgtggtactcgatgcgctcaactcgatgctgctcgatattgccgcagcatgggcccgcgacgattacgagacacgccggaaacgtcaggcgcagggcatccaaaaggcagtagaggccgggaaatataaagggaaacagcccaacacggcactgcataagaagattttgaaatacgccgccgcaggacataagacgggggagatcgccagactggcgggctgctcacgctctacggtgctgcgggtaacacgggagcagtag

SEQ ID NO: 206424 - DNA, 195 bp, Klebsiella oxytoca
atgattattgcatcacagcgtcatacggcgcaaaccttccccggcctcagcatcgagcacgggcagatccgccagtacggaaagccccgcagtgtagcgatgaacgggcgtggcattcaccagacatcgctcagaacggctgagggcaaggtgatcaccttgcctgtttgccgcctgtttgacagggaagcataa

SEQ ID NO: 206425 - DNA, 384 bp, Klebsiella oxytoca; identical to SEQ ID NO: 152423

SEQ ID NO: 206426 - DNA, 684 bp, Klebsiella oxytoca
atgccagacctgaaagaaattttaaaaaatagcctttttaatcaagttgatgatagcgtttctgcacccatatctattcgtcttcctaccgtattaaacaatcagttagaagaactatcgcagagtatgaaatgctctaaagcctcgctgattaccgagttcattaaaggcggggtagccgttacaaacgagctattaaaagaggactcactgattagtgatgagctgaaagagcagatgatcgctggtcagcgtgaggaaagtgacgttttctcactcgatagaaaaactttcatgctaaatacgaactacaacaacgatgaagaaacgcatttcgatatgctgaaaaaccaagaggcagcggccttttgtaagggatggaaagagtacatctgtcagctttccaaaggcgataccgtctatctgtatcagagtggcgtaggcatcattgcttctggtgttgtggatggtgagctggtgaaaagcgagcattacggcgtagctgatgataaatacgctaagccactcaaagattttaaaaccggctttaaggctatctccgcgcgtcgctttaaagagttaaccgggggcggcgctaatttccgtagaacgatgattgaactcacttctgtgcaggctcatgctattgctcaagagattgagaaattaacggctaagcagtga

SEQ ID NO: 206427 - DNA, 477 bp, Klebsiella oxytoca
atgggccgcacaacgtacaccccacagcaacgccagcaggtgctcatcctcggtaaagaaccgggcgcaaccgccgccagtgtcgcaaggcaggccgggatccccgccagaaccgtgcgggaatggctcgccaatgcagccaaagagccgcagaccgacaacgtgactagcctcatggagcagcgcgaacgcgcccagcagctcctcagtgagacacccagcgcgaagatccgacagctgcggaaccacttcaccgcccagcagttcgatctcctgcaacgccatgccagcgatttaaccgccctcagggctcgccagctgaaagccgtgattgataatgacccccagatgacccgcgccgtggcatccgcgatcctcgcactgctcaaagcgcaggaggctgagcgccttatgtacgacatcaagcccggtacatcgtcaggcattatgcgcggcggaatgaaccgccagaagtga

SEQ ID NO: 206428 - DNA, 1281 bp, Klebsiella oxytoca
atgaatcagcaagacaatgtaacgccacttgatgcggcaaaggccaagcgtgggcgtccgtcacttcccaaaaagatgcctacggtagcgttccctgccgatctggtcgttgattataaaaaaggcaaatatgagagctcgctggagaacgtagtggcagcacttcgctgtcatgacgtaacgggtgtacagctggcctatgatagcttttttgcagaggagggggttttcattaacggcgaatggatgccgctatctgacaacctgatcactgaaatgcgcctgcgtctggctgggatggattttgccaaagtgagcaaagataacgcccgcgacgccatgttctatgtctgcgaaaacagcaaatttgacagcgctcagcgctggcttaccgctcaggagtgggacggaaagccacgcgtggagaaatttttctcccgctgcttcaaatgccagggcgatgaggaatacattgcagctgtcagccgctacacatggacggcactcgccgggcgtgtcatgcagccgggtatcaaagccgatatggttcctttgctttacggcgctcagggtgcccgcaagtctactggcgtgcgccttatttccccattcagcgagtcatacgccagttttaaccttaacgacaaggatgacgtgctggcccgtaaaatgcgcggctgtattgttggcgaactggaggaactgcgcggccttcatggtcgagacgccgagtctacaaaagcatttttctccagcccgcatgatgagtgggtgccgaaattcaaagagttcaaagtgcgcagcccgcgccgcgtcgtgttcatcggcacaacgaacaatagccaaatcctcaatgactccaccggaaaccgccgctatctgccaatgagctgcggcctcgttgactgtgaggccatcgagaaaaaccgctctctcctctgggctgaggccctgcaaatgttcaaagagaacggcattatgtggcagcaggctgaggagctggcccgcaaggttcacgatgatttccgcgttatcgatccgtgggaggatgctctggcggattatctggagctcgacaacgaccacgccaagccgatggagtacgccaccactgaggcactgtttgcccgtctgggcattgatattggtcgagtctcagccatccagcacaaccgcctctccgcgatcatggcccggtttaactatgagaaagggcagcggcgaatcaacggtaaatcaacccgtggctacttctggcgggataaaaatagccctctgtga

SEQ ID NO: 206429 - DNA, 237 bp, Klebsiella oxytoca
atggcaggggggctgcataaaaaagatgagactgccggaggatcaattacgttgatcgtttggcccttcgacgctattctgtgggggcatttgatttgggtggttttggaacggcaacccagattacaggcgaaaaaaaaccagccgggcagctggtttttaatcgcctcagacggtgaatctgtctggtgctattcggtcgaggtcgtggggactttcaaccgagggaaaagctaa

SEQ ID NO: 206430 - DNA, 159 bp, Klebsiella oxytoca
atgatagtgcgcatgagtgctgagggggccgggttggctgacattacgaacgcgctcaatgcgctgggcttcaccagtgcgaccgggcaggagtggacacgcagccgcctgcgggactatcggcataagctgcgggatattggattgatgaatggctaa

SEQ ID NO: 206431 - DNA, 495 bp, Klebsiella oxytoca; identical to SEQ ID NO: 168049

SEQ ID NO: 206432 - DNA, 453 bp, Klebsiella oxytoca
atgaattacaacgtaatacactcagagagcaccgccgccgttgttgccctcatcgagaaagaaatggcagattggcagctggctgattacgccgccactctgctgcctaacttctatccggggcagcgccagaagacgctctccgggctctcaatcgtcattgaccgggcaggatttactaaaagtcagtggggtggaacaccgcagtttgcagcagatgcacgcaaagcaatggcggtaaaggacagcaaacagcgggcgcgtgttgtgcgggctgtctgtgatgctgagcgtgaggcatacgctacggcgctgatgctggagcttttcggtgttactgatctcgatcccctgctggcccgtctgccaaaacttgatgagctcacgctgctgaccattagcgatgcagagaaaaaggctatttctgaggcgttcagcgtctggctgagataa

SEQ ID NO: 206433 - DNA, 288 bp, Klebsiella oxytoca
atgaccgatcaggactttgaaacgatgctgtttaacgattccagcaagaccgcctcgctatttgtggctcgcgctgtgactgacctcgacgcaatgctgggagagggctattccgtcgctaaccctgccgttctggcccagtggctcgcggtagccggttctcagatggttacgcttcagcagctgcacggcgcaaacggtttggcaactcagatcgaacgtctggcaggtatggctgaggctatcgaggccagcgccgtagcggctcatgcgggccgtatgcaatga

SEQ ID NO: 206434 - DNA, 1212 bp, Klebsiella oxytoca
atgagcgagagcaaagacgaatacctgttgtggcccggtgtgtttgatgaggcgctggcacgcgtaatgcctgccccctcttacatggagtgggtgcagcaggtacggcagatcgcctgctgggcaagcatcctgaggctgaacgatgcgcaagctatctgcgagcgctggagcgcgtcaggcgttaatgcagccccagctgacgcgggccttattcgcgctgctctccgtcctcagtctctcgaaaaactcagcccgttctccatggctggcgcgttcctgcgtgattccggcattatcccggagattaacgccgggcgttttggttcttaccagcccaccgccgcagacctcgccagacgtgaggcccagcgccgggaaattgaggaggctcaccggatagctctggaggctgacgaacggcaacgccagactgccatccggcaggctacgcagatttatagcaaggccagcctcgatcccgcgatgtcgccatattggcagggcaaatgcagtgcagcagcactgcccctaccgctcccggatgacgtaaaagccgcaaactggcgcacctttgaaaaaggcgcatccagcaagggaatttactggaatcactcgctgatcatccctctgtattgcatcactgacaccttacagctgggcatgagtaccatcgagataatttgcgggcgtcctaatccagccactgagctgtcattcactggggcaaaacgtggcctgaaaggggcccagcgtagcgggtgtttctatccgttcgatatcgacaagacccgccatggttcgcctctggtcatttgcgagggctttacctccggtctggccctgtcgctcgctatgggcagcgccctgcctgtgttctgcgcaatgagctgcaataacttcgccgccgtcattgatgagctgcgcattgtgtatagccactgtccgatctacatcgtgggcgacgtgggcgtgggtgaggaaatagcgcaaggcattgcagaggctgacacccgcagtcattctccggtctatgccgtgccgctgagccgctgcctttttgaggatggtgctgatccgtttgacctgttggcacgtcacggggtcgataattcccgcgttctcctgcggtcgttattccgtgaggctcgtattggtcgtgacggtacgctgtccgggccgatctcatcggatgccaatcacaatatttga

SEQ ID NO: 206435 - DNA, 1215 bp, Klebsiella oxytoca
atggattctccaacacccgaaaaactccagcttgtcggagccgtcgaggcttacccggatttgatgcccggcattctgtttgtcacctgcccggataaagcaaaatcatgtgtcagtgtcagcacctgccagcgtcttcacgacgaaacgataagtcgtaaggcagaccctgaggcttgcgccagaccatgctcacgatgcgctacgggcgtgattttgtggcgcggtgaatcttcacggctacctcccgttaatattgagcattgccctcgatgcgggagaacagggagacttgttgggaagaagaacggcagcaaagctacaccatggagcgtgtgttgcgtgtcttgctggaatcgcgtcgctgagaacaaaaagggcgttggagcccgtgggaatccgatcatgcagccgcctcttatggccccgtggcttatcggtcacgttgaggacggcgtgcctgtctggtcagtctggattggcgacagccaaagcgaggccatacagcgccagctgctgcgtaatccatcaacagagtttcacaaccagcgccccggagtgacagggtttaatgcaagtggccacccggtttatttatgcgagaaacacccatcgaccccactcaattgggactgggacagggatgccccgacagtaggcacagtgcggttttattgccctgaatgcgagccgaaggcacgccttctaccgctcgccattccacgctcccccatgcagtttatgacagtgcaagaagcggtagagatacacgccacagtggaggataaagcagacgccgcagccatctgcgccgattgtcaccgggcaccgctgcgaattgccagagaccgatcaggctttgttactgcgtcatgcccttgctgcaatgccagcgctacctcctccggcaataatgtctcacgcaagtggattgacccggagccagtccagccgcgctatttcggcgtctaccgggctgcatacaacgatttccccctaagcggtagcggtgcagctgcgctgcaattggcgtccactttacccctaacgctggaacgggtgccgcagctcctgtttaaccgcttacgggcctgcattctggctgcgctgggcgaatgggagtatctggacgggctcatgattgacaccgaacgtggagacgggccggaacttctcgccctactggcacagctacgggcggctgatttgtcgtga

SEQ ID NO: 206436 - DNA, 2625 bp, Klebsiella oxytoca
atggctattaaaatcccggtcagtgcgcagtttgacgctgctgaccttaaacaacagatccagatggtcaacgaccagatccgcgtccttgcgtcgcaggttgggcaggccaataaacagaagtttgagcccattaacctgcgctcaaaagacgatctgaatgctttcattaagcaaatgcagaagctgctctccatccagacagagctcaagcagaccatgggcaagaccggacagggcgcgactaacccgcttatggctgactggtcaaagatgtataccgatcaggcagtacgcatcaaaaaaatgcagtccatgctccagtttctcggcgtggagtttaacgaccagccagcgccgaaacctaagccgccagcacctaccccctcaaatccttctcctgcgcctcagagagggccgcaaaactataaccagcctccagcatggcagaaccacctcaacacgatgctgcgcaacgctggcccggttggcggcaccattaacggggcaatgagcgccgggctgtctggcggagcaggtgccgggctcatgggcttggtcggcggacttgctgcgctcggagtaggaaagattatcggcgcggtcgcagacaagatcgggcaggcacaggacaacgtgatcgggctcgacaagctataccgccagatggggggcattgtcagcttttccagcctccagcgcggcgtcatgagcaccgccaacaatctgggcatgaccaacggtgacgccatcgcgctggcctccacctattcccgcgccgccaacatccagccgggccagaaccttggcaccgggatgctggtttctggcggtctggcccgctcctacggcctcgacccaaacagcgtcgcgggcacgatgggccagctctccgcttcccgtgtcgtaaacaacgatcagcagctgcgccgcatgggcctgctcatgggggaggctatcggcaaatcaggcgcatttgcgcaggctggcgaagctatgcaggcgatcagcgactttgccacccagcaggcccgcacaagcctgaccgcgccaaatgtaccgggctatgcgggtgcaatggctggcctgatgagctcagggatccccggcatggatttgcagggctccaccaacctgctgagccgcattaatgcgaacctccagcgcggtggcgcaatgggcgacccttcacgggcattcatggcccgcatggccctgcgcaacggcatcaacaacccgatggcgctcgaagtcctccagtctggcggcgcttttggcaccattagcagcacgctgggccctgattctctttacgggcagcgctttggcggcaatcatcacggcgatcagaccctgctcgatatgacccggcagggcatccaccgggcctatggttacggccctgattcaatcgtggctctctcgcgccaccttggcgtcggcatcaatgacgcgctggcaatcgaccagatgagcagcgcagatatgagcggcgtctcaagtcgcctcagccgcctgaaaattaaccctgacggcgtaaacgccaccagttacgccgcgctgggccagattcagagcggcaaagggctggaggctatgggcaatgaatacctcaagcgcgggggccttgatgctggcgaacgccagcgccttaccgatgcccttaaaagtactgacccggagaagctgaaagacgtgctcactcaggttgccaccgtgcatggccctgcgaagaccgaagggagcgagatccgcgataacgtggcgaagctcaacaaccagtttgaggactacgcccgccgcgccctgcctgctctcgatgtcatgcgcatggcactggtcaaaatgaccgggggcagcgaggacagtctgcgccgcgattatgagaaggggatgcgcctcgatacgcagcagcaggcccgccgcaaatacggctggcgtctcgatgcctatcagcaggaaatgaacaccttgcaggacaagggcgtcggtatgcagaccgcagggccagagggcgaccgatacagggcactgaaacgccagcagcagctcatgcgccagcagcagctcaactttgtagagcagggcaatgcgaatgcgcacgccgctgcatacggcccgcaaacagccggagaggcggcgctaggcggcaatatttcctcaccatccgcagcggctgcgggaagcggtgctgccgggaactgggcaggcaataacgttggtaacgtgaaggacgctaacggcaactggcggcgcttccgaacccagcaggcaggcattgcagcgtctgccgggcagctgctgcgttatagcaccgggaaatatcagggcggacgcaagcgcacgctacgggagattatcagcacctatgcgagcggtgatcctgaggtgccgcgctacatccggcaggcgagcgaatggacaggctacgacccagatcagcagctggacttaaccgatcagaacactctgctgaacgtaacgcgggccatcctccgcaaagagaacgtgaaaaatagcagcatcccgcaatccgtggttaattctggcgttagcatggccctgaataaccagaacaactacaagatggggtcggttccggctgagggcgaaatgacaccctaa

SEQ ID NO: 206437 - DNA, 1545 bp, Klebsiella oxytoca; identical to SEQ ID NO: 129126

SEQ ID NO: 206438 - DNA, 765 bp, Klebsiella oxytoca; identical to SEQ ID NO: 129127

SEQ ID NO: 206439 - DNA, 513 bp, Klebsiella oxytoca; identical to SEQ ID NO: 129128

SEQ ID NO: 206440 - DNA, 816 bp, Klebsiella oxytoca; identical to SEQ ID NO: 129129

SEQ ID NO: 206441 - DNA, 612 bp, Klebsiella oxytoca; identical to SEQ ID NO: 129130

SEQ ID NO: 206442 - DNA, 1716 bp, Klebsiella oxytoca; identical to SEQ ID NO: 129131

SEQ ID NO: 206443 - DNA, 693 bp, Klebsiella oxytoca; identical to SEQ ID NO: 129132

SEQ ID NO: 206444 - DNA, 708 bp, Klebsiella oxytoca; identical to SEQ ID NO: 129133

SEQ ID NO: 206445 - DNA, 1794 bp, Klebsiella oxytoca; identical to SEQ ID NO: 129134

SEQ ID NO: 206446 - DNA, 837 bp, Klebsiella oxytoca; identical to SEQ ID NO: 129135

SEQ ID NO: 206447 - DNA, 1155 bp, Klebsiella oxytoca
atgaaagtacgtacacttttacttggtatcggtctctcggtgggagcttcagcatatgcagccgaacctataaaaataggtataccagtaggtctaagcggcgcaaacagtgtcgttgcaccttcggtcgtccaagcctcggagttagctgtcgaggagataaattcgcaagggggagtcttggggcgtcagctgcggcttgaaattgctgatgacggatcaggagctcaaggcgctcagcgcgcctatgacagtctcgtttttcaacggaaagttgacggcattgtagcaatggaaactacggctgccagaaatgccggcttaccaatcgtcaatcgcggcagggtccccctcatctacacatcattttacgaagggcgctcatgctctcctatgatgtacatcaatgcctgggtgccagagcagcaggtcgccccggttgtcgaccattttatggccgagaacgaggccaagaagtttttcctgattggcagcgattatgcctttggtcgcggcatgctgcagtacactcgagagtacgtcgagagtaaaggaggcagtgtggtgggcgaggcgtacttgcccatggatggatcagattggaccgcaatcatttctcaactacgttcggccaatccggacgccttgattacgtcaacggccggcggcgcgccaaacgtgacgctcaccaggcagctgcgcgctgcaggtatctcgatcccctatggtaactacgccctcgatgaaggcacagccaaaagcatgggtgataacgccgaggggatatacatcgtcgcatcttacctctcaagcctagagaccgatgcgaataaagccttccttgaagcgatcgagaagaagttcggaagcagcgccgagacgccgaacgagttgtcggtgccgcagtacgaagccatatatgcgtacgcggcggctgtcgaaaaggccggctcgactgattctactgctgttatacaagcgctaggggaagtgactgtggaagggccccgcggctccgtcatcatgaataagcaacgtcatgcgtcgctcaatatgtatttgggccgcgtcgctgctgatggttcagttcagctcgtcaaatcgttcccaaaagttgacccgggcgaacagtgtccgcaattcgctaacaagtaa

SEQ ID NO: 206448 - DNA, 915 bp, Klebsiella oxytoca
atgcttagtccccttggtcactctggtcccgaccagagcccacaaaagttgaaaattgcctgcatccagtttgaaccaaagtttggcgaggtcgagcacaacgtcacacgcagcatcgacctgattgagcaggctgccggctacggcgctcgcttgatagttttgccagagttatgcagcaccggctatatctttcagtcgcgggaagaaactctcgcattatccgagcgtgtgcctgaagggcctactactaatgcctgggtcgaagcagctcgccggctagaagtgacaatcgttgccgggctagtagagcgcgacggaaattgtctctataacagcgcagttatcatcgacccttcaggcgtgctaggggtttaccgcaagcttcacctatgggcagatgagaagctctatttcaagccgggcgatcgtggtctacccgtgttcgatactctagtgggccggatcagtgtcgttatttgctacgacggttggttccctgagatgtttcgtctgtcggcctgccaaggtgcagagatagtatgtgtgccaaccaactgggtgcccatgccagagcaaccggcaggccacccaataatggcaaacattcttcatatggccgcggctcacagtaattcgatagtcattgcatgcgctgacagggtgggcattgagcgtgggcaacgattcttagggaatagcgtaatcatcaatcgtttaggctggcctgtagccgggccgtgctctgaaagtgaagaaaagatcctcatcggggaagtggatatggaccctaggtgcgaacccagctggaacagtgtcaatcacccgctaacagatagacgaacagatgtatacggcgagaatttaggcgcagatatccagattaacctggcaaagttagaggcagagcgatga

SEQ ID NO: 206449 - DNA, 1029 bp, Klebsiella oxytoca
atggaccggctttcaccggtaacccgtattcgcaaggttggtttcactatggaaaatgaactccacttcatcggtattgatgtcgccaaagctaaactggatgtcgatattcttcgccctgatggccggcatcgttgtaaaaaatttgacaataccctctccgggcacgaagcgctggtccgctggcttcgcggccatgatgtgaaccgtgcccgtgtctgcatggaatccaccagcacctacatggaagacgcggccgcgcatctgagtgatgccgggtataccgtgtccgtcatcaaccccgccctcagtaaagctttcgcacagagtgaggggttgcgcagtaaaaccgacaaagtggacgcccgtatgctggctcacttctgccgggaaaaacgcccgccagcctgggaggccccccatccgacagagcgggcactgaaagccctggtgttacgccatcaggcgctgacagagatgcagacacaggagaaaaaccggcgggaaaccgcgccggaagttcagctgaccagcattgatatcctgctggggtgtctgagcgcggagctggcgcgtatcgaaaaacagataaaagacctgacggataatgacccggatatgaaacaacggcggaagctgctgaacagtatcccgggcatcggagagaaaacggcggcggttctgctggcgtatacgggcctgaagctgaagttcggtacagggcggcagttcgcggcgtatgcaggactgacgccggtgcagcatgagtcaggcagcagcgtgatgcgggcgagccggatgagcaaagcgggaccggttcatctgcgcaaagcgctatacatgccagcgttatcggcgctgtaccatacggcgtggggaaaagcgttcaggaaaaggctggaagggaatggtaagcgtgcgaaagtcatcataggggcgatgatgcgaaagctggcgcaggtggcgtacggtgtactgaagtcaggaaaggcgttcgatgcgtcacagcatgagctgttgatagcgtaa

SEQ ID NO: 206450 - DNA, 1029 bp, Klebsiella oxytoca
atggaccggctttcaccggtaacccgtattcgcaaggttggtttcactatggaaaatgaactccacttcatcggtattgatgtcgccaaagctaaactggatgtcgatattcttcgccctgatggccggcatcgttgtaaaaaatttgacaataccctctccgggcacgaagcgctggtccgctggcttcgcggtcatgatgtgaaccgtgcccatgtctgcatggaatccaccagcacctacatggaagacgcggccgcgcatctgagtgatgccgggtataccgtgtccgtcatcaaccccgccctcagtaaagctttcgcacagagtgaggggttgcgcagtaaaaccgacaaagtggacgcccgtatgctggctcacttctgccgggaaaaacgcccgccagcctgggaggccccccatccgacagagcgggcactgaaagccctggtgttacgccatcaggcgctgacagagatgcagacacaggagaaaaaccggcgggaaaccgcgccggaagttcagctgaccagcattgatatcctgctggggtgtctgagcgcggagctggcgcgtatcgaaaaacagataaaagacctgacggataatgacccggatatgaaacaacggcggaagctgctgaacagtatcccgggcatcggagagaaaacggcggcggttctgctggcgtatacgggcctgaagctgaagttcggtacagggcggcagttcgcggcgtatgcaggactgacgccggtgcagcatgagtcaggcagcagcgtgatgcgggcgagccggatgagcaaagcgggaccggttcatctgcgcaaagcgctatacatgccagcgttatcggcgctgtaccatacggcgtggggaaaagcgttcaggaaaaggctggaggggaatggtaagcgtgcgaaagtcatcacaggagcgatgatgcgaaagctggcgcaggtggcgtacggtgtactgaagtcaggaaaggcgttcgatgcgtcacagcatgagctgttgatagcgtaa

SEQ ID NO: 206451 - DNA, 318 bp, Klebsiella oxytoca
atgaatgagcgtactcgttttaattacgtcaaaaatagagataaggctttcgcaaatcttattagtatcattgacggcatacttagtgatggcactctcgaccagaaagaaatcctttacctggacacctggttgcttgatggattggcccctatatttccatacactttttatcacttaacccatgactggttcgtcgccgcagatattcccgtggggaacgatatcccagtgcactatgcggatgccattcgttgtaatgttcgaaggcctccgcaaggttctttaccgctgttaacccgtcgggcttcggcatga

SEQ ID NO: 206452 - DNA, 630 bp, Klebsiella oxytoca
atggcggtaaattcaactggtgagcaaaatcgcatttctggccgtgattttaatgaaaataatatacagatagataaatttgatggtcgtcacacaattaacatcgcaatcccttcggaaaagcatgatgaacggccactcgtaaaagcacaacgcaaagaacttaatgcgctcgttgctatggtatccgcaacctgtggcggcgaagcgtatgagatttggcaaaaggtacatgccgaaataggtgtttccagtattgaggaaatgaccgtcaatcagtaccagacagctattagtttcttgcaggccatgatcgggcacggcaaggataaagatgccagcaaagccttggttagccttctgctccgcaatagtgaagacagcgaattgcggcaaaagctaatccgttactgccatgtaaacttcggaaccggtcgattaactgaccttacgcgttcccagcttcagatggctctctcttggcaggatcagcagacacaaacaccacttctgccgctttttgggtcgggcacttcccggcttagttttgtcactttactgcaaacatatccaaaagaaattgctgtctgttttattgcaggcgtcctattgggtgcttttattttttag

SEQ ID NO: 206453 - DNA, 204 bp, Klebsiella oxytoca
atgacccaattaatacagctaagtcggcatagctatgtttatcgtggcttcactattcatatgtgccctaataactcaaaaacaatgaggagagcatataacgtcttaaacaatgggaattactttggtcgtgattttgcgttagctgaagcctgtaaaacgatagaccgcattatcactaatcactgctttattaaccattaa

SEQ ID NO: 206454 - DNA, 282 bp, Klebsiella oxytoca
atgagtatgttcactgaagataaaacttcatgggcacaggaaatgctgatccgcgaggcagtggagaatgcgaggcagggattcacggtacagcttaaaaacggcgcccgtatcatcgtacccgcgaatgattcatcaattgatttaattattcacggtttagagaaatcaatccgtggagactatgagcgcgatcgcctgacgtttatagattttatgtattactggcacgaaaggatatttaagctagctaaaagaaaaaaacagcgccctaacccttaa

SEQ ID NO: 206455 - DNA, 549 bp, Klebsiella oxytoca
atgaataatgtaatgttagatatccgtgatctggggaaatttccggactcctcaattttagccattgagtgcgttttctttgagccgtcaaccgggcagattgggccgcaatactatcgcgctgttgacatcagaacggtcggtggcatttaccccgaggcagttttgcagctcataaagggcgattcagcgcagcgggctgaggtcatcaacgcaacgtgtagcgagatggacgccgctgctggggtatgcaagtttattagggaaaacgcgtcaaaaaacgaaaagatattttgctggtctgctggcaatccagatagcccggcaacgctagcgcacgcgctttctctctacgacatgaccccgtcattaccttcttttgaaatccgcgacctctcgtcgctaatccatatcgcaggcgtcaccgggtacaccccgcatccacgccgctcttccgcaacctacatgttgaccgatgccgtttatcgcgccgagcaggtttgcgagatttggcagcgcctgacctccccacaccttgaatcgctgtga

SEQ ID NO: 206456 - DNA, 174 bp, Klebsiella oxytoca
atgaacacgcttgatgccgttgtgacgcgagttctggacgttcgtccatatcgccatttctggatcgtcgaggtggaggtggtgtgctacggcgatttcagcaacacgaccatcatccgcgatagcgaaaaagaagcccgccaggttcaacccggcgacacggtgacgatctga

SEQ ID NO: 206457 - DNA, 414 bp, Klebsiella oxytoca
atgaatatcagtagctttgctcttgaacgtcattttgccaactccattgcagcagagcatctttttaatcttgcgcgggatctgggtttcctggaaatgggggagaaagaggcgaaaatgtatcaggagaagacgctaaatgcgctaaagacagccagggctgaaaacctatccgatctggatgcctttatcagtaaaaatctagaggggagtcaattatatttggctgatctgaagatgcataattacccaaaatgggtagcaagtaattattttttatatgaattaattgttctactgaaatacccatcaattttcactaaagagtatcaggatgaaaatgaatgggcggacacggtcgccgtaaacgttgagcgcgcactaaaaaaacacgcacccaaaatgacgaaatga

SEQ ID NO: 206458 - DNA, 315 bp, Klebsiella oxytoca
atggctgatattacaaaagatgaacttttgttcaaagattataactggaaagctaaacagcaaggggatgaccccaagaaaaagaaagaggacagcgatcgcttcagccgtcatgaagggtatgaaatgctatacctgctcaatgaaggtttttcaaatagcgccgagctatcagtttctacaaagcagcgcattgaatgggcgatcagaacgcacctaccttcaggtactcaatcccgaagcgatgttgttagctgggttgttaagaacaacgaggctcacaaaaaggcctataaagagcacttagaaaaatag

SEQ ID NO: 206459 - DNA, 156 bp, Klebsiella oxytoca
atgagccaacaccctctggcgcagacagcgcgtgaactcgaaaagcgccaccctaagttgttttctcaaggtaaaaaggcgctttcctttgaagaggcgatgaagcgcacaaaggaaaaacacgccgaaattatcaaaaggcttgaggataactaa

SEQ ID NO: 206460 - DNA, 606 bp, Klebsiella oxytoca
atgatggaggctcgaaataatattctaatgatttctggtgctagtcctaatgcaggaaaaacttttgttagttcaaacttagggggtgttatagcacagactggtaagaagatactctttattgacgcagatctgaggaaaggctatacacataaaatatttaacgtatcaaatgataatggattgtctgaatatctttcagggaaagtaaaactggaagatacaattaagcacctaaaagctgaaggttttgactttattcctagaggcatggtaccaccaaatccagctgaacttttgatgcatcggcgttttggtgaactaattaaatgggtcagccaatcatacgatatggtgataatagatactcctcctattttagctgtcacagatgctgcaattataggtaattacgtaggaacaactttactggttgctaggtttgaacaaaacaccactaaggaattggaagttagtgtaaaacgctttgaacaaagcggtgttacaattaaaggatgcatcttgaacggtgtgataaaaaaagcaagtagctactatggctatggctataatcattacggctattcttacaaagatgaaaagtaa

SEQ ID NO: 206461 - DNA, 498 bp, Klebsiella oxytoca
gtgccggtcaaaaacgtgctggggatttcgaaggatgtgttctggacgttgcaagcggaagattccgacgccaacgagctgaacgccaacgagatcaccacgctcattaagcgcgatggcttccgcttctggggaaaccgcaccaccgacaccgaagaattcattttcgaggtgtacacgcgaaccgcgcagattctggcagacagcatcgcggaagcgcagttcactaccgtggataccccgctgacccctgcgaacgtgaaagacgtggtgagcgggattaacgccaagcttcaggcgctggtcacggcaggtaagctgattggtgcggcctgctggtatgacgtcgttgataacccggtaacaggcattcgccagggtaaagctatcgttcgctacaactacagcccggtgccaccgctggaagatctgacgatgatccagacattcaccgatcagtattacgaatccgcttttgcatcgctgggaggtgaatag

SEQ ID NO: 206462 - DNA, 864 bp, Klebsiella oxytoca
atggtttctcacaatgcgggagtttttaccacattgaccgggccagatgcgcttattaacggtcaaacctatgactctgcccctatgtataccgatttcaagactggcagcgtcgttacaagaatgcttatgggggctcgggttaacgccggtcatgatgattacggattactttcataccgtgactggcatggaaagtggaatgagcttcgcgtccgtcctaacaatgaacttgatgcgggtcagtatgttaaacgcaattcagacggatggtttgtcgcgaaaggttatcgccagatagataacaacgcagccagaataacgaacggtttatgcattcagggggcaggagatttatccgcagacctctatcactcggaacgtattggccagcatcattttctcggcctacatgtggccaacggtggcgcgcagggctggtacgagttccgtaatgatggtcatgcctatactaatggcgcctggcacagcagttctgacgcacgcatgaaaacccaggttgaaaaaatcgataatgcgtttgaaaaactgaatcgcatcagtggttacacctacctgaagcagggggttagcgaagctggcgttatcgcgcaagaggtggaggctgttctacctcaaaccgtctctcggactgaagtgattttaaacgatggccgtgtgctgaaggatgccctcagcctaaatattaacggggtagtagcacttcttattgaggctctgaaggaagaacgtcaggctcgtctggaagacaaagctctgatgctgcaagaacaggaatcgcgaacagatattgaccagcgtctggccgatctggagctccgcgacggacaggagacagaatga

SEQ ID NO: 206463 - DNA, 549 bp, Klebsiella oxytoca; identical to SEQ ID NO: 162301

SEQ ID NO: 206464 - DNA, 384 bp, Klebsiella oxytoca; identical to SEQ ID NO: 149085

SEQ ID NO: 206465 - DNA, 396 bp, Klebsiella oxytoca
atgaaagcgatcgccattcttgccatcgtgacgtttgtcctgctgattgccgccgtcagcggccttgcgtggcaaagccataagcgcgaacaggcagagcaatcacttaccggcacccgggaagaattgaaacagaccggcgatgtgctgacagaggttagggcattgcgccaggacgtcagcttagttgaagccaggctgaaaacactaaaccagcagcgcaccgtaacgggagagcaccgacgtgaaaacatcaaaaccgcactggccggtaacggctgcgccgtttctcctgtgcctgctgctggcgctgacagcctgtaccagcgagccgaagaagtcagcgccgcagattattcaggagcctttaccggaaagcctgaccgcaaaaactga

SEQ ID NO: 206466 - DNA, 219 bp, Klebsiella oxytoca; identical to SEQ ID NO: 161946

SEQ ID NO: 206467 - DNA, 804 bp, Klebsiella oxytoca
atgaataagaatatcttcaaaacgattactgacagcttaaatttttctttaagaaaaaagatcccagtaattttacaatcagaatccgctgagtgcgggattgcttgtatcacaatgatttcatgttattatggacttaatattgatttatttaattttcgaaagcgctatggaagcccgagtcaagggttcactctattatcgttgagcaataatgcggaaagagctggtttaaaaagccgagcgctgtcactagacctggatgaaataaatcagctaaagcttccctgtattatacattggggaatgaatcattacgtcgtactgaccaaggttcgtagatctagctttattatacatgatccagcattgggtaagcgtgttattggcctacaggaaatgtcaaacaattttactgggattgcgcttgagctttggcctgatcagaatttccagcaagagaaagcgaagtcgcggttacgcttactagatttaatgcgaaatattgttggtctcaaaagcacactcattaaaatatttgcttactctgtagtaattgaagctattggtctattaattccaataggtacgcaaatggttacggatcatgtaatcatggcacacgatcaaagtctccttgcagtaatatgtattggtttagtttcatttacattgttccgcacatttatcagtatgttacgtgcatggacgtctttaacattgaatacgctaacaaatattcaatggaaaactacactagactggccccatgaatctccagacagttggtatcacttaaattag

SEQ ID NO: 206468 - DNA, 447 bp, Klebsiella oxytoca; identical to SEQ ID NO: 189918

SEQ ID NO: 206469 - DNA, 495 bp, Klebsiella oxytoca
gtgcagagcggtgggctggaaactgcctggctgcgctggaatgcgcagcgagccggggcgtttaaggtctgggtgccaccatctgtcggtgagcaggtctggttcctgtgtctgggtggcaataccgacgtcgcatttatcggcggcagtttgtacagcgacgacaatccggcaccgggcgcatcacgtaatgagatggtgatgacagcgccggacggcgcgacgtttcgctacagcgcggaggcgggcgcattgcaggtgaagggcatcaaatctgctgtggttgaggcgtcagtcaaaatcacactggataccccggaggtggaatgcaccaacctgctgaccaccaaaagtctcaatgtcaccgaaggtggcgagatgcgcggcgatatcacccacaccggcggagcgtttacgtccaacggtgtgcaggtggatgaccacaatcacggcgctgttgagcgcggaggcagctggacggagggggtgcgatga

SEQ ID NO: 206470 - DNA, 369 bp, Klebsiella oxytoca
atgacagaacgctatcgcgggatgaatgccgcaggcaccggcaccctgaccgacgaggatcatgtgtggcagtcggtgaacgacattctgctgacgccggtcggcagtcgcctgatgcgtcgtaactacggctcgctgtgtcctgatcttatcgacagcccgaaaaacgacgtcacccgcctgcaactgatgagcgcggccgtgatagcactggcggcatgggagccgcgcattgtgctcgatactatcaatgtgacgtactccgccagtggcaccgtgactgccgaactctccggcatgctgaccgagactatggaaaaaagcacccgcgcggtgacattaaggggtaatagcgatgccgacaattga

SEQ ID NO: 206471 - DNA, 900 bp, Klebsiella oxytoca
atgccgacaattgacctgtcacaactacccgtgccgatcatcatcgaggcgctggactttgaaaccattcttaccgacgtgaaagcggtaatggtcgctgcttttccggaggatcagcgggcatctgttgcggcagcgctgacgctggaatctgagccgttgaacatcatcgctcaggcgatagcgtaccgcgaattactgctgcgtcagcgcattaacgagggcgtcgcggcatgcatgttgagtcatgcaaccggtgacgatctggataatattgccgccaatcttgatacgcagcgactcgttacgacagaggccactgatacgacggacgccgtgacagagagtgatgaggcgtttcgcctgcgagcgcaatcggcatttgaagggatgagcgtcgccgggccgtctgcggcttatgaatattttgcgcgcagcgccagtggaaaagtggcggatgcgcgcgcatccagcccatcacctgcagaggtcatcattgccgtgctgtcaacagagggggacgggtcagcatctcctgagttaatcaccgccgtcaccaccgccgtaaacgatgaagaggtgcgacctcttggcgatcgcgtgaccgttcgcagcgctgaaattgtggattacgagattgatgcgaccctttatctgtaccccggaccggagtctgaacccatcattaacgcagcagacgcatcactacagcgctttctcaaggctaatgatcgaaaaattagccgggacgtcgcccgctccgccatttccgccgcactgcacgttcagggggtgcagcgcgttgtactgaactctcctaccgaggatctgaggattagcgatacgcaagctgcgcgcaacactaattatcacctggagaacgggggaactgatgagtaa

SEQ ID NO: 206472 - DNA, 573 bp, Klebsiella oxytoca
atgcgcccacgcatccatttgcgcgtagctgacggcgtagtcgtagtttgttttgcggcacagatagttgtacggatccatcttgtcgttagcgccgggattacgacggttggtggtgctgttgttgacgcccgccagcgggcctttgctgccgatcaggattttctggccgatctgctcttccacgccaaagacgttaatcagcttcagaaaggcatcatcctgctgtgcggcggcttcaaggcgctgctgcacggtcgggtcaacgctgaactgtgccgcaacggcggcggcgctgacgccgttaagctgcgcctggcgggcaacgtagctgtcaaacagcttacgggtagggtttctcatgtgcgggatctctcgttatggatatcagtagtcagcgagctgcgcgttatcgccgccgcctgctgccgggcgctggctgaaattgccgtccgtcccttcaagctgctggcgcagcgcggcaaggtcagtggtcagcttctggatagcagctttgtcctgcttgcgttcctgttcggcagtactgaactgctcgccaagatcaacctgtga

SEQ ID NO: 206473 - DNA, 810 bp, Klebsiella oxytoca
ttgggtgatattcaatctcgtttttcatcactagatattattcgttcaacctttacgaatagcattgtcactgggatcatagatactataatgactattggtcttttgattatgcttaccctatatggtggatggcttgtttgggttgtagttggatttacattatgttacgccataatgcgtttagctacctatagattttatcgccgtgtttcagaagaacaagttattaaaggtgctcgctccagctcgcactttatggagtcactatatggtattgctactattaaggcattgaacctaaaggaaagacgttcacaacactggctaaatctaaatattgacgcttgcaatgcaggaattaagcaaactcgctttgacatgatgtttagcgggatcaatacctttatttcttcaatagatcaagtcgccgtcttatggttaggagcgttagcggttattaacaatgatatgactcttggtatgtttatggcatttaatgcttatagagggcaattctctcaacgagcatccagcctgatagacttgtttatgcaattacgcatgttgtcattgcataatgaaaggctttccgagattgcgtttagcgagcctgaaaaggatatgcctactcgccgtatatttgacaaagatgaaggcgtaaaactggaagtaaagaatttaagttatcaatatgatcctttttcacaacctatcttttcaaatctcaatattataatcgaacaaggtgaatctgttgcccttattggtccatcaggtattggtaaaacaacactcttaaaagtctga

SEQ ID NO: 206474 - DNA, 381 bp, Klebsiella oxytoca; identical to SEQ ID NO: 193288

SEQ ID NO: 206475 - DNA, 834 bp, Klebsiella oxytoca
atggctaatcaggcaaccacccgcaagaaatttaaggtcatgacgtccggaacaacggtcgatggccgcaatgtcacccgcgcacagcttcatgcgatggcggcagcgtacaacccggcagtctatggcgcgcgcgtcaacattgagcactatctttccccgttccctgacagtgtatttagcgctatgggggatgttgttgctctgtccgctgaggatatcaacgaaggcccgctgaccggggaggcgcatctctttgcagagattgagcccactcaacgcatgaaggacatgctggccgacggcaagaaggtctattccagcaccgaaatacaccccagcttcccgctgacgaaaggcccgtaccttatggggctggcgatgaccgacaccccggcaagcctgggtaccgataagctgaaattcaccgctgaaaagcgcgccgagatcatgcgtttcagttcgcaggatgcagaagtcaccttgtttaccgcttcttttgaggccgaactgatgcaggaaaatcagagccgtaatgattcaggtaaggaatggttctcccgcgtgatgggcattctcggcaagggtcagaaaaccgacgatcagcgttttagccaggtgcatcaggctgttgaggtcgtggcgcagtctcaggttgatcttggcgagcagttcagtactgccgaacaggaacgccagcaggacaaggtcaccatccagaagctgaccaccgaccttgccgcgctgcgtcagcagctggaagggacggacggcaatttcagccagcgccagccagcgaacggcggcgcgaacgcgcagctcgctgactactga

SEQ ID NO: 206476 - DNA, 510 bp, Klebsiella oxytoca; identical to SEQ ID NO: 16873

SEQ ID NO: 206477 - DNA, 240 bp, Klebsiella oxytoca
atgaccgatggcacgcttaacgtcggttgcaccggactgggctggtacaccaacgccaaaggccagaaggtgcgaaccaccctctggcgccacgcgcaggccggtaactggaagggcgtatgcgaacggttgacggactttgtgaactccgccgggaaacgctcgcagggactggttaaccgtcgggaagacttcaaagcctggtgtctgtctgatcccgccctcaggggggcgaaatga

SEQ ID NO: 206478 - DNA, 204 bp, Klebsiella oxytoca
atgccattcgtccatgaggctgtttttagcgtcatagaccgccgccgctacgttgccataggtgccctgagcgacaatggcgttgttctggtcacgcgaggtgatcgtcacgccggtaatgcgacggtgtgcagcttcattacgaattttttgcagccagccgatgccgcaatcctgcaacagcggattcgctgcgcggtctga

SEQ ID NO: 206479 - DNA, 363 bp, Klebsiella oxytoca
gtgattgccgacgagctgggcatctcccgcgctcagttcgaacagttcctgcgcatgatgcagggcggggcacagtttggcggcggttcgcagcagcaatcttacggccagcgcggcggcaacgccggctggcagcaggcgcagcgcgggccaacccttgaagatgcctgcaatgtgctgggcgtcaaagcgaccgacgatgccgccaccgtcaagcgcgcctatcgtaagctgatgagcgagcaccatccggataagctggtggcgaaagggctaccgccggaaatgatggagatggctaagcagaaagcgcaggagatccagaaagcctgggagctgattaaagagcagcgcggcttctaa

SEQ ID NO: 206480 - DNA, 474 bp, Klebsiella oxytoca
atgaaaatgatccccagagcgtggtttaaccgctcccgtattctgatgaatgctgccgaaaacataacgttttcggcgaacgatcctgccggtgaaagctcgccgcggtcggaactcttttcgaccgtccagatggaacgctacggccagaagctggcgcggactcataaagtatcaccggataggcatccttattatcttctgaaacggcttggcgacaatgaggccgtcattacccaaaactgctatgagcttaacgcgggtaaaaagaccagtatcatgcccgccggtgaatggctgctggacaattattatctgattgaggaacaaatccgcactgtccgccagcatctgccgaaaagctttggcaaaggtcttccgtcgcttgtatcgccgttgaattgcccacgaatttatcatattgcatcagaggccattgctcacggcgatggccgctgggatgccgccacctga

SEQ ID NO: 206481 - DNA, 147 bp, Klebsiella oxytoca
atgtgtatctggttttcgaaaaaacatactctgctcaaaatggatgtattttatgctattcaatccgatttttattttcgttgctggaatattatctattttttatctttttattctaccacctttggtggcaacaggaataattga

SEQ ID NO: 206482 - DNA, 537 bp, Klebsiella oxytoca
atgaccacaatcgcccttattgacgatcatcttatcgtccgctccggctttgcccagctgctggggctggaagccgattttcaggtcgtcgccgaattcggttccgggcgcgaagcgctggcggggctgcccggccgcggcgtgcaggtctgtatctgcgatatctcgatgccggatatctccgggcttgagctgttaagccagctaccgaaagggatggcgatcgtgatgctgtcggtgcacgacagcccggcgctggtggagcaggcgctgaacgccggcgcgcgcggctttctctccaagcgctgcagcccggatatcgccatgaagctggcggccgggcgacgggacccgctcaccaaacgcgaacgcgaggtggcggaaaagctggcgcaggggatggcggtaaaagagattgccgccgagctgggcctgtcgccaaaaaccgtgcacgttcatcgcgccaatctgctggaaaagctgggcgtcagcaacgacgtcgagctggcgcgccgcatgttcgatagctggcaatga

SEQ ID NO: 206483 - DNA, 183 bp, Klebsiella oxytoca
atgacaaccatactttcaaacttcctgtgcggtgcagcgctgatatggctgggataccttgtcgttctgtttatcctttgggagcggcctacacgtacttatacggccttttttggccggttatcgatacttttcggcgttgtgtgcgcgctggcaatggcgctcaaggaaggtgccgcatga

SEQ ID NO: 206484 - DNA, 678 bp, Klebsiella oxytoca
atgaaagaacgcggaatgatttttaacggggagatggtacgggccatcctcgacggtcggaagacgcagacccggcggcctatcaaatggaaacagactcggttcactgaagttggtgagcgcgaagacggtagcaaatggccgtggagcgaagatgcagagcatgcttgcgacttctggcacccatgcccgttcggcgccgtcggcgatcgcatctgggtgcgcgagacgtggcaagcaatccatgactctgttgatgaattcggtcacgtcgaagaacgaacctatgcgccgtcgatatcaaaagaaaaggatcgctactggcacaccgtatatgcggaacattttggcgatgaaagccgtgaagaccgaggctttccgtggcgaccatctatccacatgccgcgctgggcaagccgtatcacgctggaaatcaccgatgtacgcgttgagcggctgaacgctatcagcgaagaggatgcccgagctgaagggattattgatggcggttgcctcaattgcggagagccggagccatgcggctgtgttaatccacaaccagacgcaaccgatgccttcgcctacctctggcagtctatctatggacgagaaaattgggatgccaacccctgggtttgggttatcgagttcaagcgcgttgaaggcggtgcagcatga

SEQ ID NO: 206485 - DNA, 741 bp, Klebsiella oxytoca
atgttggaatcactcagagaatatttttcttctaccatcaatacagcagccaacagaatcagcaaccctgtttttggtgcatttgcactttcgtggtgtgcatttaactggaaacaaatactttatttgctttttgccgataacagcatttattacaaaatagaatatatctccgaaaatagtaactggttaaatatttttttatttccaattttttcatctttagtactttgcattggcttgccgtggttgaataatgcaataagcaagttacagagcaagccactcgataacgcggattccatagaaaactttaagcaggcaagaaagattcagcgctccactcgcttacagcgtttgaaagccaagcatgacgtgacttatgataaagttaaaaccggtgccgagaaagacatccagaccatgaaggaagacattactaaatcacaggaaaggatgggtgaattaacaaaagaaatcgacacccttaaatttgataataatgacttgacaaacctaaactcagggcttagcgataaggtcagatatttggaagggacaatccataatacaaacattgaaaacgagaaattaaaaaaacaattagatgagattaagggatattttaatattgaaactaaaaccttagttgacaggaccataccaattactaataccaactctaacgggatggctaaatttcatatggaagaaaaaaataatcactcccaggggtcatag

SEQ ID NO: 206486 - DNA, 123 bp, Klebsiella oxytoca
atgcccggcgaaccgggcgaaatggaagcaatgaggggtgccatccttggctgggtgtcacagggtttacagcatgaagccatcgcaatggcgtcctgctgtaaaaagggcggtggtcagtaa

SEQ ID NO: 206487 - DNA, 2499 bp, Klebsiella oxytoca
atgccaaccgttccgcaatatcaacgccagagccagacgcaaaccgcgccggtgatgacgagtaatcttcgtgtgccggaaaatccgctggtgcagggcatccagcaggctgctgatacgtcgatcaatatgatggctgatgcaaagcgcaaggctgatgtagcgcttagccaggatgctctgctgcagtttaatcagttcggtgatgaccagttcaacaatcctgaaaatggtctgataacgaagcagggaaaggctgcgctcgggcaaagcgatgtcgtcatgcagaacatgcagcagaaagctcaggacttgctgggtacagtgccggatggcgaggcccgtcagcagttgtcttttcaattgcagcagtcgatgcagtcatttcacaaccaggcccgccggtatgaggttggccagttccagcagtttcaggatcagcagttctccgctattaagcaaaacgtggtaacccagtctcaggggctctatggcgatgatgcagcgtttgttaatacggtaaaaatggggtttgatgcgatcgatcagtacgccgccgctcatggatggagccaggaacaggttgtagcggaaaaagaaaagctgaaagagcaggcggcagatggcgcgctgagtactgcagcatcgcaacagtatattcagttcatgcagcagaatggtgagcctggagacaatgagggtgcgccacgtgttacggcgcatggtaattcgtcagccgccagagggctgcgaaataataatccggggaatatcgaagccggttccaattcgtgggatggccaggctggtagtgatgggcgttttgcgaaattcgtgacccctgagcatggtattcgtgcgctgggtaaaaacctgctttcgtaccagcggcagggttacgacacagttagcgagatcgttaatcgttgggcgccggccagcgatggcaataacacagaagcgtacattgccgcattatgcaaaaagctgaatgtcacgccaaatgaccagcttaatatgagcgacattaataccctgcgtcagctctgcgctggcatcatccagcacgagaacgggaaacagccatatagcgaggatcaactgaacactggcgtttctgccgcgcttggtcttactactctggaatcgcctaagcgatattcagggaatcaagctttcgacgccgcaagcccgcagcagcaggcggcatatttacgccagtctatggagctgcggaaccaggctcgtacgcagttcaaggcccaacttgttgatcaggtgcaggatgcaaccgctgcttatctgaaggggatccagttcgataatccgccttcacagggcgacttcattaacgctttcggttaccgggaggggacacagcgttttaacgatttcgaaaacctgcgcgttgccgggcagtatatcggatctttccgcacaatgccgacggcatccattcagcaatatgtcagtgatctaaagaatcaggttggtaatggagaagggctggcagggcgcgcagcagcattcgaccatgttcaggctgctgctgatgaagttattaagcagcgtaaggcggatcccattcagttctcactttcctctggacaaaccaaaccaattgatatgtccaaccaaaataatttcggtcagagcattggactgcgtgcttctcaggtttatgagttggctagagcatacggaacaccgttgactttcttttccaaagaagaggagagccagatcggtaaattcttccgagacgccccggtttcgcaacaatctgcgtatctcgacacgatccacaaaagcaccggcggcggtaagccgtacatggcagcacttcagcaaatcagcgcgaatgcgccgtctgctgctgttgccggaattcttatggacaagcctggcggcgtggttgctgagaaaaactggttcaatcctgacgtgtctgtgtcgccctctaccgcatcgcaaaccattctggctggtgccgcagcacgcaaaggatcgaaagaagccaaaggcattaccatgccgaaagaaaacgatatgcggctcgagttcagcaatgccgttaaagatgcatttgccggtgacgcacagggcgcatctatggcgtatgacgttgcgaaagactactacgcaggagtaatggcgcagaagggcgatctctctggcgagctggattctgacgtctgggagcaggcgataaacgtcgctactggcggcgtgcatgactataacggcatgggtaatgtcctgctgccgtggggcatgtcttctgagcagttcgataaagaggttaatcaggcatgggaaacgcaggttaccggtgctggcgttaaggctccgcctgggcagtacggcctgcaaagctacggcgacagccagtatctcgtgaaacttggtaccggataccttctgaaacaggacggaacaccggtagttatcgatctcacgcagcagcgtcagcgcttctctggagatatccctcaatga

SEQ ID NO: 206488 - DNA, 366 bp, Klebsiella oxytoca
ttggtggggcttgcactggataatagcggcaccgattgcattcatcgtcagctatataccactggttggatctatcgtgggaatggttggagccatggacgtatggcgctgggagtggtggcaggctggtctacttttctttggtggtctaatctttgctatcgcctgtgggggtatgtcttcattattcgaatggctatcattcagaaagagagcgtgacatgtcactccaacaaacaggccgctttcgcggccttaattatcactgaccgccggggcgggagtcagcagaacgtccgccacagcgtgagccatcagctgcagtatcatcaggatgctggcagttaccagcgaaagcttgtgtag

SEQ ID NO: 206489 - DNA, 501 bp, Klebsiella oxytoca
atgacactagacgcagttacattacaaataattagcaatatcatagtgttaataggcgttcttgtcgccataatcaccattgtctataacgtgcgaacagcgaagaaaacacagaccgctgtatttctgttcgaaagcagaaaagacaaagactacatcgagtcactgcatatcctcaagaaagcccaccagtcaggaaaatcattccgttcgtatgttttccccatagaaggcacttctataacagaacaggaaatggatgaacgccgtaagttccagtatatacttaacttttatgagcgcgttgcagtaagcatcaggcaaggtatctataacgaagagatgatcaaacgaacttcgtacacaactgttatcgaaacttgggatattgctgaaccgttgattagagccatacgagaaaaaataaactccgaaattacctatcaagaatttgaatggctagctaccaggtggaaaaagaagaagctgaaaaagaattaa

SEQ ID NO: 206490 - DNA, 2673 bp, Klebsiella oxytoca
atgacagtttcaacgcaggtaagccgtaacgagtacaccggaaacggcgccactacccaatacgatttcacgttccgcattcttgataaaagccacctgctggtgcagacgctggatacctccgaaagcatcgtgacgctaacactcggtaccgactacacggttaccggagtaaaccgttacaacggggggaaggtggttctgacatcagcgctgccagctggctacaaaatctctatcgagcgcagcacgccggttacgcaggaagccagcatcaggaaccaggggggcttctttcctgagatccacgaagatgcttttgataagctgactatgctggtgcagcaggcgtacggatggtggtctggtctatctctccggaagccatcatggctcgcgaactattacgatgcgctcaacaaccgtattcgtaaccttcgtgacccgtcacaggcgcaggatgctgctaccaaacattatgttgatgatcagattaacaacaccaattcagcctggcaggaaggagatcgggttcttgatcagaaaattgattcaaattttagacggagcctccgtgttccggattcctatgttgaagcgcttcctctattaagccagttagaaggtaaaatactcgctttctcgggaggaagacctataggggttctccctgagtcaggatctgcagctgatgtgatgatagagcttgctgacgatgatggttatcgacatgttggtgagtgttcgagcattagtgagcttcgagctgtaacactcgattatcacggtcagaaagtgaagttaaggtgctgggatatgtctcagactactgcgcttatcgacgtgttttatgtctatgatgcgacagatacgacatctgcagatgatggttacaggacaatagtcaatgcggcaggtcagcgctttaaagcactgctgagtgatgctatcgatttacgcattgcaggtttgcgttcgtacggcgataaccttggcacctcctttaatcgtgtactggcagcggagctggctcgagtaaccgcctcgggatcagcaatgaaaatggcgaccatcaagttgccagcactatcttcttttgatgacccgaacatctcgacttataacgctattctcaacgcatccatagtaatgccatcatttttaccggttgcagtggatggaaactatttttgcaagttcaatccgactaatgatgttgcattaaaaataactaacagtcttccaggcgttacaccatctcttattccttggcgcgatatgaaaagcgtcaaaatgtttaaaaacacatctggtcattttgaacttatcggccccggttcaaccgcaagtcaggctgcagggttacagattggtaatggcagtgctggtgattctgttctggacctgcgtgggttatcaatcgacgatattcaaatacgcgctttccgttatggtctggatttcatctggaatgatacttatattttaaaattccataatcttgagttgaccggaaactatacgaatatatcttcgcttattgccgggaaagtaaactctggcgaaaatatcagaataagtgagtcgttaattgctgattctgtttctcatcaattcaactggaactccccaggaattggtttagcactggatggatgcagcactgactatgccggagggtcagttttttatcttgataatggcgcccgaggtaacaccattgactataatggcgggcacattgagggctggggaggaatgctagccctgcaagtagcccagtccgttgcgtggtatggctacccaaactcactaactttcaacggcactcagataaaagcagctggtaatagtcctggggtatgggcttcacgtcgcaagattttgcattcaggcgtagttcttgatgagctgggaacgaaggtgatgttcagggacagtccgatctactggcctgcaccagcgtcagagccacatgttgctttgacaggctacacggacccgactcctcaatatatgagggtgatttataactgcccaaactcaccgtatcctgattgccttggaagctatcgccagtcaacaaacaaaggactttatcgttttggcggaacggaaggaaattccgttaaagggcttgttgattcattaactggttttacattctcaaccaatggcaatccgacgattgtatatgggggtgtcgattctgatgggttgcagcatatcatcatcaatttcgatgctacaacaacatgggtggaaatatgtaataaagggctttattacgcgcttgagagagaggcggaaattaatacagcattgtctgttatgatggaaaatatcaccgagggagacctgaaacttaatacccgcttcctgtactactatggggcagcgaaaacatatgatggatatgaggatggtaaaacaaaaagcctgacctcattgcttactgcaacttataacggattaacaactccgctaactacttcaatgtatgttggagaacaaacagcactctcatacatcaggcaggatagcgctcatccaacgcaggcggaatacgttcagcccgccatagtgctgcgcggtgcaaaaggtcaggctcggattaaactcccggcaatatggcccaccaagggcagaggttcagcttttgtgttcagttaa

SEQ ID NO: 206491 - DNA, 198 bp, Klebsiella oxytoca
atggttactgcgaaatttatttgttcatatctgtatcaggcttctgataattcccggcttgatgtttacctcgatccggttctggaagaaggaaaaccagcaggaagtgtatcattaaccctgaccaaccctgatgagtatcaggagtttaagcaaggtaaaatttacacattaacattcgaggaaatcggggagtaa

SEQ ID NO: 206492 - DNA, 879 bp, Klebsiella oxytoca
atgagtctggatatcgaccagattgccctgcatcagttaatcaaacgtgatgaacaaaatctggagctggtgctgcgcgaatcgttgctggagccgacggcgacggttgtcgagatgatggccgaactgcatcgtgtctatagcgcaaaaaataaagcctacggcctgtttaatgaagagagcgagctggcgcaggcgctgcgcgggcagcgtaagggcgaagaagcgttcctgccgtttagccgcgccgctaccgggcgcctgcgcgacgaactggcaaaatatccctttgcagaaggcggtattgtgctgttttgccagtatcgttatctggcggtggaatatctgatggtggcggtgctgaacaacctaagcagcatgcgcgtcaacgaagagctggatatcagctccacccattatctggacatcaatcacgcggatatcgtcgcgcgtattgatttaacggagtgggaaaccaacccggagtcaacgcgctatctgaccttcctgaaggggcgggtagggcgcaaggtggcggatttctttatggatttcctcggcgccagcgaagggctgaacgccaaagcgcagaaccgcggcctgctgcaggcgcttgatgatttcgccgccgatgcgcagctggataaatctgaacgtcaaaacgtgcgccagctggaagagagcttcccggcggatcgcagcacgctgcgtcagttaaccaagtttgccggcagcggcggcgggttaaccattaattttgacgctatgctgctgggcgagcgggtgttctgggatccggctacggataccttaaccattaaaggcacgccgccgaacctgcgcgaccagctacagcgccgtacttctggcggaaattaa

SEQ ID NO: 206493 - DNA, 516 bp, Klebsiella oxytoca
atgcatatccgaggtattcatgtcgtctttttcataccaggtggcggtcggcagcacgatgtcggaatagaggcaggtgctcgacagacggaaatcgagtgtcaccaccagatccagcttgccgtcgagaccgttgtctttccactccacttcttccggcttcacgccgccctgcttaccgagatctttgccctgaataccgttttccgtacccagcaggtacttcagcatgtactcgtggcccttaccggaagagcccagcaggttagaacgccagataaacaggttgcgcggatggtttttaccgttttccggctgctctgcggcaaagcgaatggaaccctctttcagggatttgacggtgtaatcgaccggcgtcatgcccgctttcttcgcctcttccgcgatgcgcagcgggttggtgcccagctgcggcgccgacggcagccagcccatacgttcagcgcgcacgttgaagtcaatcaggtggccgctgtagcgggatttatccgctaa

SEQ ID NO: 206494 - DNA, 723 bp, Klebsiella oxytoca
atgacgcgccggacgctgccagtcgagagcaaacgccagcggctgccatccggtctgcggacgcagtttttcctggccgacatagtgcgcccagccgccgccgctctgaccgacgcagccgcagaagatcagcatattgataagaccgcgatagttcatatcgaggtggaaccagtggttcagaccggcgccgacaatgatcatcgaacggccgtgggtcttatcggcgttatcggcaaactcccgcgcggtacggataatgtgcgcccgggaaacgccggtgattttctccgcccatgccggggtatacgctttgacgtcgtcgtagctgctggcgcagttttcatcgccaagaccgcgatccagaccgtagttcgccatggtcaggtcgtagacggtggtgaccagcacgctagagccatcggccttctgcaggcgtttgaccggcagtttgtgcagcagcacattttccagctcgactttattaaagtgctcggtaccttcgccgccaaaatacgggaagccgacgttggcgatatcgtcgtggccgcccagcaggctcaggcgcagctcaacgtcttcaccggttttgccgtcgcgctgttccagattccacttgcctttgtcgccccagcggaagccgatagagccgttcggtacggtgatttcgcccttctcatcaaaggcgacggttttccattccggattcgtttcctgacctaa

SEQ ID NO: 206495 - DNA, 1413 bp, Klebsiella oxytoca
atgactgaatcttttgctcaactatttgaagaatccttaaaaacaatcgaaacccgtccgggttccatcgttcgtggtgttgttgttgctatcgacaaagacgtagtactggttgacgccggtctgaaatctgagtctgccattccggcagagcagttcaaaaacgcccaaggcgagctggaaatccaggttggtgacgaagttgacgttgctctggatgcagtagaagacggcttcggtgaaaccctgctgtcccgtgagaaagctaaacgtcacgaagcttggatcacgctggaaaaagcttacgaagacgctgaaactgtagtcggtattatcaacggcaaagttaaaggtggcttcactgttgagctgaatggtattcgtgcgttcctgccgggctccctggtagacgttcgtccggtgcgcgatacgctgcacctggaaggcaaagagcttgaattcaaagtcatcaagctggaccagaaacgtaacaacgttgttgtttctcgtcgtgccgttatcgaatccgaaaacagcgcagagcgcgatcagctgctggaaaacctgcaggaaggcatggaagttaaaggtatcgttaagaacctcactgactacggtgcattcgttgatctgggcggcgttgacggcctgctgcacattaccgatatggcatggaaacgcgttaagcatccgagcgaaatcgtaaacgttggcgacgaaatcactgttaaagtgctgaagttcgaccgcgaacgtactcgtgtatctcttggcctgaaacagctgggcgaagatccgtgggtagctatcgctaagcgttatccggaaggtaccaaactgaccggtcgcgtgaccaacctgaccgactacggctgcttcgttgaaatcgaagaaggcgttgaaggcctggttcacgtttccgaaatggactggaacgttgcaggcgaagaagcagttcgtgaatacaaaaaaggcgacgaaatcgcagcagttgttctgcaggttgacgcagagcgcgagcgtatctctctgggcgttaaacagctcgcagaagatccgttcaacaactgggttgcactgaacaagaaaggcgcaatcgtaaacggtaaagtcactgcagttgacgctaaaggcgcaaccgtagagctggctgacggcgttgaaggttacctgcgcgcttctgaagcttcccgtgaccgcgttgaagatgcaactctggttctgagcgttggcgacgacgttgaagctaaattcaccggcgttgatcgtaaaaaccgcgcaatcagcctgtctgttcgtgcgaaagacgaagctgacgagaaagatgcaatcgcaactgttaacaaacaggaagatgcaaacttctccaacaacgcaatggctgaagctttcaaagcagctaaaggcgagtaa

SEQ ID NO: 206496 - DNA, 3420 bp, Klebsiella oxytoca
  misc_feature (3345)..(3354): n is a, c, g, or t
atgattgaacgcggtaagtttcgctcgctgacgctggttaactggaacggtttttttgcccgtacttttgatctcgatgaattagtgaccacgctttccggtggtaacggtgccggtaaatccacgaccatggccgccttcgtcaccgcactgatcccggacctgacgctgctgcactttcgtaacaccacggaagcgggggcgaccagcggctcgcgcgataaaggcctgcacggtaagctgcgcgctggcgtctgctactccgtactggacgtgatcaactcccgccaccagcgcgtggtggtcggcgttcgtctacagcaggtcgccggtcgcgatcgtaaagtcgatatcaagccttttgcgatccagggcctgccaacctccatccagccaactcagctgctgaccgaaacccttaacgagcgccaggcgcgcgtggtgacgctcaacgagctgaaagataagctcgaagcgatggaaggggtgcagttcaagcagtttaactctattaccgagtatcactcgctgatgttcgacctgggcgtggtggctcgccgcctgcgttcggcttcggaccgtagcaaatactatcgcctgatcgaagcctcgctgtacggcggtatttcgagcaccattacccgctcgctgcgcgactacctgttgccggaaaacggcggcgtgcgtaaggcgttccaggatatggaagcggcgctgcgtgaaaaccgcatgacgctggaagctatccgcgtgacgcagtcggaccgcgacctgttcaagcatctgattagcgaagccaccaactacgttgccgccgactatatgcgtcacgctaacgagcgacgcattcatctcgacaaggcgctggagtatcgtcgcgatctgttcacctcccgcgctcagctcgcggcggaacagtataagcacgtcgatatggcccgcgagctgcaggaacataacggcgcggaaggcgatctggaagccgattatcaggccgccagcgaccatctgaacctggtgcagaccgctctgcgccagcaggaaaaaatcgagcgctatgaagctgatcttgatgaactgcagattcgcctcgaagaacaaaatgaagtcgtcgcggaagcggttgaccagcaggaagagaacgaagcccgcgccgaagccgccgagctggaagtggatgagctgaaaaaccagcttgccgactaccagcaggcgctggacgtgcagcagactcgcgcgattcagtacacccaggcgctgcaggcgctggagcgggcaaaagccttctgccatctgccggatttaacgccggagagcgccgacgagtggctggaaactttccaggcgaaagagcaggaagcgacggagaaaatgctgtcgctggaacagaagatgagcgtggcgcaaaccgcgcacagccagtttgaacaggcttaccagctggtggcggagatcaacggcccgctggcgcgtaatgaagcctggaacgtggcgcgcgagctgctgcgcgaaggcgttaatcaacgtcatcaggccgaacaggcgcacgggctgcgcagtcgtctgacggagcttgaacagcgtctgcgtgaacagcaggatgccgaacgccagctcaatgagttctgtaagcgccagggcaaacgctacgatatcgacgagctggaagccctgcaccaggagctggaagcccgcatcgcatcccttgccgacagcgtttccaccgccagcgaacggcggatgaccctgcgtcaggagctggaacagctgcagtcgcggacgcaaacgctgatgcgccgcgcgcccatctggctggcggcgcagaacagcctcaatcagctgtgcgagcagagcggcgagcagtttgagtcaagccaggacgttaccgaatatctccagcagctgctggagcgtgaacgcgaagctatcgtggagcgcgatgaagtcggggcccgcaagcgcgctatcgacgatgaaattgagcgtcttagccagccgggcggttcggaagatcagcgcctgaacgcgctggcggaacgttttggcggcgtactgctgtcggaaatctacgatgacgtgagcctcgatgatgcgccgtattactccgcgctctacggtccttcccgccacgccattgtggtaccggatctgtcgctgattgccgatcagctggaaggtctcgaagattgtcccgaagatctctacctgatcgagggcgatccgcagtcgtttgatgacagcgtattcagcgtcgatgagctggaaaaggcggtggtcgttaagattgccgatcgtcagtggcgctattcacgcttcccgacgctgccgctgtttggccgcgccgcgcgtgaaagccgcgttgaaacgctgcacgccgagcgcgaaagcctgtccgagcgctttgcgaccctgtcgtttgatgtgcagaaaacccagcgcctccatcaggcgttcagccgctttatcggcaaccatcttgcggtggcctttgaggacgacccggaagaagaaatccgtaaactgaatacgcgtcgcggcgaactggagcgggcgctgaccgcccatgagagcgataaccagcagaaccgggtgcagtatgagcaggcaaaagagggcgtatccgcactcaaccgcctgctgccgcgtctgaatctgctggccgatgactcgctggccgatcgcgtggatgagatccaggaacgccttgacgaagcgcaggaagccgcgcgcttcgtccagcagcatgggaatcagctggcaaaactggagccgatcgtttccgtgcttcaaagcgacccggagcagtttgaacagctgaaagaagattacgcatattcgcagcagactcagcgcgacgcgcgtcagcaggcatttgcgctgaccgaagtggtgcagcgtcgcgcccactttagctactccgattccgcagagatgctgagcggtaatagcgatctgaacgagaagctgcgccagcgtctggagcaggctgaggcggagcgcgcccgtacccgtgaagcgctgcgtacacacgccgcgcagctcaaccagtacaaccaggtgctggcatcgctgaaaagctcctacgacaccaagaaagagctgctcaacgacctgcataaagagcttcaggacattggcgtgcgcgccgacgccggcgccgaagagcgcgctcgtctgcgccgcgatgagcttcatgctcagctcagcaacaaccgcgcgcggcggaaccagctcgaaaaagcattgaccttctgcgaagcggaaatggataacctgacccgcaggctgcgcaagctggagcgcgattattgcgaaatgcgcgaacaggtggtcagcgctaaagcnnnnnnnnnnggtgaaagacaacggcgtggagcgtcgcctgcatcgtcgcgagctggcctacctttcggcagatga

SEQ ID NO: 206497 - DNA, 1005 bp, Klebsiella oxytoca
atgtcggataaggcgctcggcgcgctgcgtctggcggtctcggataacgaacacctgcgcgatgtactgcgtatttctgaagatccgaaacgcccggagcgtaaaatccagttctttgtcgccgtttatcagcatctgcgcgagcgtattcgccaggatatcattcgcaccgacgatccggtggaagcgattgagcagatggagatcgaactcagccgtctgacggaagagctgaccaaccgcgagcagaagctggccatcagttcccgcagcgtggccaatattatccgcaagactatccagcgcgagcaaaaccgtattcgtatgctcaaccaggggctgcagagcgtctccttcggccaggtcaacagcgtgcgtctgaacgtcaacgtgcgggaaacccactcgatgctgctggacgtgctgtcagaacagcatgaacagcatcaggacctgtttaacagcaatcgtctgaccttctcggaagcgctggcgaagctgtatcagcgcctcaatccgcagattgatatggggcagcgtacgccgcagaccatcggtgaagagctgctggactaccgcaactatctggagatggaagtggaagttaaccgtggttccgacggctggctgcgcgcggaatccggtgcgctatcgaccggtgaggctatcggtaccgggatgtcgattctggtgatggtagtacagagctgggaagatgaatccatgcgcctgcgcggtaaggacatttcgccgtgtcgtctgctgttccttgatgaagcggcgcgtctggatgctcgctctatcgcgacgctgttcgagctctgcgatcgtctggagatgcagctgattatcgcggcgccggaaaatatcagcccggaaaaaggtaccacctataagctggtgcgtaaggtcgtgaataatcacgagcacgtgcacgtcgtcgggctgcgtggcttcgcaccgcagctgcccgaaacgctgccgggaacggcaaatgcttcatag

SEQ ID NO: 206498 - DNA, 618 bp, Klebsiella oxytoca; identical to SEQ ID NO: 164442

SEQ ID NO: 206499 - DNA, 603 bp, Klebsiella oxytoca
atgaacacgtcaccgtggaacaaagaccgtatcataggccaaaaaagaccacttcagatatctcatatctggggtatccgaatccgacttgaactagaaggtaaaacgcgcgatttagctctgttcaatatggcccaggacagtaagcttcggggctgtgatctggtcaaactcaaagtatctgatgttgcatatggtagctctgtttcaagcagagcaacgatgttgcaacagaaaaccggtagccctgtgcaatttgagataaccaaagggacaagagaagctgttgctgcattgataaagcttggcaatttgcacagtaaagacttcttgttccggtctcgggtcggaactaaccagcacatttcaacctggcaatacaaccgaatctttcatgtgtgggtagaaaagcttggtctcgaagattcgctttacagcacacattccatgagaagaacaaaaccttacttgatctacaagaaaaccaagaatctccgggtgatccaacttccgttgggccataagaaactggaaagtacagtccgttatcggggcattgaagtcgatgatgcgttagagatctctgaatcgattgaagtctaa

SEQ ID NO: 206500 - DNA, 1041 bp, Klebsiella oxytoca
atgagttctgaaaaagcaaatcaatacgaacaccttatgaagaacaggccacatgtcgttatcctgggtgctggcgcgacaatggcggcgattcctaacggggacaaaaacggcaggaaatcatctgccatgaacggattcataaaatcgctaggaatgactgaaatcctcaaggaagtcagtcttcaaactagcagcaataacctagaagacatttactccgagcttcacgatcgccctgaatgtgatgccataagggaagacctagacagacgaatacgtgagtatttttcagaactggagatcccagatgaaccgaatatttatgacttgctgctcttggcactgagaaagaaggaccttgtcgcaactttcaattgggatccgctgttgttacaggcgtatcaacgcgcttctcagatcactaaggatttacccgatcttgcattcctgcatggaaacgtacttgtaggctattgccgcaaacacaagtgcggtggaattctcacggcatgctgtcgggaatgcggtgaaccttttgatcccgctccgctgctctatcctgttacacataagaattacgctgccgatccttacattcaggacaactggaaggccattcaaaacaagctgaaacgcgcatatttagtaactgtcttcggctatagcgctccaaagactgatgttgaggctattgctcttttgaaggaggcttgggggacagttaacgagcgcaatcttgaagattttgagttcattgacatctgcgacgaagacacccttatttcaagttggcaagaatttattcattcgcaccattaccaagtgcataaaaatttcttctcgtcgagtttggcacagcatccgcgtcgaacgactgtagaactcttcgatcgcactatgaattgcatgtttactaaagcagttcgaaagtttactcccggtatgcgatgggaaaacatcaattcccttgtaaccgagcttgttattgaagagaacaagctttcggctgagggctttttggtcacacaaaaggcctag

SEQ ID NO: 206501 - DNA, 1428 bp, Klebsiella oxytoca
atggaaatattattcgttgaagataactcatcttacgctgacacactagtttctgctgtaaaagacaagtttcctgagataacttgcgtcgttgtcgataactctagctcagcagaagctcttttggataagaattattacgatcttattattctcgatctttgcatgccaagcgtaccgtcagggcttgaaaaagtagtagagaatgggcaacagctattttactctgtgcaacggttaatgccgggtacccctatttatattctcacaggttccgaactggatagcttcgctactaaccttttaagacacggagaaaggatcaaactctggggggcggtgagagaattctctaccgttctatactttagaaaagatgaaaccctagagctgatgaaggaattgtcagaggtgtatgacgaggtagtatccgtaaatgctacagttataaacacccgaggtaaaaatatagctttcggaagagggcaagagcgagcactgcaaagctttgtaagaagcatggggggatttgatggagtctactatccattgagtgggctatctggctcgttggtcggcagaatcgaagtccgcgatgatcgttttaatgtaataggtgtattcgtagccaagcttggattgtcatcaaagatccagaaagaaaatgaatcatatgcgcggcatgtaagacttatgcctatgaatacatttacacctttattacttagtatggacaaggggcttagagagtatagcgcgattttctatacgctcgctgagggttatacagataccttatttcaggttgtccggaatgatccatgcaaggctgtagatgtgattaaaaaggttcgcaatagcatggagcgttggtccactgcgcgaaaagtttcaagagttaaagtcggtgaaattagacgggctaaattaaatgatactgattttaataaactagcgactcagtatgatatcgaagatataaaagatgttgaggacattttcgtgaatatttccgaatcgtgcattcacggagacctccatggtggtaatgttcttgttaataaaactggaacaccgatcctaattgattttggtgatgtcggttttaactatacgagcctcgacccaataaccttagagatgagccttatttttcaccctgactgtgtagtgtcaaaagtttctcatgagatacgtccctctataaataattggccgaacattgatcagtattgccaagataatccttttaaagagatgattaagtactgtcgagactgggcttacgacataagtggtgacgataaatctgtattagctgctggctatgcattcgcagtgaggcaactgaaatacgacacagttagcgctgatgagactattgtacttataaaacgaattgttgacgctatccaaacgggaagctaa

SEQ ID NO: 206502 - DNA, 927 bp, Klebsiella oxytoca
atgatggatcgtgagcaagcagctatttcacttttgagcacctcagtagatgaacgactcgaagctgctcgctttttcaccaataatgcggagccaactgatgcgaccatgttgatgctagcactttcgaaagaaaattctagatgggtgaagagagcgcttgagcgcgctattgaaagattacaggttggaccaccaaaaaaagagattagtgaagcggccacagaagaatacgttatggataccaattcggatcggctccttaaagatctccgagcgcaggcggtagacgaagtttccaggacaattctgcatgagttttctccgctcatagggtccctccgtctagccgcagcaatggagttcgatgcttatgaaacctctaaaaccaaacattgtgtagaacgtttaagtggcctgctagacgctgtcggaaagttaaaaaaagcggcagctactccgtcgtttaatgaattcgatctctcagagcttatcacagaatgtattgaggttctgaatattaacaatgaaaacatagtgttacgagttgctggtatcaaaccttatatggtacaagcggatcgggattcgttaggattagccatagataatggaatccggaatgcagtagaagcagttagggaattttcaagactcgacccagcagaaattttaataaactggggccctgccggagccgaaaattggcttgtcattcttgattgcggcccaggattttcgggaaatcctgaggaagcgttgaagcttggagcatcaaataaggatggacatttcggttatgggctagctactgcacagctgtcaatgcgctctatggaaggggacgtttacgtctccaacaaagacgaaggtggagcacgtttcgaattaagatggtacagggattatggaaatattattcgttga

SEQ ID NO: 206503 - DNA, 1839 bp, Klebsiella oxytoca
gtgggcatcgagcggctacaaatcgaaggtggttttttggatggtttggatctcaaattctccaaaggtctcaatgtgatcattggtgctagggggactggaaaaacttcagtaatagagttaatcaggtatgctctagcagctcgtagccacactaccgaggcaaaaaaccgctcattagaccatgccagagcgatactggatgggggggaggtgactgttgtgctaaatgatctggtggatgatatcaccatttcccgcacagctgacgacgacaaaccacgctctacagctagtttcgttgcgccaatagttttgtcacaaactgaagtcgagactctagggcttagtgatgcaggtcgcttatcattgattgatggatttatccatggtcggaacattatgtctgcgacagaggcggagctgatcagttctttaaagagcatttataaagaaattttagccatggaggcggagattacttcgctgtctgaggaggttagtaaggttccgaaccttacatcacagttgcttgattttgaacggcagcttcgggaccttcagggaaattcagatgaggtagccataaaacaagctgagttatcactgctcacagaagaacttgctacagcctctgctcgcgaggatatcatcgcgagattcggaaaacatgcttccaaatggggaacgaccttagataatttgcttcttgagaactatggtccagatgcttggattggtgagccagaaaatgatccggttgctgatcttcgcgggtcttatgactttgctatttcaagaattgctgaggtatcgaaagtttttcaaaaaattgagcatacatctaagcaacgacaggaggagatatctgctaaaaatttcgaagtcgagcgtaaatctcgggtattgcgcactgaacttgataaagtctccgaaggtaccggagcgttaagccgtaatatttctttaattaaatcacaattatctcaaataaatatccggcaaagtctcttggatgaaagaggtagaaggctggacgcgctacgcaaacgacgtgatgagactgcaaatgagcttgaagatattcgccaaaaacgctataccatgcggagtgaagtaacacagaagatcaatttggccctcacaccgtatattaaagtagatattgagcaattatctcagttaggcgagtattccaaagccttaactgatgcgctcaaaggaagtggcataaagtataatgacttggcctcaaagatttcagaatatatcagtccacgagaattagtgacgatcgtagataaggctgatttcgaaaagttggcagatcttgtgaatatacctaaagagcgggcagctcgggtactagcacagctacgtgaatttggtcttgcagatatactgacctgcgacattgaagatgatgtaaatatgtatcttcttgatggtgtcgactataaagaaatttcagcactctctgctggacagcgctgcacagtaatactatctatagttttacagcactctgaaagaatattgataattgatcagcctgaagaccacttagataatgcatttgtggctaatacaataataaaaacattaaagaaccgtaaaggaatcggacaaataattttgtctactcataatgccaatattccagttttgggagaggcggacttgataattgagttgacttctgatggcagaaatggatttgtacaggtaaataaacctcttaatcaccctgaagccgtagacgctattacaaacgtgatggagggtggttccattgcgtttgccaccagagcaaagttttacgaagataattcgctatga

SEQ ID NO: 206504 - DNA, 3423 bp, Klebsiella oxytoca
atgtgggatgtgggccggttggggtataaaattattatgaaatcatttaactttgaattcttacgacctgagaatgatttgctcgccaacctcggtggtttggccgaagcggtactgcatgttgatccaggcagcgccctcacccgcctgcgtagttttgctgaagaactgaccaaggctatttacaagcacgaactgctgccacgcatgccacaatccagcttctatgagctgatcaaaagccccgtttttaaagactgcgtcagcaaatcgctggttcatcagatcaattttttgcgtatacaaggtaacgatacagcgcacggagccgaaggcgaattacgtaatgcacaaatggcactggagactgcacatcagttggccatgtacatgggaattaagtactacaacaaaaaaaagggtcaaattccctcttttgtcgatgtaaaagacccaacggcaactctgaatcaacttcaaaaatcagtttctagttacgaaaaagaactgcaaaaacagcaggaagagctcgaaagagtgatggaacaggtggagcttgaacgaactcgaaatatcgataagcttgagcccatcgtcaagtccgatcaacataaacgccagcaacagagccaaaaagtggctgatagcctgcaatggaacgaagctaaaacccgtgcattgttggtcgatgccatgctgttgcaggccggttgggatactcagaaccccgatgaggttggtcaggaatttgaagttctctttcccaacaatccctcaggtaaaggccgggtggattatgttctatggggcgataacggtcagccgctggccattatcgaagcgaaaaaatctggtaatactaatcttcaagcaggtcgtgaacaggctcgcttttatgccgatgcttttgagcatatgggttatcagcgcccagtaattttttattccaacggctacgaaactttcatttgggacgatcatcaatacaacacctatcgtccggtgtatggcttctacagtaaagacagcctggactatctgatctatcaacgccattaccgtgccgctgaattggaaaaattcaacccagaacttagtattgctgatcgcccttaccagattgaagccatcaaaacggttgcggcccatttccaaaaccagcgccgcaaggcattgattattcaggctaccggtacagggaaaacccgcgttgccattgcattagctgaattactgcttcgcactggttgggccaaacgtgctctttttttgtgtgaccgcaaagaactgcgggtacaggccgatgatgcgtttaagcaaaatctaccatctgagccccgctgtgtaatcggtgaaaccaataagattgatcaaagtgcacgaatctatattgctacttatcccggcatgatgaaccgtttcgctcaattggatgtgggcttctttgacctgatcatcgctgatgagtctcatcgcacgatctacaacaaataccgcgacctgtttgaatacttcgattcccttcaagtgggcctgacagcgactcctgtgaaatttatcagtcgcaatacgtttgatatattcgactgcgaaactactgaccctacatttgaatttgggctggacgcagcgattaacaatgagccatcatacttggtaccgtttcgggtaaaagatcttaccaccgactttctgcgtgatggtattcactacagtgacctaaacgaagaacagaagctccaactcgaagaagacttaggtaaggaagaggcccgtaacaccacaattgcgggtaaagacattggccgtaaaatcttcagtgaagatactgaccgcattattctggaaaatttgatcaacaatggcattaaagatgaaaccggttctctggtcggtaaaaccatcatctttgcccaacgtcaggatcacgccgaacacttggaaaaactcttctgcaagttgtacccacagtacggtatcaaagtgtgcaaggtcatccacaatgcaattcctcatgtgggaggcctgatcaaggaattcaaaaaggctgacaatgagtttcgaatcgctatttcggtcgatatgctcgatacgggcatcgatgtacccgaagtggttaacctggtgtttgccaagcctgttaaaagttgggttaaattctggcagatgattggccgaggcacgcggctgaggcctaatcttttcgggccaggcaagcacaaaaccgaattcctgatttttgaccattacggcaacttcgatttcttcgaagaagaataccaagagccagaagacactggcggtaaatccttactgcaaaccacattcgaagcccggttcgaacttgcacaggcagccttacgacaaaaccatgccgccgcctttgatgccgctattgagttattgcgtgcagatattaacgatctgcctgataccagtattgcagtaaaacgtgaattgcgggttgtacatcagttacagcaaaccgatttactaaagcgctttgacgctaaaactcaacatttgatggtcaataatatcgccccattaatgtcatcccgggtattacgcgacaaacacgctactcaactggataagctcatagccaccatagagcgtaacatggttgagcaagcgagcgcttttgacgatggtcgagatcagctgttagctgaacttgatacactggcggttaacattcaagccgtacgccataaagatgccatcatagcggaagtgcgcagtgcagacttctggcaaaactccactattgataagttggaaaaggctcgcagagaactgcgcggcattatgaaatatcgacaaactaatagtggcggtgtgtattccatgcccacaacaaaaacaggtgactctggcctacatgctaaagaacgcgagataataatcgcaggtgccaacgaggcgatgctctaccgtcgcagactcaaaaatattctggatcagatgatctcggtcaaccccactttgcagaaaatccgtataggcgaatctattaccgagtcagaattgaaaactttgacctctaccattctcaccagcaatcccggtgtgagtttggaagtgcttaatgaattctatggccgcacagctaaccaactgcacctgactcttcgtgaaataataggattggaccctcaagccatcgaagaccacttcaaaggctttttgcatacccatcctacacttacagcaaaacaggttagctttatgaacttactgaaaaactacatcgcccaacacggttctatcctgatcgacactctatatgacaagcctttcatctcagtctcgcacgagggagttgatggcatatttccccccgatgacgttggcgagctgattgctgtattggagccgtttttgaagcaggaagattcccacaatttagttaatgaatga

SEQ ID NO: 206505 - DNA, 1605 bp, Klebsiella oxytoca
atgctaactggtcaaatacgcaacgatatcgataaactctgggaaaaattctggactggtggtatcaccaaccctcttacagtcatagagcagatcagttacctgatgtttgcccgtatgctcgatatgcaagaggacatggctgagcgtaaagcaaaccgcacaggtaaaaatttcgatcgactgtttcccaattcaccagcagggcaactacttcgctggaaaaattttaaaaaccttagtggtaaagaactgcacaagcacctaaagcaaaatgttttccctttcttcgcaaaactcggcaagaagtccgacgagcatgatggtttgggtaatgacggcagtgccatcgaagccttaggtcatatcggtgaatacatgcaggatgccgaccttgaaatcaaaaacgaatcggtactggtcagcgcagtggagatggtggatggactaccactaaccaacagtgatgtaaaaggcgatatttatgaatatctactaagtaaattgaccactgccggtatcaatggccagttccgcaccccgcgccatattatcgatgccatgatcgaattggcggatcctcagcccactgaaattgtgtgcgacccggcttgtggcaccgccgggttcctcacccgcaccatggaatacctaaaccgtgttcattccagtaaggctggtacttttgtggacgaggaaggtaacaaacattactctggcgacctgttagaaccttaccgcaaccatatcaacaaacacatgttctggggcttcgatttcgacacaacgatgctgcgtgttagcagtatgaacatggccttacacggggtgaatggagccaatattctctatcaagacagcctcagcaaatccattaaagaaaacttcccgcagcaggaagaaaacttcttcgatctcatcctcgctaacccgccattcaaaggcagcctggacgaaactaacaccaatcccgatgtgttgggcttggtgaaaactaaaaagaccgagttactatttgttgcccatattctacggtcgcttaagctcggtggccgtgcagccgttattgtgcccgatggtgtgctattcggctccagcaatgcccaccagcaactgcgtaaggaattgatcgaaaacaaccaacttgaggggattgtcagcctgcctagtggggtgtttaaaccttatgcaggtgtcagcacagccattttgatgtttaccaaaggtggctgcaccgagcatgtctggttctatgacctgcaagccgacggttattcattagacgataagcgtaccctgctaaaaggtgaagatagcaacgatcttccggatgcaattgctaagtggaagcaatattgtgctttggtgcagaaaaatgcctatgctgaacagatcggaaaatactttggcgataaaacccaaaaagcgtttgtggtggatgctaaagatattgtcgccaataaattcgacctatctataaaccgctataagaaagtggtatatgaagaagaaatttttgaagatccgaagacgattattaaaaagctgaaagttctggaaatcgagattatggctgatctgaatgacttggagggaatgctgtga

SEQ ID NO: 206506 - DNA, 1161 bp, Klebsiella oxytoca
gtgagttggccattagttgctatcaaagatgttgctaaagttataacgggtaaaacaccttcaaaattagaggatgataactttggcggggaaattccatttgtgactcccacagaattgaacggcagtgtttatgtcagcgatagtccccaaactatcactgaaaagggcgcttctaagctaaagcttgttcctaaagatgcagtgatggtctgctgtatcggctctttagggaagcttgcgattgctgcacgagaagtagccacaaaccagcaaattaattctgttatttttgacaaggctaaagtttattcaaaatatggatactactgcctctctcgattaaaaccgattatggagtctttggcttcatcgacaacgatagcaattataaataaaagcaattttgaatcattagaaattccgcttccccctctaactgagcaaaagcgcatcgctgccatcctcgataaagccgattccatctgccgcaaacgacaacacgctatacaactcgctgacgaatttgtccacgccttatttatgaatatgtttggtgatccaaagaccaatccgaagggatgggctaattgcaagcttgaagacctaacaactctcgtgacctatggactgacggttcgacctgagtatcatgctgagggtatacctcttatatctgcaagagaaattcgtactggtgaaaccaatttcgaatctagtccgaaaatatcaaagctagattttgaaaaattgagtgacaaggggaagccaaataaaggtgatattttattttccaaaacaggaagcataggccattgcgctattgttagagctaatttggattttgctgtgacgcagaatgtggccagaatagttgccaaaaaagagatttgcaatcctattttcttgcttgcgtatatgaggacaaggtatttttatgatttagcgaataaagaggccaagggtaatgcagtgaaagatttacaactgggaattatgaaagcttttcctatgtatcttcctccaatatcgctgcagctgaaattcgttgatttgtattcaagagcttcttgtataattgaaaaattgactgaaggttcatccctgtcggattccaattacaattcactcatgcaaaaagcctttgctggagagctctaa

SEQ ID NO: 206507 - DNA, 2271 bp, Klebsiella oxytoca
atgatcggtgaaatccaaataaatgcacctgtagccacctatctgaatccggcaagactcagcgatcttcgtcgtatcaattacatttttggtgcgaatggtacaggtaaaacaaccataagccgtgttattgcccaacaacaaggacacaatcaatgtccattagtatggcatggtggcacagagcttgaacggatggtgtataaccgggatttcgttgatcgaaactttaatcaggacggacccctgcagggtgtttttaccttaggtgagaatcaggttgaagccgagcaggaaatcgctcgtttacagcctgaaataaataagataaatgatcaaatatcaagtataaatatccaattaaatggttctgaacaacaaacaggcaaacgtaaagaactccaagatctcgaaccaggactgcgagaaaagtgttggaagcagaaacaacttcatgacacctattttcagactgcatttagtggcgtaagaaataatgccgaaaattttaaagccaaggtgttaactgaacacacatcaaatacggctgatttactcactctggaagaactgaaactcaaagcacagactgttttttcaagcaatattgagcgtgcaacggtacttggaaacatgccagccgatgatcttatcgctatcgaggcaaatatattactgcaaaaagtgattgtcggtaatcaagatgttgatatcgcagccctcataaaccatctgggtaacagcgactgggtaaaacaaggccgtaagtttcacgaacagaatcctgagacatgccctttctgccaacagcctacggatgataatttctctaataatcttgctgcattcttcagtgaagcctacgacaccgatatccaattgttaagagaattgcaagcaggataccaaatggcaagcgatcaattaacagctgccatacagcgtaatgtggacaataataacccattcctgaatgttgatctgtttaatgcagcagcgttgactcttgtggaacgtgtaaaggccaaccaaattaagttggcaaataagattaatgaaccaagtcgaaaagtggaaatggagtcaattcaacctcttatttcccagctgcaaaacttagtgttagaggccaatgaagcaacaacacttcataaccaaaccgtggctaatattgccactgagaagcagacattaacttcacaagtatggcgctatgtattaaatgaattagcagatgacttgctgctgtatcagcaaaacaagaatcgccatacaagcaccattaatggcatggagaaggcgctgatagataaaaatacgcgactcaacagtcttaaagatcaaattaaagagttagaaaggcaaacaacatctattcaaccaactattacagctattaatgacctgctgcagaaattcggttttaattccttctccatcggtcaaaccgatggaggtcgtcactatcgaataatccgcgtgaatggtgaagatgctagttgttcactgagtgaaggtgaaaaaacctttatcaccttcttgtatttttattacctcattaaaggagcccaatcctcttcaggaatcacagcgaatcgggtggtcgtgtttgatgacccaatatcttctttagatagcgatattctctacattgtcagtagtcttattaaagttttgatggaagagacgataaaccaaaattcaaatataaaacagatatttatactaacacataatgtctattttcataaagagataagcttcaatagaagaaggtccgctgatggtgttcttagtgaggaaagtttctggctggtaaagaaattacaacatggttcggttgttgagcgctgtgacaaaaatccaatccgatcagcctacgaactgctatgggaagatgttaaatcagaaaatatttccagcatcagcctgcaaaacacattacgccgaatactcgagaactacttcacaatgtggggcggaatgagcaaagacgaaatctgtaccttatttgacgggcgcgacaagttgatttgtcaatctcttttttcttgggtcaacgatggttctcactcaattcatgacgacctttatattaatcatggtgagcaaactaatgaagcgtatcttcgtgtgtttcgcgccattttcagtaaagcaggtcagggtggccattacaatatgatgactggttcagtcatcgaagaattggatgttcactttggtgaccagcctgttgttagtgaatcaaacttggaagcagcacaatga

SEQ ID NO: 206508 - DNA, 1647 bp, Klebsiella oxytoca
atgaggataactaaaatatcactgacgaatttccgttcgtttaaacacacgcaaacaatcgatattgcaccggtgacatttttatttggaccaaatagtgtcggtaagagctctgtgctaatggcactcgcttatgtgcagcaaattttgaaacatggccactgtaatccccaaaaactagattccttgggtaataaaacgataggtggtttccgtgcacttgtttatggccaagatctaaaaaatacaattaaaattcgactggattattctccagataaaacgccatttgtctactatggtgctaatgtcgacgaaatgacaaaccatgttgaaagtgccagctatgttttgatgaatgactttggtggcggcaccgaatctggagcggtggagtttgaaattgcatggtcagagcgttttaagcgggcttatgtaaagaattaccgcgtctggactaacgatatctatgttggttgtattagttcttctgaagatcaaagaaacagcgtaattcgcgaggtcaatacccaacatcctttgctcataccctacaacaatgatgattggcttgaaagggaatatggggaagttgaacaaagagagccccttgagctggacgattatcatacggaatttgaacaagtcctgaatcaattgaatccgaatccggcggctacggctgctatagcggataaagacaattcaggagctgactttgttaatcgtattgctcctgttgctttggcttgtagaagtggtgcggttcctttgcttggagtccctgttatgaccaatttgcttgggcaagattttgatgagttagaggagcactttaactttctggtcgtgcaggaagtgctgagtcaggctttcgtcttaccactggataaactactggaatatttggataaaagcgttcagattggcccacttcgtctggtgccggataacgattatgtgccgaatcctcatcccgaacaaattgactgggtagatggttcagctgcttgggatttactttacaaagacccaaacagtagtgtttccatcgaaaagctcatcagaaacacgagtgactggtttgcatctagcaacaaactcaatgcaggttatgagatcatcaacaagtcgatcgctgagatagcaaatgtcgatagtaatgatgaacatatggggttgctaagaaagaggcatgttttctttagagagctacgtagcaatattctgctgtcagcaaatcaactaggcacgggtatttctcaagttcttcctatagttgttgcggcaaatcatgatgacattgcacttataagtgttgagcagccggagctgcacgtccatcctcgctttcaagtagagatagcagatgtctttctccagacaaaagataaacactcgtttttgattgagacgcacagcgaacacttaattcttcggcttttaaaaagaataagacagaccacagataataagctacctgatgattctaagcctgttcatggagaagatatttcaatcgtttacctggagcctacagaaaacggtgtagtgacgaagcgaattcgtgtagatgaagatggcgaatttgttgaacgttggcctcaaggcttctttgttgaacgtcgagaggagcttttgtcatga

SEQ ID NO: 206509 - DNA, 2016 bp, Klebsiella oxytoca
  misc_feature (1192)..(1201): n is a, c, g, or t
atgaatatattcgatcactatcgccagcgctatgaagctgccaaggacgaagagttcacactgcaggagtttcttaccatctgtcggcaagatcgcagtgcttatgctaacgcagcagaaagattgctgatggccatcggtgagccggtcatggtcgatacggccctcgaacccaggctatcccgtctcttttcaaaccgggtcgtcgcgcgctacccggcctttgaagagttttacggtatggaagatgccatcgagcaaattgtttcttacttaaaacacgccgctcaggggctggaagagaagaaacagattctgtatctgctgggccccgtgggcggcggtaaatcatcgcttgccgaacgcctgaagtccttgatgcagcgcgtccctatctatgtgctcagcgcaaacggtgagcgcagcccggtcaacgaccatccgctgtgtctgtttaacccgcaggaggatgcgcaaatcctcgaaaaagagtacggcattccaaaccgctatctggggacgattatgtcgccgtgggcggccaagcgtctgcatgaattcggcggcgacatcacgaaattccgcgtggtgaaagtgtggccgtcaatcctggcgcagattgccatcgccaaaaccgagcccggtgacgaaaacaaccaggacatctcggcgctggtcggtaaagtcgatatccgtaaactggaacactacgcgcagaatgacccggatgcctacggctactccggcgctctgtgccgcgccaaccaggggctgatggagttcgtcgagatgtttaaagcgcctatcaaggtgctgcatccgctgctgaccgcgacgcaggaaggcaactataacggtaccgaagggatctccgccctgccgttcaacgggattatcctcgcccactccaacgaatcggaatgggtgaccttccgtaataacaaaaacaatgaggccttcctcgaccgcgtgtatatcgtcaaggtgccttattgcctgcgtatctcggaagagatccgtatctatgaaaaactgcttaacaacagcgagctgacccatgcgccgtgcgcgccgggcacgctggaaacgctgtcgcgcttctccattctgtcgcgcctgaaagctgtctcttatacacatctccgagcccacgagaccagagaggatatcgtatgccgtcttctgcttgaannnnnnnnnnaagagcctgaaaactcaagcatttattcaaaaatgcgcgtctatgacggcgaaagcctgaaagacaccgacccgaaagcgaaatcctatcaggagtatcgcgattatgccggcgttgatgaagggatgaacggcctgtctacccgcttcgcgttcaaaatcctgtcgcgggtatttaactttgaccatgccgaggtcgccgccaacccggtgcatctgttctacgtcctcgagcagcagatcgagcgcgagcagttcccgcaggagcagtcagagcgttaccttgagttcctcaaaggctatctgatcccgaaatacgccgagtttatcgggaaagagatccagaccgcctaccttgaatcctactcggagtacgggcagaacatttttgaccgttatgtcacctacgctgacttctggattcaggatcaggagtatcgcgacccggataccggccagctgtttgaccgcgagtcgctgaatgcggaactggagaaaatcgagaagcctgccgggatcagcaacccgaaagacttccgtaacgaaatagtcaacttcgtgctgcgcgccagagcgcacaacagcgggcgtaatccaaactggaccagctacgagaaactgcgcacggttatcgagaagaaaatgttctccaataccgaagagctgttgccggtgatttccttcaacaccaaaacgtcaaccgatgagcagaaaaaacacgatgactttgtcgaccgcatgatggagaaaggctatacccgcaagcaggttcgcctgctgtgcgaatggtatctgcgggtacgtaaatcatcctga

SEQ ID NO: 206510 - DNA, 369 bp, Klebsiella oxytoca
atgttcggggttcagggcgcgctggcgatgttcatcgattttatcctgcggcagcaggctgagaagggtatcgtccgccagcggggcgattttgttgatttcgtgcgaggtgcggaaaccatcaaagaaatgaataaatggcacccggctttgcagcgtggcgatatgcgaaatcagcgcaaaatcctgggcttcctggacgctgctggcgcagagcatcgcgcagccggtctgacgcacggccatgacgtccgagtgatcgccgaatatggagagcgcgtgggttgccacggtgcgggcggcgacgtgcagaacaaacggcatcagctggccggccagtttgtacagcgtcgggatcatcagcagtaa

SEQ ID NO: 206511 - DNA, 255 bp, Klebsiella oxytoca
atgtttcgccgcttcaatgttcggcgtggcggcatggctgaaggcggcaaaatcggcggcgttgtcgcaccagacctggcgaaagccttcctgggcggtcatcaccggcgtcattaccgccagctggtcatattcgataatatcgtcgcccagcagccgctgtttcagctgcggcaccccgttcgccgcgcgaaccagggcgtagagcgccagctggaaaaacgagacgccgcgatctttcgcgcactcatatag

SEQ ID NO: 206512 - DNA, 786 bp, Klebsiella oxytoca
atgcagcgagatgagttagttctctcaagaaaagagcttgagttaacccgcaaagaatatactgaaacgcagcttgttatcagaaggcaaagtgtagaaagtacattttataatggtctgaatctacatcatgagatagcgagaaacttgcagattgattttaatgatagtgttaatttaatcagtgcaagagctaaatctggattagccctcaacattaaaaatggccgtcagtgttttaaagctttgctggattgtctggtatatgatgaccctacccaggacgaattgatagagaagtataaacatatcaataaaaatagaaatgaatggtttggacattactttaggaatctttatagaataattaaaataatcgatgatcttcctggtgagtacttttcggttagccaaaaagaggaatattgtcataccctcagagcgcagctatcttcagatgaattggctgtgttaatgttaaattgttttggggatgtctgtgatcgtggtgaattccgtggactgctcagtcgctatcaaatgctggaacatttgccccttaggtatactgaaaaagatgatagggatgaagttaaagttgaggttgctggttcatttatagttacactctcttttttatctacgtttatactaagtaatgaagaaatagagaaagctaaaaatagaatagatcttaaacgtcatcctggtggtgcgtttggaaaaaatttatcaatagcttttccaaagagactcagggatcttaataattcctcggacgtttaa

SEQ ID NO: 206513 - DNA, 1578 bp, Klebsiella oxytoca
atgaggccatattttcttgttaaaagtgcaatgttggatggggctgaggtgcctatatctggtgaaattgaggatgatagtaattatttgtctattatcgtgggtaagaatggcactggcaaaagcagaacgttgctaaatatagtttcaagcatattaattaacagtaggttaccagtttttgataatgcgatcttacctgagtcttatatatttagaatatataatgaatcgcgacttaataatgagttttcaaatatgataggtgcaacttatatttcaaatggtaatgagaataagttctggccaaaagctaaaggaaatgaatattatgattatagttttataaataaaacagctccggagcgtgttatttgtatatccaatagcttttttcataagttcccttcgagtgagtcatggccccttgatcatcgtagattaaggcgagatgagggtgatatatataagaacttatgtttaagtgaaatttatgttaaagatcgcagggctaattccgcaataaaaaatatgtatttttttcaggccttaataaatgcattggtgaagagccgaaattcgttggacaattccttaaagatgcttaacagttttggtgattatgatggtgttgaattgtcctttcatctttatgagaggctcagtgtatttgaattaaatgaatataacctctccgtagaacgattccgtgactccttggcctttcaggaggcctttattgaaaaaagagaggatgatgaattacgtgatgtgatggcgaaggtccaattatttattgagttgactgactataaaaataatgcaaaaaaaatatttccaattgacgattctgaaaatccagatatgtatgacagttatcaacattgttttaagtctagggcgtatgtttctaaatactctttttatatggaggggaggggagagtccagtgttataagtgaagagttaagtgatttaattgtttacttgaatagttatgggttattaagtgtaactgatgtttcttttataaaatcatcagtgtctattcctataaaaaaccttagttctggtgagttgaatgttctggcttccttagttttgataaatagtgaaattaaggatcgctctgttgtgttaattgatgagccagaaataaacttgcatcccaaatggcaagaggaaatagtccccatgctaatgaattgcttcagtcatataactggctgtcatttcattatagctacacactctccattggttgcctcgagcgttaaagagaataactcatctgttataatcattgatgaggagaaagaaaactctttaatagtccccggtagagtaataaaaggtaggtcatctgactttcagttattctacacattgaaacatccaggacctcataatgagtacctcataaggaggctattgactatcatcgctaagaggaaaaatgggatagatatctctcgtgaagatgttttgttcattggtgatgcgtccgatttattaattgatgtgaacgaaggcgataaggttaaatatttactggctcaggcgattgcattgatttaa

SEQ ID NO: 206514 - DNA, 705 bp, Klebsiella oxytoca
atgaaaaagaaaaacataagagaattgcccccaattgttttttcgacaaaatcaagggattttatctcttcatgtaatcttaataatcataagtcaatatggaatgtaactgtaggtaaaataattggcgtcaaaaaagaaataaggcaacactatcttaaatatcagaaaaatatgtgtgcgtattgcagaacagaagttttgcataatcacgggctttattgggatatagagcacataataccaaaagataaatatgcagtttttttatttgaaccaagaaatctagctctcgcatgtcgtccttgtaatggtaaaaaaagcaataaaaaagtatttaataaaagaatatataaaactagttcttacccttccgatggagaccttttttcaataattcatcctcattatgataaatatagcgctcacatggagatgtatacttatgaggggcgggttatatatgagccaatttctgataaaggacttaatacatatgcaatgtgcaatttagaacgatttgttcatatagaaataaacggcaatggtgatgaaggtgttatagattttatcgatgagagcttattggagatggatgatgtagatacatcagagctttccccgcgtgagagaaaactaatggatattctcttagaaaccaagtccaggattaagaaaaaaaaacaatacagggatttcgcatag

SEQ ID NO: 206515 - DNA, 2340 bp, Klebsiella oxytoca
atgacccgaattccagaatcctcatcgtgggaagaagagattgagcttatttccagaagcgaacgcgtctccggtggactggacggcgtagcaaaccgaccgctgaaaagtctggcgaacagaacgcgctatctgaaagaaaaagctgaagagtcaggcgagattgttgcggagaaagtgagtgccataaagacgtttgcagaaggcgcgatgctgggatcgccgcgggaagagatcctgcacggtgcttatcgtcttgtctggacgggcgagtttccaaaggttgtgccggcggcatcttcaccagaaaccaccggaggcgtgggggcggggcgctgggcgtacacatcggacgcggctattcgctcaaacctgagttcaggcgacggccagaaactgataggggaatactccagtatcagtgaactgagagcggccacactggactaccacgggcagaaagtaaaagttaaatactgggacatggagctgggcacggcccttgttaacgtattttatgtttacgatgccaatgaccaagcttctgtcgatgatggttacaggacaattgtcaatgcagcgggccagcgctttaaagcattgctcaacgacacccttgatttacgtatcgtagggttgcgttcgtacggcgataacctgggcactgcctttaatcgcgctctggaagcggagctggctcgcgtatttgccgacgattctgcaatgaagatggcgacaattaaactcccggcgctgacctcatttgatgaccccaacgtttcaacatataacgctattctgaatgcctccatcgtgatgccgtcatatacgcccgttgagtgtgacgggaattatttctgcaaatttaacccgattaacgatgtcgccattcgcattacgaacaccatcgaaggggtgaagccgtcccagaccgtatggcgaaacatgcaaggcgtgaaaatgttcgccaataaatcggggcaatttcaattagttggtccgggcgctactgtcagccagtcggccggtattcgggtcggtaatgaccgggccggggatgatgtgctcgacctgagggatttatgccttgaagatgttcagattcgggctttccgttacggtctggattgcgtgtggaatgacacctatatcctgacctaccggaacctgaagttaaccggaaactatttcaacctgtcatccctgctggcggcaaagcagaatgcgggggaaaacatccgcgtggaaaacacgcttctggcggattctgtttctcatcaggtttactggaactccccgggtattaacgtcacttttgataaagtcagtattgattacgctggcgggagcgccttctattttgataacggtgcgcgcgggtgcgactttcatacgcacgctggccatatcgagggctgggacggcatgctggtctttcaggtggcccagctggttgcctggtacaatcaggctaacgccatcaccttcagcaacaccccgattaaagccgccggtacctcaccgggcgtctgggcaccacgccgcaaaatcctgcattctggtcaggtacttcccggccttggaactcgggtcacgttcgataacagcccggtatactggcccgcccctgcttctgagccgcatgttgctctgatggggtataccgaccccactgcagagaatatgaaggcgatttaccactgcccgaactcaccttaccctgactgtctggtgaactaccgccagtcaatgaacaaggggctttatcggttcgacggggaagagggaaagtcagttaaaggtctttatgattcaaaaaccgggtataccttctcaacaaatggcaacccgtcaattgtctatggcggtgaagatgcggacggtctgcaacatatcatcatcgactttgacgcaacaacaacgtgggtagaactatgtaataaagggctttattacgcgctggagcgtgatgctgaaattaataccgctatttccgtaatgatggaaaatatcaccgagggagacctgacgctgaatacgcgattccattattactacggcgctgcaaaaacctatgacggttatgaagacggaagaaccaaaagcctgacggcactactgacagcgacctatcaggggatcagcaccccactgacaacatcaaaatatgtcggtgagcaaacggttatgtcttatgtccgtcaggacagcgttcacccgacacaggcggaatacgttcaggcagcaatggttctgcgcggtgcgaaaggccgggcacgtatcaagctcccggcaatctggacaaccaaaggcagaggcgcggcctttgctttcagctaa

SEQ ID NO: 206516 - DNA, 198 bp, Klebsiella oxytoca
atggttactgcaaaatttaagtgttcgtacctgtaccaggcttccgataattcgcggcttgatgtgtatctcgatcctgttcttgaggacgggaaccccacgggaaacgtgtcattaaccctgactaatcctgatgattattcagcattcgagcaggggaaaacttatcaactgagttttgaggaagtcaccagttaa

SEQ ID NO: 206517 - DNA, 1158 bp, Klebsiella oxytoca
atgagcaaaaaatttaaatcactgataacagccgcaggcagagaaaaaattgctgaatccatcgctaacggggataaggttattttctcctggatgtctgtcggtgatggcggtggtagtgtgacgatccccggcgatgagcagacagctttagtcaacgaacgcttccgcacccaacttaacagcctgaaactgtcagacactgacagtattatcatcgccgaaatgattatcccgcccgaggtgggtggctttactatccgggaggccgcgttatttgatgatgacggcgagtgtatggcagtagctaacgtcccggagacgtacaagcccgcactggctgaaggctccgggcgctttacggtgctcaggatctggctggcggtgagcagcactgaagcggtggagcttatcgctgatccgggcattgtcctggcaaccgttgaggatgtgattaacgccggtaacagtgcgaaagattacgctgacgagcaactgagcgagcacgcacaatcgcgggaccaccctgacgccacgctgaatgacaaggggtttacccgactcagtaatgcgattgacagcgatgatcaagacagggccgcgacaccaatggcggtcaaactggccgtagagagagcaatccgctcggcatgggagctggataatcctgtcggcacagtgaagttttacgcacagaacgtcaatcctaatgagcgctatccgtggactgaatgggcgtataccggggagaagaaaaccattcgtgtcggcaagacggacggctcggacgtcggcgcgaccggcggcagcgataccgtcacgctccagcgcaataacctgccagccgtgcagattgacgtaagcggcgaaaccagtgagcacccccagcaggagctgaccacgaaaccctccggcaggcacagtcacggcggcgtgccgagccgggaaaatccgtgggagattggcggcgatatcagccagcgctttaacccggcgaacctgggcgacacggatgaggtcgaagatcatgagcatgatattgatatcccgccgcatggccatgacgtcaacggtaaaaccgacaacctcggcgagggtaaatcgttcagcgtggtcgaggcccacaccctgctgatgtgctgggctcgggtggcgtga

SEQ ID NO: 206518 - DNA, 1362 bp, Klebsiella oxytoca
atgtatgtacttgaccagttgagcgttgctcctaaccggcgactttggacattggttgacaccactactaacttaccgcttctgtttccacttctctttctcattgatcgcttagcttcacgttccgaatccacgcagtcatctacgctacaagctctaaagtttttttatgagtactggtatcaaaaacatgatgtcactttctgtttgagcttccaattgtctggatacaatccttcgattgcggttagtgagcttgaagcatttcttcattatcttgaatcaggaaagcttatgttgcctacactcggatatgcagtaattagcaagcacaatactaatataaatcatgtacatgcagtctgccgttttataaactatctgatcaatacttacgtttctcctcgttatatggatggcaccccaaaagagctttctcgttatgctttacaattatccaagcgtttgtcgacctatcgttctgattttcgacccagcaagcaaaagcattcacacaaacattttaatagccttacagcagacatggtcaggagattttatgagattattagaccagaatcgtctttcaagccaaatcctcttaatcccttccctgctggagaagttcaattcagaaattatttaatctgtcgtcttcttttgaattatggtttgcgagtaagtgaattgctcctgttagaaaaacactcaattaaacctaacatccaaggcggacaattcagtatcatagtgacctctgtagatgatgatgtcagagatccaagaaaacgattgccgtcattaaaaaactcatgggcgcatcgagttttagcgttagacataaatgattacaaccacttgaaaatatacattgataaaataagtataaatacctctcataacttcatattcacatcaacaaaaagtaacttgcctcctctatcatatcactctatatatgatattttctcaaaaattgattgtgtatttaaaaaagagtacccgcaatttagtgatgaaaaaagtattgattctgtagttagcataaccccacacgtaactcgccatacatgggcttatttgatcttaaagagaatttatgctgctaaatatcagtctgttatgagaaattgcaagcttgccggagttgatttcgctattgcaggtctgatgagtgaagctaaagatgagcttcgtcttttaggtggatggagtcataatagccgcatgccagaattctatgcccggcgttttctttctgagcgagctaatttttccaatgtcagacgtattgccgctgactcctcagaggatgaatttttttcattgatacatcaagcgtttagggaggttatcaaatga

SEQ ID NO: 206519 - DNA, 1551 bp, Klebsiella oxytoca
atgaataaaatcccagcaatagaaagcgaagataagcatgtctttttttcacgtgaacaaatgatacaaataaaaagtctctacatcccttcaaaaatccacttaaggtcagctgatgtttttgatgacaagaatatatttgcagagactaatgattgggtgttccattactcaggtagccagtcacacattaatttcaaaacggatgattacacgactaaactaattaagtatatattataccgttatgcatcatcaaaatctcctgggactatttatcgtgtgcatcgcgcatggctagacgcaattgaatatgcttcgaagcaaggagtgtttaactttaaattgttaagttctttccttgaaaaggaaaacttattgccgacttattttttttgtattgtttttggtctgaaaattctttgtgtagatgaatttccgggttttactttagatgactacgaagaccttgaattgatccctcgccctaattcaaatgattggaatgtatatcaaaacatagataatattcttgacccatttgaaaagaacatgatcagcaaaggtctttttgaaatggctgccgctatctcacgaggcagaaaatacaatctggtggaccttcgcaatgccactgttctggggctaagttatgtcacaggtagtcgtccggttcagttagctaaattggctgctggtgactttcgaatcgatacttgcaatacgacaacagggttggttcgttatagcgttcttttaccttatgctaaacaaagacacgtcactactgatcggttgattctggcgctcccgccagaaatcggtgcactggttaagcattatatagatgaagccagattattacctaccgataaaatgtttaatatggggggatcagcacctaaatttgtttctcagtcgattagccaaacgattctatcctttagcccacaagattaccagtttgccgtatcgtgcggtgaagccgccctaccttcaataacatcaactgatttgcgccacaacgttggtcactcacttgcaatgcagggcgctagtgcagaggaaattgctcacattctcggccattcatctctggttgtagcaaagcactacatccgtgcgaccccagccttggcattgatccgcgctaaagcactcggttctaaccctgtgtggcaaaacatggtggctatgatgcttactgggaaactagttccttcaaaagaatgggaaggtcgacgagtggttggtatggttggtgatcgattacactatgagatcggtggctgtgcgagaaccgatgatgaatgccccttctgtgaagttcgttgctgctatggttgcttatattaccgccctttccttgatggccatcaccagggcgtattgaatagcgtctctaaagaagtcgatgagctgatagcagtatcagatagtgttggtaatgctctcaatccactaatttctatccacgagacgacgcaaatagaaatcaagtcagtgattgcccgttgtcatttgcataacgtcagaggttgtgggaaatga

SEQ ID NO: 206520 - DNA, 2364 bp, Klebsiella oxytoca
atgaaaaaaaatatagcgaactttgagacttttatcatagaacagaaagcttggttcgaagagaatctggcagcagattttgcagaatcatgggatagctttgtctggatatgtgggatcaaaggctccggctggttacgtggcaatggggctaatttattacgttttgatgaggttaaccggctcaaagggatcgatgatcgccatacagtatccgagccttatcagttgttcatgaaagcgatgctcgtactcgtctatcgagggagaaatcgcagtatttcctctgcggttgctgtcgcaacgctgattattttgaaacgatggtactgcgctctcattaagttaactgggcaaacacatcccatctatctgactacagatgtcgtacgtagcgcaatggatactctgagtgcagcttcccggccaggtgataccaacctagccaactacaaggggcgttgtgttaagattcagaaattagtaaaccatcacgccttcacattagtaacattgcaatatgtttccgatgattgttataccaatcagactaatttgacccggaaagcccgggaaacaatctcactaaaagaaaaagacaagctggatgatacttccactgatggtgaagatacactgattaccattaaaggtttcctcaatatcgtgtcgttaatccagcgaattgaaagcagtactgaaaagatagccctcaattgtcttctgttactgatcgtcactggattccgttctgttgaggcattcaatctcagacaggatgccttggtcaaacgacatatagataactctgatctcagcaaacgtctgcggaataaaggattgccagattattttcttggcatacgctatgttggtgttaagggggctggcgaacgaacgcattgggtcgagcctttagctgtacctctggtcgaaaatatatttaagtcggtgaagttactaacaactgagtttcgcaaacatatcgaatatttacgatcaaaaaaattttctgattatttaccaaagccaatcagtgatattaccagtgaactcgttgagcttgatgatattgtaaaacacatggtccagtcctcatcagagcttcgggggcgtgcaggcttacgtgataaagcttcgaaagcattagagaaacgtggctttataccggcaaaagtcatccttaaatcaggtaatgaaaaagaaaaatattttacaaagtctgatcttagtcattttcttaaaagtgaattcggtgatagcagtgcaaatactccctgtactcatgcatgggcagaaaatggcaaaagatatgagattaaatatgaagagctattgttccttttccccaaaggatcactgactctcaagagagtgttgcaactaaaagccacgccactaccactaaataataacggcctaaacaaatttctaggtaacgttgctggctatgtatctgttttcagcaaatacaggttgcttgaagatgacggccgccctactcagctccgaacgcatatccctcgacacaacattaatacttttctcgcaattgcagagatctcagaccacttacaagcgatgttgatggggcgtgttgatattactcaaaatcagcattatcagcacctggctctcaaggaacggcgaaaagcagcttctctaacccctttagttccaaccgtaccggagcagtcagcatttactgctgttgacgttgattcacctctcgatatggtaaagcaaagcggtttaatgacgtttaatagtacccaaactctggaaaccaacataaaggcaaacctgcatacctttgatgatcgtaacgatgttgctggtttcattgaagcgtcgtcaggggatggattattcgaagacatagccgctgctttcgaggaaatcagtaaaaatgaagggccattacaagcgtctgagatggtacaaaggcatgcggtattgcatccattaaaactgggctcctgcatgagagacgttaacttgtggggatgcccttatcgaatgaagtgccaagcattgaaaccctgtgagcatttcacgttgacaggtcgtattgatgaatactcaactattgcagtaaaaggtcgggcattaaacgaggcttcgctcgcttttgaacagtatatcgcggcccttccagacaaccagttaatacaaggcaatatcgaagaaaatctaactcacctggatgccttaagcgagcaattacgcaggcgctcaaacttgttacaagttctctctgctcaagagattctgtctggagagataaaagtggaaggtgaaattcgtactttagctcaattatttgccctcgagcaccataaaaacaaagaggaagaaaactaa

SEQ ID NO: 206521 - DNA, 696 bp, Klebsiella oxytoca
ttgacctttattaccgggattagcgaaattctgctggtggcgaactcgcttatccatctctcccccgatacccggatgcagccgtggcagctgttttcaacgcgcctggggattgctgcgatgctgatcagccccatcatcgtcgcttccagcgttgaggcgattaataacctggtcaaacagctggccctgcgcgctgatttcgacttccagacccgggtctattctcgctccgggctaagcgaagcgttgaaacgtcagccgatcgcggaaaacgagctgctcaccgtgatggtgctcgacatcgacggcttcaagcaggttaacgatcgctggggccacgagtgcggcgattgtatgctggcccagtttgcgcagcaggtgcggcagctggtgggtgaagagggcatggtggcgcgtattggtggagaagagtttgccgtcgcggcgctgacctcatccgcgcgagacggagtgctgctggcggaaaaaattcgccagggcatcgagtcgcaaaccttcacctgggggcaaaacaggatccagctgaccatcagcatggggctggagagccgggcgccgggttcagccagaataacggatctgttcaaccagctgctcatggtcgccgatgattctatgattcgggcaaaaaaagccggacgcaatcgtatttttacgcaagaaatggtctga

SEQ ID NO: 206522 - DNA, 1770 bp, Klebsiella oxytoca
atggcggtggaaaaactgattgtcgaccatatcgatacctggaccacggcgctgcaaacccgctccacggcggggcgcggcagctcggggaagattgacctgtatggcatcaagaagctgcgcgagctgattctggagctggcggtgcgcggcaagctggtgccgcaggatccgaacgacgaatcggcgtcggtgctgctggagcgtaatgaagaacggaaaaaagaattatcgcgcaatgagggtatgaaaaccacagcaagccctcatatccatggaaatgaatattatatcgatgcccccgaaaactggtcatggataagacttggtaatttagcaaaattcatcgattaccgcgggaaaacgccacataaacaaggaaatggcataagacttataacagcaaaaaatatccgaaagggctatattgacctcagcccagaagagttcatagctgaagaagattacacatcatggatgacaagaggctttcctaaatgtggtgatattttattcacaaccgaagcaccgctgggaaatgcggcaattattgatttagatggaaaattcgctcttgctcaacgttctatttgttttcaatggcatattccagagataagcccttttatgcttattcaaattatggcgatgcccttccagtcacaactaaatgacaaatctacaggaatgactgcggcaggaataaaagcgtctaagttaaaagagatcccagttattttgccaccttaccaagaacaaactcgtattgtatctagggtacaagatctcatgtccctctgcgaccaactggaacagcactccctgaccagtctggacgcccatcaacatctggttgaaaccctgctaaccacactaaccgacagtcagaacgccaatgaactgaccgaaaactgggcgcgtatcagcgaacatttcgacacgctgtttaccaccgaagctagcattgacgccttaaaacagaccattctacaactggcggtgatgggcaaactggtgccgcaggatccgaacgatgaaccggcctctgaactgctcaaacgtattgcgcaggaaaaagcgcaactggtgaaagacgggaaaatgaaaaaacaaaaaccgttgcagccgattagcgatgaggaaaaaccgtttgaactgccgagtggatgggtatggtgccgcttgggtgaactagcccttaaatccgaggctggctggagtcctcaatgtgaaaatacaccaagatcgggagggcaatggggtgtactgaaaatcagtgccgttacctggggtgaatatcaaccagaggaaaataaagccctgccagatcacttatcacccagagaagagtttgaagtaaaagaaaatgatttcttaatttctcgcgcaaatacggctgaacttgtcgcccgctctgtcgttgtcccggaaaaaacacctggtaaccttatgctcagcgataaaattattcggttcgaattttcctcattagtcagcgctcactatataagcctggtgaataactctatattttcacgtgtgtattataaagaagtagcaggaggaacaagttcatcgatgaaaaatgtctccagaaaccaggtttcagaattactaattggattacctggatatcatgagcagttaaaaatcgttgaaaatatagctaaatacattcagatatgtgaagctttaacttctcaaattaaatcagcccaacaaacccagctccacctggccgacgctctcaccgacgccgccatcaattaa

SEQ ID NO: 206523 - DNA, 414 bp, Klebsiella oxytoca
gtgccgccgccggtctatccggaaacgcatctgtcgtttctggctaacgtctacaaccacaaagcgcgcgagttttatcaacgttacggcgtccagctgatcgacgccgcctatgaagctcatgaagagaagggcgacgtgccggtcatgattaccaagcactgcctgcgctttgccttcaacctgtgtccgaaacaggccaaaggttcgattaaaagctggaaagcgacgccaatgcagctgatccacggcgatgaagtgctgacgctgaagtttgactgccgcccatgcgaaatgcacgtggtcggtaagataaaaaaccatatcctgaaaatgccgctgccgggcagcatcgtggcgtccgtgagtcccgatgagctgatgaaaaccctgccgaaacgcaagggcgcctga

SEQ ID NO: 206524 - DNA, 498 bp, Klebsiella oxytoca
atgggcggcgaagacgaagttccagtccagctgcgccgcaagctgcgcgctctccaggctggcgccgagcagaaagccgtcggcgcgacgcggtgggatcggcgttgcgcggacgctctcctcaccgtcggcttcggtcagcgacagccagttgtcgagctgcgccagctggtcggcaaaacgccccttttgctgtgggttaagcccctgctgcaacgcgcgagtggagagcggcagtccgccaggggctttgcccacgcccagatccacgcggcccggagcgagggaagccagcatattgaagttttccgccactttatacgggctgtaatgctgcagcatgacgccgccggagccaacgcgaatcctgcgggtctggccgaggatccaggcaatggccagctctggcgacggactggcgagctggtcagtattgtggtgttcggctatccagaagcgatgatagccccaggcttccgcctgttgcgcaagcgttaa

SEQ ID NO: 206525 - DNA, 1473 bp, Klebsiella oxytoca
atggtaacctctgcaaaaatagtcgggctggttgaggttatggcgcaaaatttatccaaggaaaatcccccgtctttgaaggttgaacataccggagaagacgcgcaggcgctattgcgtcagctaatggcgatatacgatgtcaaaacgctggtcgcgcagttaattgccgtcggcgagcagcactggagcccggctatcctcaagcgcgttgcgacggtagcgcgcgcggcaggtcgtatcacccgccaggagcaggcccacctgcgcacgctcctgccgcagccgccggcgcatcatccgcattatgggttccgcttcgtcgatctgtttgctggtatcggcggtattcgccacggttttgaagcgattggcgggcaatgcgtgtttaccagcgaatggaataaacatgcggtgcgcacctataaagccaactggtactgcgatcctgagcagcatcgtttcaatgaagatatccgcgatgtgactttgagccatctccctgaggtgagcgaggaagaagccgcgcagcatatacgccagactatcccgcagcatgacgttttactggccggcttcccctgccagccgttttctctcgccggcgtgtcgaagaagaatgcccttggtcgcgctcacggctttgcctgcgaaacgcaggggacgctgttttttgacgtggtcaggattatcgccgcccgtcagccgccgatttttgttctggagaacgtcaaaaacctgaagagtcacgatcgggggcggacgtttcgtatcattatgcagacgctggatgagctggggtacgaggttgccgacgcggcgcattccggggcggatgaccctaaagtcatcgacgggcgctattttttaccccagcaccgggagcgtattgtgctggtgggtttccggcgcgatctccagctgcatgagggatttaccctgcgcgatatcgccgctctctatcccactcgccggccgacctttggcgagctgctggagcccgcggttgacgacaaatttattctcaccagggtgctgtggaagtatctctatcgctacgcgcgtaagcaccaggagcgggggaacggttttggctacgggctcgtcgacccaacgaatccgcacagcgtggcgcgaacgctctctgcgcgctattacaaagatggcgcggaaatcctcattgaccggggctgggatcggcctctgggcgaaaagcattttgatgaccctgaaaaccagcttcgtcgtccgcgcaggctgacgccccgcgagtgcgcgaggcttatgggttttgagacgccgcagggatatcgcttccgtattccggtctcggatacccaggcctatcgccagtttggcaattccgtcgtcgtgccggtatttgcggcggtggcgaagttgctggcgccgcgtattgaacaagcggttgccaggcgtgagcaagagattaaccatggccgacgttcacgataa

SEQ ID NO: 206526 - DNA, 939 bp, Klebsiella oxytoca
atgcaaagtacattagagaataatcgtaaagtaccagctcatttctccgggcatgagacctttcccctacgtcaaatgtggttaaaaaaggttgtagatcaatcaactattgatggcttagtacctaaatcagtattcactgacaaggatgctatcgcaacttttggtgtaggtaaaaacatggtgagctcaatccgtcattgggctcaggcttgtgggatccttgaagaagcaacaacaaaagaatttgtactaacaaagcttgcgtcattgatccttagcgacaacggatttgatccttatgctgaacatccatcaacagcgtggttaattcattggcatcttgccggtaagtgcctacgctcaacgacttggtattggctctttaaccatgtcaagatgcctgcttttacacgcaaggatttagagggtgtattagctatttatgctaatgagattgtgcctgaacaccgtctttcacctgcaacattagaaagggatttggaagtatgccttcgtagctatgcgccacgttcctcgagtggttctcctgaagattatgcagagcctttactaggagaaataggtcttttacaggaaatacacaaagggcaatatgcttttcgccgtggaccaaaagcatcattacacctagggatattcacttttgcattgatggacttttgggagcaaagggcaaatggtttgagcgccttagcttttgaaaacatcatgtatagcgaaggctcaccagggagggtgtttaaactcgatgaagaatcagttgcccaatatttgatcgaattatcagaccgtacagagggagtgttgacctggactgattcggcaggtttaagacaaatacacaaaaaagtattgacagtaacagagcatgagaatttcaaggataaaatgattgggtgggcatatgacaaataa

SEQ ID NO: 206527 - DNA, 1971 bp, Klebsiella oxytoca
ttgaatcgtttgtgcgctttttatgatcttattcgcaggagccgcagcgcgcatttctgggcatggtgcggcgtcattatcgctctgcagataggggcgccagcccgcgcggaggtccgccagctgggtattgatattccggtctactggtacgccgacgccagcgacacgctgaccctcaacgcctttctttcgctccctgaagaggcgctaaaaacggcgccgcttatcccgtcgttcggctactcgacaaaggcctactggctacgtacttcgctcccggcggccttatttgctggcgaacagcgctggctgcagctcggtccgtcgtttgtcgatcgtttgaccgtgttttatcgcccctacggcagcgacagtccatggcgacagaaagagtttggcgaccatgcgtctgcccgggataacgatctcgactaccgcgaaagcgtactgattttgccgcccccgccgacggcggctggctacgagatggtattccgtctccagagcagcagtaccctgattctgctggcgacgctctcctcgccgcaggagttcgtgcgttcggccacgctcgataccgctttctggagcttctattttggcctggcggtaattgccagcggcatcgccctgtggcttgccatcgcgctgcgtcggcgcctgctgtgggggatctgcctgttctcgctaaactatccgctcgtcgcggccctgcatggctacccggagtggttatttggcagcgccctgctgccggttcaggattatatgatcagctgcctgtcgctggtgagctacgccaccgcgctgtggctgcatagcgaagttttcgatctcaagaaaaatatgccgcggctgcatcaactgttgctggcggcgatcggtttaaacatcgttctgcaaatcagtattccgctgggcttttacggcctggcgatgcagatagaggccgggatattttttatcgccgcccctattctgttgatcacgtcatggatgctgtggcggcgcaaagcgattgatatcaatacgctgctgctggggctgctgccgccgatatacgtcgtctccgccgggctggcgctgctctctatccacggcgtcattccgtttcataatggggtctattccacctggcagtacgcgctgattattcatatcgttaccgtcctgatcatcgccgtactgcgggtgcgggcggaaaaccggactctggtgcgcaagcagcagctggcgcgagagctacagattgaacgcgaggccagcttccaccagcgccagtttatgggaatggtggcgcatgagttcagaacgccgctggcgatcctccaggccgcgctggaaaacctgcgcctgtgccccgcaacggtgacgcagagctcgcgcctcgaccgcatgcagcgggcgacaacccgtctggtacagcttaccgataattgcctggccgacgcccggctctcctcgagggacctgcacgccgacaggcaggatgcagcgttgctgccggtgatctatatggccgcgacggtcgtggatctttcgcttaaccattatctggatgtcacccttgaggggcaaactgtaggtccggactccccttcaccggtgctgtttattgatagcgggctactgtgtatcgccatcgccaacctgctcgacaactcggtgaaatatgccgcctccggggagataagcatcgagatttatctgcaggaaaaacacgtggaattacgcattggcgatcgcggtcccggcatcccgcctgaacaggtcgagcatattttcgagcgctatcggcgcggcgaaacggataccgcaacgccggccgggaccgggcttggcctgtatgtcgcccgacaaatcatccaggctcacggcggggacctgtggctggcagagaacacgtcggccggatgcaaatttgcgctcacgctcccggttaacggacagcagaaggacaaatcatga

SEQ ID NO: 206528 - DNA, 555 bp, Klebsiella oxytoca
atgagcaaaggttccacaagcagtgacgccccgtttggtacactattaggctacgcaccgggcggcgtggcgatttattcttctaattacagtagcttaaatccgcaagattatccggatgacgccacgttccgcagctatatcggtaatgagtatatggggcacaaatggcagtgcgtggagttcgcgcgccgctttctgttcctcacctacggttttgttttcaccgacgtcggcatggcctacgaaatcttctccctgcgttttctccgcgaggtggtcaacgacaatattctgccgctgcaggcgttcgccaacggctcccgccgtccgcctctcgccggctcactgctgatctggcagaaaggcggcgagtttaagcacacgggccacgtggcggtgattacgcaactgatagggaataaggtcaggatcgccgaacagaacgtcattcactcgccgctgccgcagggccagcagtggacccgcgagctgacgctggaagtgaaaaacggcctctacacgattaaagacctgtctcttatacacatctga

SEQ ID NO: 206529 - DNA, 273 bp, Klebsiella oxytoca
gtgccgttttacggccgccagccgccgctgaatgaggtcgataaaattaaagcgccgctgctgctgcattatgccggactcgatagcggcattaatgaaggctggcccgcctatgaaaaagcgctgaaggcacacaataaagtctacgaggcctatatttatcagggtgttaaccacggctttcataatgactccacgccgcgctatgaccgggccgcggctgacctggcctggcaacgcacgctggcgtggtttgagaagtatttgcgctaa

SEQ ID NO: 206530 - DNA, 447 bp, Klebsiella oxytoca
ttgcgcccgacgggcctgctgccgctggtgaccgatagtctgcccgtgcgtttgctgccgacggaaattctggccggcgcggcgattcgcagccgtgagatcacccttggcgacgatccggggatcaacggtcagctgtgggatccgcagcgtatcgatattacggcgcagcagggcacctgggagcgctggattgtgcgcgccgaccggccgcagtcgttccatattgaaggcgtcatgttccaggtgcgtaacgtcaacggctccgcgccgttcccggaagatcgcggctggaaggataccgtctggatcgacggccaggttgaactgttggtctattacaatcagccctcctggccgcacttcccgttccagtatttaagccagacgctggagcttgccgaccggggctccattggccagattctggtgaatccggcgccgtaa

SEQ ID NO: 206531 - DNA, 135 bp, Klebsiella oxytoca
atgagcatcatccacttgttaagcaatctctggtcgatttgtagcgaaggctactgcccaagagttgacaaactgtacaccacccttatgcctacacataaggcctgtgatttataccatttaaattgtttttaa

SEQ ID NO: 206532 - DNA, 300 bp, Klebsiella oxytoca
atggccgccgcgagaataatcgagaacagggtcattatcgccagcgactggcgcgctgccgcccttgcccgccgccggtcccgcttacccaggctaaacgccaccaccacggtcgtaccgaggtcgatggcggcaaaaaaggacatgatcaccatattgaagctgtcggccaggcctacgcccgccatggcctctttaccgagccagctgaccaaaaaagtactcaacacgcccatcagcaatacgcaggcgttttccagcaaaatggggaccgcaagcgggctgatttcacgccagtag

SEQ ID NO: 206533 - DNA, 1047 bp, Klebsiella oxytoca
atgagttcctgcattgcagctgaagagagccaggccaacgccaggcccgcgtggcgcgccgtctatgcgctggcgctgggggtgtttggcctgattgtcgccgagtttcttcctgccagtttgttgacgccgatggcggcaagcctgggcgttagcgaaggcatggcggggcaggcggtcaccgcgacggcgctggtggcgttagttaccgggctgctgatcaccaccgcgacgcgaaatattgaccgccgctgggtgctgatgttcttctccgttttgcaaattatctccagcatgatggtggccttcgccggttcgctggagtttttgctgcttggacgcctgctgctgggaatcgccatcggcggcttctggtcgatgtcgaccgcgaccaccatgcgtctggttccggcggcgatggtgccgaaagcgccgctgggcagctatttcggcgcgctgatcggctggcgcaacgtatttcttatctgtgcgctgccgagcgtggttgcgctgctctggcagctgtgggttctgccttccatgcgtccggagagcgtcggcagcttcgctaccctgtttaaggtgctgcgtcggccaggtatgattggcggcatgctcgcgacaatcctgattttcagcggccacttcgccttctttacctatctgcgtccgttcctcgaaaccgtggcgcaggccagcgtcgaaggggtttctctgatcctgctcggttttggggtagcgaactttatcggcacctcgattgccggacatctgttagcccgaagcctgcgcctgacgctggcgctggtgccggtgggctggtcgacctggcttgccaccacggtgccggatgaagctgaaagcgcgggcggcctgctggtggcgtctattcagctggcgattagcgccggtgcggctggcggcggtgcggtattcgatctcaacggcgcgagcggcgtttttgtcggcagcggcgtgctgctggtcagcgccatggtgatagtgctgtttgcggtaagagtcaagccagtcgtgagcgaggagtag

SEQ ID NO: 206534 - DNA, 579 bp, Klebsiella oxytoca
atgctgcagcgtctcgtcgcgcatggcgtagccgttttcgtcgaactgatagttccacgacgatttatcgtactgacgcttttcggcatcgtagccgctgaacaggccatcttcgaaggcaaaatcgtcgcgcaccagcaggttggcgttggtgtagtgtttaacgtactcggcattgattttgttattttcgatcaggtacagcagcacgccggacaggaaggtaatgtccgtgccggagcgaataggcgcatagatatcggccaccgacgccgtgcgcgtaaagcgcgggtcgacgacaatcagcgtcgcatcgttgttgtttttcgcctccatcgcccagcggaatcccaccggatgggcttcggcggcgttaccgcccatcaccaccacgacgttagcgtttttgatatcaacccagtggttggtcatcgcaccgcgaccaaatgttggagcaagacttgctaccgttggtccgtgtcagacgcgcgcctggttgtctaccgccagcatgccgagggagcgcacaaatttttgcgtcagcatgccggtttcattactggccgcagaggcacataa

SEQ ID NO: 206535 - DNA, 885 bp, Klebsiella oxytoca
atgtcagataaaaaacgtatagccattaccggtgcttcagggaaaattggcagggtgacagtagaatggcttgagaaagccggttatgacctgtttctcatcgataaaaaagagtccgtaaccgatgcccatccagcgatgatcgcggatttagaggattttggtgcaacgctcgacgcactttcctccgtcggggaagacgtttattcacgacctgaacctgcagcctttgatgccgtggttcaccttgccagtattcctcacccccgaatgatccctgattctgacgagttcagaaataatatgctggttaccttcaacgtatttgaggcatccaggcggctgggaataaaaaatatcatctggtcatcgagcgaagtccctaccggcgtgccttacgaccagtgggatgccccctatgttccggtggatgagcactacccggcccgggggatcagcatttatgcgctgactaaagtgctgggtgaagagatggcccgtcagttctgccttaataacgctgacatgcgtattacctgtctgcggctttctaatgttatggcgccggaagagtacgcgcagtttgaaagctggcagaacgatcctgccgtaaggcaatggaatatgtggacttatgttgacgtccgggatgtagcccaggcgattgagaaagctgtcgaatatgatgtcaggggtaaagatgagttctttattaccagcgatgtgacctgcatgcgaacccccacacaggaacttctggaccgctactatccaggcgttgaacagcgtaaaaattttgtaggtaatgagtcagcactcagcagcgaaaaggcaatgcgcgtcctgggatatcgcccagcgcaccgctggaccgatagcgtgtga

SEQ ID NO: 206536 - DNA, 804 bp, Klebsiella oxytoca
atgagtgagaaaaaactggctcttattactggctcgagcaacggtatcggccttgcacttgctgaagaatttgcagctaacggatacgatcttgtcatcgtcgccagggatgaaaaaaaactttcagccacgggtgaaaacctgcaaaaacgtttttcagttaacgtacacgcgttcagtgctgacctgagtgagtatgaccagataacagacctgcaggccagaatggatgatgccggtttagcccctaatgcactgatcatcaacgccggccagggactcggcggcgcgtttatcgacggtaccgatcttgaaaaagagcttagattaatccggctcaacgttgatgctgtggtacatctttctaaaatatttatcccgcggctcgttgagcaggataacgggcacgttcttatcgcatcgtcgctttccggctcggcgccaatacctttcgaagcggtttacggggcgtcaaaggctttcgtaaactcctttttttacgccatacgtaacgagctgatggggagcggtttatcaatgacgcttctgatgcctggggcaacggagaccaatttcttcaaaaatgcaggacaggccagcacgaccgtaggttcgatgaaaaaggacgatccgaaagaagtggcaaaacgtgcctggtatgccctgatgacaggacatgaatttgtctatggcagtgaatatgccgaatatgagggcgaggtgatgaacagaatgatgagtgagtcacataaggctcagcgtcaccgaatcatttctgaacccgactctgccacaaaaaagtaa

SEQ ID NO: 206537 - DNA, 840 bp, Klebsiella oxytoca
atgaacgataaagtcatcagtacaggtaacgttgccgtaataaccggcgcggcgagaggtattggcgctgcggcggcaagggagctggcacgaaagggcatgaagctttgtctttttgaccggaacagacaggcgctcgagcagctggccggcgaactggaggttgaaacgctgctggtcactggcgacattacccgtgatgaagatctccaacagctcaaggacaccgtttacagcgcctgggggaaagtaaatctgctgtttaacaatgccggcgtgaaaatagctgccggagcctgtgattccccaactctctggcgacagcagatggaggtaaacctgctgtccatggttgccacacagcatatttttctgccggaaatgttaaaaatggatgagaacggtgcgatcgttaacctgggctcgaaggagggtattacgaccccaccagggttcgcagcctataacgcctcaaaggcagccgtaaaggtgctgacggagcagctgtctcatcagcttgtgaaggaaaccggcatcaggctcaccgctcatcttctggtgccaggctatacctggaccgatatgaacgatcctggcatgaacgagcgcagcggtaacaagccagatgaagcgtggatggctgcgcaggttattgactatttcctcccgcgctttgagcggggtgacttctatatcatctgccctgataacgctgtgaccagcgagatggatgctaagcgtatcctctgggccgcccaggatatgctggacaaccgcccggccctgtcgcgctggcatcctgactggaagacggcttttgaacgctggatgaaaaactga

SEQ ID NO: 206538 - DNA, 1209 bp, Klebsiella oxytoca
atgtctgaacaaacgctttcacggcaggatgaacgtattcatccacctgtgggtctttttccggccatgcttgcgctgggcgcgggcggattatgcatcggaacgggcgagtttgcgcccatgagcctcctgccggatcttgcgcggggaaccggcgtttcaatccctgccgcgggaggctatatcagcgcctatgctgcaggcgtggtggtcggtgcccctgcgatcgcggtgcttggcgcgcgccgggcccgtaaaaaccttctgctgatattgttaattattacacttgcaggctatgccctgagcgctctggccatgggctataattccatgttcgcagcacgctttattgctggtatgcctcatggcgcctggtacggcgtttccgcgctcgtggcggcttcaatggtctcgccacagcacaaagcccggtatatcggttacgttatgctgggactggccgtagcgaacgttgccggcgttccgcttgtcacatgggcgggccagacgctgggctggagaatctctttctggatggtggcagcgggcctggtgctgacgtccataatggttatgctttttgtcccatccgtggcggccgacaggtccgcttcaccgctcaaggaacttggcgcgctgaagagcccacagatcctaatgacgtttgccgtcgcttcagtcagctttgcgggcatgtttgccgtatacagctttatcaccccggcgctgacgaaagctgccgggttttcaacctcagccgtgccatggatcctggttctctggggggcgggcatggttgctggcaacattatcggtggcaggctggcggacattgcgctgatcccatccatatttggcatcatcgcctggaacatcgtctttctgggcctgttttcccttacgggcacactgcagaccccggttctcatcgtgctgtttatgctcgggtgcggattttcgctcgtgccagcgcttcaggcccatatgatgaacattgccggtgaggcacagactctggcgtcatccctgacacacagcgcgtttaatatttccaatgcgcttggcgcagctgcaggcggtttcgttatcgcttcgagaggaagctggctctctacggggtgggttggggctgctttttccctgttagcacttcttcttatgttcttatcggtacgcattactgacgggagaaatcatgaacgataa

SEQ ID NO: 206539 - DNA, 1137 bp, Klebsiella oxytoca
gtgtttcatatctggaccctcattccagcgctttacgtgctgtttcgttttatcaggccgcttcccgccccggtttcggtaaaaatagccgtcgcaggcgcaatgattgtggcctgcgagtttcatctgatcacgaaattatttacggggaatatgttttctcctgagataccaaaaccgttgctgctgcttactaccgggtttttcggtatgaccgtctttatggcagtcctgttagtactgcgtgacctgttctggatattgcaccgactggtatcaggacgccggatgaaatggcatacagctttctggtttatcctgcctgttctggcggccatgctcacagcgctggccctgaaaaatggtacagcggttcctgaagtgaaaaagatagacgtcacgctcaggagcctgtccccccgttttgatggttaccggatagttcaactgacggatttgcacgccagcagactgctgccgcgaagctggatacaggatgttgttacccgcacccgtgagctcgatgcgaatatgattgtggttaccggggatatgattgatggctggccagaagcgcgtttctccgacattgagccgcttggacagctgcgggctgaggacggcgtttttgccgtaacgggcaatcatgaatattacttcggcgctgaaaactggatccagacctttgaaaaactgggcctgcattttcttaataatgccggttaccgtataagccgtggcagcgactcgctgtatctgtcgggcgtgacggatgtcgttgcgccatcatacggcctgccgggtcctgatctgtccctggccttgaagttttcccgcccgggtgaaaccgtcatccttcttgaccacaggcctgaaaatgctgacgaggccgcagaaagcggagttagccttcagctttccggacatactcacggcggtatgattgccggtctcgacaggctggtcgcatcggctaataacggttttgtgtccgggctgtatgaagcagggcccctgaagctttacgtcagcaacggttccggcatctggaacggttttcccttccggcttggaaaacctgccgaaataacgcttatcaccctgcatggcgaaaccagcaacagaattgttgaataa

SEQ ID NO: 206540 - DNA, 984 bp, Klebsiella oxytoca
atgtcatttgacattgcattgaattttaatcaacggtttaacgccatgtcctccagactgtctaccacgctcacccgaagcgatcttgctgagctcaacgcatttcttatcactgagaaaaggcgcagttttactaaggccgccatagaactggggatcaccacctctgcgctgagccataccatacgcaatctcgagacgcgcctgggtgtcaggttgttgaacagaacaagccgtacggtctctccgaccgaagcgggcgcaagccttgctctgcgtcttgaaacaggctttaaagaaataggcgacgcgcttgaggaaattaaccgcatgcgcgatcggcccgttggaaagctcaggcttaatgtgctgagtgacggagcacgcctcatcatggcgcgacatcttccacgctttatcagcaaatatcctgaagtggaactcgaaatcagcgttgatgacagaatggtcgatatcgtccaggaaggatttgatgccgggatccgctttggcggaaccgttcctgaagatctcgttgcagtccgcctggggggagaactcagatgggtagcggtggcatcgccacgctatctttatcaacatactccccctgccgtgcctgaggatctgcgcctgcataactgcattcaactgcgcaccgggcaaggcgtcatctacaaatgggaattccgtaaaggagaagactatcgcgtagttgacgtcagggggcagctctgtgtgagcgaaacggcgctggcaattgagctggcgctgtccggcgtcggtattgcttactgcctcgaagaccgggtgagtgattatattcgtgacggcaggctcaggattgtccttcctgaatgggctcctctggaagagccgatgtatctgtactatccaggtcacagacaagttccccagggattaaaggaacttatcgaaactctgagagaagaaatagaactaacacatgcagtttcagcctga

SEQ ID NO: 206541 - DNA, 747 bp, Klebsiella oxytoca
atgatggcatgcatggtggggtatgcccgcaccgaagcgcaggacgatattgctattcagatgtacacgcttagaaatgttggtaataccgatgcacagtttgccatggctaaaaaagcgggattttcacatgtagaacttgtcggtgatcatcacatggatttaccgacaatgaaggaaacgttgaaaaaatatcagcttaacgttatttcatcgcatgtacagctatctgctcttgagagcgagcgcggaaaaattgttgcttttaacaaaggcataggaaactttcacctcgttgtcccatggattgaggttaatgaacgacctacgacaaaacagggatggatagattacgccaggaggcttgatcgtatgggggaggcgttaagaaatgaaggaatgtcgttgtcttaccataatcataattttgagatgaagaagtatgatgatgtgacagccctggatttgattatgaagcatacccacaagaataatcttagccttgaactcgatgtggcatgggctgcacgtggaggacaggatcctgcgtcaataattgcaagatattcaggacgcgtctatgcgattcatgcaaaagataacgctgctatcgggattcgtgatgacgaaatgaatttcactccggcaggtgaaggtttgctggaatggcgctcaatcatcagtgcggggagaagcagtggggttgagtggtatattgttgagcatgacgcgccaaaagatccctag

SEQ ID NO: 206542 - DNA, 168 bp, Klebsiella oxytoca
atgaacacgtcaccgtggaataaagaccgtatcataggccaaaaaagaccacttcagatatctcatatctgggggatccgaatccggcttgaactggaaggtaaaacgcgtgatttagctctgttcaatatggccttagacataagctacgaggctgcgatctggtga

SEQ ID NO: 206543 - DNA, 765 bp, Klebsiella oxytoca
atgattaattatgaaaagtaccggattgctgttctgggaaccggccatatcggtaaaacgcttgctcgcagtctcgcctctgccggtcactccgttaaggttgcaaattcacgtgggcctgaaacgatagcccccgacgtgcttgaaacgggcgctgaagcagccgatgcagccagtgcagtacaggatgcacaggttgtcatcctgtccatacctatggcaaaggttgcggatatcgcgcctctgatccggacattacccagtcatgttatcgttgctgacacgtcgaactattacccacatcgcgacggaatcatcgatgggttctcagatggtcaggtcgaaagcgcgtgggtagcgcatctcctgaaccgtccactggtgaaggcctggaatgcaataggttcagattctctcgctacaaaaggtaaagcagagggtacagcaggacgtatttcaattccggtggcagggaatatcgtagagcacaaaaaattgattatgcgtcttgtcagtgatacggggtttgacgccttcgatgcaggtacagttgaggagtcatggcgtcaacaaccgggtgcaccttgctactgtactgacctcacatttgatgaaatgaagtcagcgatcgccgcaacggaaaaaacacggctgcctgcgcgtcgggatattgctgttcaggcaattcaggagcgaatgggcgataagcaatccaatccgactgcagattatattgttcgattacaccgggctctttttatgtaa

SEQ ID NO: 206544 - DNA, 735 bp, Klebsiella oxytoca
atgaaaataggcattattggcgctggaaacattggtgcgactctggcacataagctctctgtgcagggccatgaggtcaaactggctaactcaaggggaccggaaacaattgcagagattgcgcgaagagctggggcactggcggttgagcgtcaggaagccgtacgagatgtggatgtcatcatcctctctacgccctttgataagcatgctgaactggctgaactcttgcgtgatgttccggagagcgtgatcgtcattgatacgtctaactactatcccttccgcgacggggacattgaagagatccgtgaaggcaaacctgaaagcgtgtatgccagtgaaatagtcaaacgccctcttgtcaaagcctggaacgctgttctggccgagacgcttaaagataaagggctggttgccggttcaccctcacgtatcgctattccggttgccggcgacagtacggtagcaaaatctgttgcactagaactggtcagtcagaccggtttcgatgcagttgatgccggtacgcttagcgaatcatggcggcaacagcccggcacgccagcctactgtactgagctaaaaaccggagagcttgaagcagcccttaaggcagcggataaaactcgcgctccactaaacagagatgcgttgatcaaggagtttatgtctgcaggcgaacaactcactcatgatgccatcgttaaacgtaaccgtgcagtaacggcctga

SEQ ID NO: 206545 - DNA, 435 bp, Klebsiella oxytoca
atgagcatgcagtcacgacaggaaatagggacacaactttcgtttgccctctatggtgcggcgagccgcatgaaccggttacataagccgttgctggacccgctggggctaacctttccccagtatctggtcatgctggagttgtttaacggaaccccacgcaccgtgggtgatatcgggaataagctcggcatggataccggcaccattaccccccttctcaaacggcttgaggctgccggacgcatagttcgcatgcgggatcgcgctgacgaaaggcgagtcctcattactcttacggatgacgggctcgctttgcaaagcgagctgtggcacgtaaccgaaaaaatcaaatcagcctgtcagttatcggatgcgaagctcgaggagttacgagataccctcaataactttgcccatcccgctgataactga

SEQ ID NO: 206546 - DNA, 1248 bp, Klebsiella oxytoca
atggccatcaaaggcgcgcgtctgccgaataaaggccaataccgcggcaactggctcaacgagaaagattcactgcaaaaagcctacgtggaagccaacggccacgtcatcaataaagacccttaccagtatttcaccatcaccgaaagcgccgagcaggagcttatcaaagccaccaatgagctgcatctgatgtacctgcacgccaccgacaaggtgatgaaggatgacagcctgctggcgctgttcgatattccgaaaattctctggccgcgtctgcgcctctcgtggcagcgccgtcgccatcatatgattaccggccgcatggatttctgtatggatgagcgcgggctcaaggtgtatgagtacaacgccgattccgcgtcctgccataccgaaggcgggctgatcctcgagcagtggctgaagcagggctactacggcaccggtcacaacccggcggaaaatctgctggatgagctggccggagcgtggaagcacagccgggcgcgtcctttcgtgcacatcatgcaggataaggatctggaggagaactaccacgcgcagtttatccagcgttcgctgactcaggccggcttcgagagcaaaattctgtttggcctggatgagctgcgctgggatgccgccgggcagctgattgatgccgacggtcgtctggtcaactgcgtctggaaaacctgggcatgggagaccgccattgagcaggtgcgggaagtcagcgccgatgagtacgcggcggtgccgatacgtaccggacacccgaataatgaagtgcgcctgatagacgttctgctgcgcccggaagtattagtcttcgagccgctgtggacggtcatccccggcaacaaggcgattttgccggtgctgtggtcgctgttccccaatcatcgctatcttctggatacggattttgtggtcaacgagcagctggcggaaagcggctatgcggttaagcctatctcgggccgctgcggcaacaatatcgacctgattggcccgcaggatgaagtactggataaaaccagcggccagtttttcgatcgcaaaaatatctaccagcagctgtggtgcctgccaaaagtggatggcaaatacatccaggtttgcaccttcaccgtcggcggtaactacggcgggacctgcctgcgcggagatgattctctggtagttaaaaaagagagcgatattgagccgttaatcgtgctaaaagacacagatagccgttaa

SEQ ID NO: 206547 - DNA, 258 bp, Klebsiella oxytoca
atgctgcgcggccatatccacaatggtcagcgggtccagcatccgccccgggccaacatcgccgcaggcctggctgccgctgtccgggccccagaccagcagaccgcgggcggcaatgacgtccagattatgctgggtggcggcggcgcgatacatctgctgattcatggcgggcacgacggcgaccggcgagggcgtagcgagacaaatcgtcgaaacgagatcgttggccatccctgccgcgacgcgagcgattag

SEQ ID NO: 206548 - DNA, 879 bp, Klebsiella oxytoca; identical to SEQ ID NO: 164437

SEQ ID NO: 206549 - DNA, 210 bp, Klebsiella oxytoca; identical to SEQ ID NO: 164438

SEQ ID NO: 206550 - DNA, 789 bp, Klebsiella oxytoca
atgtctgtaactgggatgaatgcaggtgatattatcttgataaacaatgggacttggtacaacatttttttgcaaaaatcgcttcgcaaaaaatcatctgttaacgctacccatgttgcgctaagtctgggtgaaggtgcttttatacacgcggatacttcctgtggtgttggttttgcttattttccggacttactggttgattctaaagggagatggaaagtcataaggaacaaagaaataaattctgattttgaagaaaaaatagaaaaggccgggatttttcattttaataaaacttacaactacggcttccttcttaaagagaatgaaaaatcactattttgttctcaacttgtagatttagtttataaatccgttggagttgatatttttggccgtaataaaacaaaatccttgttgaatttaaataatgccttccccgttgattttgaagaactgcttattaaggatgaaagatggtgcgaggtgtctaatgtttatcaagataatttaaatagtggttttattgaactacaaagaaccaatttcctaatgcggcaagctcttataatgagtgagcgaaatacgcgtaaatttcattctgacatgcttgatttggtaaatactttaaatgaatcgcataatttattaccgaaggagtttaaaagcacagaactggaaacccatttatctgaaatgattacagggctcaatgagagtgaaagtgcatttttttacaacttttggaatatacgatcaaataaaaacaggcaagtaaggtcatga

SEQ ID NO: 206551 - DNA, 504 bp, Klebsiella oxytoca
atgggagttaagtatagacaattttttgaagagcaagttaaatcaaacggtaaggttaactgttttgcctcattaataccatcagaacagtggttgatatttatcggtgttgcagcgctaagcggcgttattggaaatgcaacatatgatttagtaaaagttataatcaagaatattatcgagaaagcaaaaaaagaaggtgcaaatgaaatcgcagaaaaatatgactcagatgaaaaaattgaaattttaatagtccagattaatgagtatattaacttcccggaaaaaatccatcctgaggtactacgaggaattaaagaagaggaacgagttgatgactatatgtatggatattcagagataatggagattaaaggaaatataaatatttcttccgaagaggtggaagaaaaaattaaaaaaataaaaagcagaaaatccaagattaagtcaattgatgaaaaaaatttcgcccatttctgggataatttcaagaaataa

SEQ ID NO: 206552 - DNA, 717 bp, Klebsiella oxytoca
atgctgcggcgggtaagccggttccggctgatatgctggctgctgtaccggggcctgttccggctggtaagcatgctgcggctggtaagccggttcaggctgatacgctggctgctgtaccggggcctgttccggctgatacgcatgctgcggcgggtaagccggttccggctgatatgctggctgctgtaccggggcctgttccggctggtacgcatgctgcggctggtaagccggtgctggctgatacgctggctgctgtaccggagcctgttccggctgatacccgtgctgcggctggtaagccggttctggctgatatgctggctgctgtaccggggcctgttccggatgatagaccggctgagcctcataccctggcaacggttcagaccatgcctgcggcgcagcggtatcctgcgcggccaaagccaccggatcggcaatgctatgaccgttcaacagaggatcgtaggggtcaaaatcgccgggacgtgccgcactgacgccggagaacagaacatcatcagcatttgccggacgcgctgcgctggagccagaaaaaaggacatcgtcagcggcaacaggcgcaccgccggcgctgtactgaacctcgtcttcggcgtcatccatccgtttacccgagaacagcgccgcatcggtcttacgccccatcggattagagaacttctcagccagacgctggcggcgagctaa

SEQ ID NO: 206553 - DNA, 294 bp, Klebsiella oxytoca
atgacgggtgagttcgccgtggaacagctgttgaccgtgttcgtaaaccagcgcgccgttctcggcaacaaaggagatttggtcgcggatttccgggaaaaaagagatcagctggtagtactggttgccgctggcgacaacgaactcaataccctgctgctggagttgcgcgaactgcgcaagaaaacgcgagcggtcatactgcttggcgtcattgagaaaagttccgtccatatcggtgacgataactttaacggtcataacacatgctcctggcttaacttcgaccagtaa

SEQ ID NO: 206554 - DNA, 936 bp, Klebsiella oxytoca
atggcgcagcacgttgagcgtgggcgtgaagatttgcccggcgcgcgggcgcagcgccagcagcagtccgcagagcaggccccccgcaatccccagcgcgccgccgacaaaggctcgcccgaggcttgcgagcatcgccgcggtcagctccccgctcagggcgccctgaataaaacgcgtcgccaccgccagcggcgaagagaacagcgcgccatcgatccagccccacgagcttgccagctgccacagcgccagcaggaccagcggcagctgcagcgcccgccagctggcctgcggtttccaagccaggcgtccggcggcaggctgcggccagaacaccagacgagcacaggcgcggttcgccgcccactccatcagcatgccgctcaggccaaccaccgcaatggtgacgaagacgatatccagctgaaacagctggcgaccccagaccatcaggtagccaatgccttccgaagaagccagcagttcgacgacgataagcgacacccaggcctgggacagcgccagacgcaggccggtaaaccagcccggcaggcttgcggggatcaccagccagcgcagccgctgccagcgggaaaagttcatcacctttgcggcttcgctcagggcctgcggcacgccggccaccgcctgctgcgtgttaatggtcatcggcactacggtggttttgatgataaccgccagcttgaggccgttatcaatcccgaacagcaccataaacagcgggatccagccgagcgtcgggatttgcgccagcgcgtagaacagcggttcaacccgctgcgcggcggccggtaccaggccgaacagcgcgccgagcagcgtcccagcaatggcgcccagcagcaggccaagcgccagatgctgaaggctgaatccccattgcgccagcagatccccgctcagcagcgatag

SEQ ID NO: 206555 - DNA, 1422 bp, Klebsiella oxytoca
atgagtactctgtctgttgataatgctggcgccgtttcggcaccggtgagtagcgtcggggatgtggcgcgattaattaattccggcagggagcagagtaaatatgcgcggatgattgtattcctcgcgctcggcggtgtattcctcgacgcttatgatttaaccacgctctcttacggtattgatgatgtggtgcgggaattccagctctcgccgcttttaaccggcattgtcacctcgtcaataatggtcggcacgattatcggtaatttaatcggcggctggctgacggataaatatggccgttattcggtgtttatggccgatatgctattttttgtggtatcggcgattgcggcaggactggcgccgaatgtctgggtattaatcggcgcgcggttcctgatggggattggcgtcgggatcgatctcccggttgccatgtcttatctggccgagttttcccgctttagcgggaagggtaataaggccgcgcggctcgcggcctggtgtcctatgtggtacgccgcctcgacggtctgttttttaatcatctttgggctctatttcctgttgccaaaagaacatctggactggctgtggcgcgcatcgctgctgttcggcgcggttccggcgctgctgattattgccgtgcgcagcaaattcatgaatgaatcgccgttatgggcggccaaccagggcgatctgacctcggctgtgcgtattctgcgcgactcttacgggatcaacgctcacgaagcaccgccagaacgtccagctccgccgcccaaagtgagctttcgcgtgctatttgcaaaaccgtaccgcgaacgcactattgtcgccggggtgatgaacgtctgtatctcatttgagtatacggcgatcgcctttttcctgccgtccattctcgcccaattccttggtgctggcgtgttcgaaaccatctccgcttcgctgggactcaatgcgctgttcgcctttaccggtgggctgctggggatgcacctggcatggaaatacccgtcgcgacacgtcgcgatcgccgggttcgcactgcagtttatcgccctgatcgtcctcgcgctggtggggcagccgcaggccgcgctgggtgtagcgctggcgattgcgatgctgggactgtggctgtttgccgagggctttggtcccggcgcgcagttaatgatctatccggcgctttcatacccaaccgcgattcgcgccaccggggttggcttcagtcgcgcgctttccggtattggcagcgcgctggcgctgtttgtgctgccgctgctgcaggcatcgctcggtacgcaaatgttctgggtcgtatcgctggccgccattatcccgattttcttcctgctcgcggtacgccatgagcctacccaatatgacattgacgacagccaccattga

SEQ ID NO: 206556 - DNA, 843 bp, Klebsiella oxytoca
atggctgaacgacatgttttaggattgtcaggaggtaaggatagcgctgcgctggctgtgtatatgcgtgatgcctatcctcatctcgatatagattatttttttactgatacaggtgaagagctacctgaggtatatgaattcctcgggcgacttgaaggctatttaggtaagccaattattcgtctaaatccgcgtcgagattttagattttggctgaaacaatacaaccattttctacctagcccccaaactcgatggtgtaccagacaactgaaactactgccatttgaagaatggataagaccttggctagctgcaggtgatgatgtgacatcatatgttgcgatacgggctgatgaagaatatcgagagggctatacctcaaaatcttcaaatctacatataaagttacctttccgtgaatccggaatagataaacctggtgtcattgatatcctagaatcatcagggctaggttatccaaaatattatgaatggcgttcacgtagtgggtgtactttttgctttttccaacaaaaaatagaatgggtaaggctaaaagaaaagcatcctaaagcatttgacgcagcgaaggcacttgaaaaagattctcttgagcacggctcgccttttacatggtctaaaggtgaatctttagcacaattagagcaaccagaaagaatgcagcaaatcagaaaggaatttgaagctcgcagggagagaatgaggagaagtattcctgtcaatgtgctaagacctgtcagtaagactccagaggatattgatgatatatacggagaggatgaaggtggtagtgcgtgtttgatttgccataagtaa

SEQ ID NO: 206557 - DNA, 1797 bp, Klebsiella oxytoca
atggaagttgttcttagtgatatagaacaacttgagaaacatgctgataactataagccctcaaaaggtgagtttggctgttttatccttgcgataccgaaccgtggtataactgaagataaggcaagagaaaaagcaaaaaaatatgctcgtttttctccatttcctgtaattataggtattccagaaaactttagcagtatcaattcattggcagaaaagcttgtggttcttgaaaagattaagaactatagctcacttgaaggtgacagagttgctcgccgagaggtttattccttattatcagcaacaagtgcagatcttgaatatcagctccagagtgctttaatgcaagcatcttggtatgatggaaaaaatgacaaaccaattaaaggtaaaaaagttgccacactagcctctgacttcgcagacaatatatacaacttctcacctcatatttacagtgagttagttaatagagataacctttctagcagcagtgttaaagcccgacgtttgttattacatgcaatgattcgatgcgagaaagaagagtttgttggattctctgggtatccggctgaaaggggtctttatgagactctcttaaataaaactggtttgcaccgtaaaaccaaagatggagaattatcatttctttctccggaaaaaaactcggctagtaacttaaatgggttatgggatgctactcaagcattattcacagatgtagatagcaaaatttcgatagataagctctatgagctttggtcattacctcctttcggccttaaacaaggcttattacctgtcattttaattgcatttgtattagctcataaatcaacagttgcaatatataaagatgggatgtttatgccatatcttgaagatgtggatattgacgagtgtttacaagcacccgctcggttctcattgcgatgggttgctctagataaaaacaaaaacgagattttagaaggtatatcaaacctattgagtgaagtgtgtaacaataggactagtatcgaccctcttgatgcagcgagaggactggttggcatggtttatgacttacctgattggactaggaaaacgcaaaaaattagccatgttacaaaatctgttcgcgatatgcttttgaaagctaatgatccacacaaggtactctttgttgatttgataaccttactcaaggtttcggatggaaagaattatatagaaactttaaaaccaataattgaagaactattctttgcctatgaaaaagaattatcaaaagtaaaagataagcttttcttggcgttagatgtaaaccctaatgatatccagtctctaaaggttagagctagtgctgtatctggaattttaggggatatacgactagatgcctttgccggacgtttagccaattttgataatgatttagcatctatcgaaggtttggtgagttttgctgttgaaactccgcctaaagggtgggttgaccgtcacattgatgctgcgattttagagctaagtaaattagcccgtcgtttgcgagaggcagaagcgtttgcatctgtccagggaagagcatcacatagtgaagcaattgcattggttctgggaaccggctctgaaactgtaaccgtttctcgctccttcgcgattccggagcatcatcaggatacaatacaatcaaaatttaaagagattgttactatattacaaaaccaagatctagatactgaagttgccttggctattattgccaaggtagggatggagcttgttgtaagtgaaaaggaggagtaa

SEQ ID NO: 206558 - DNA, 522 bp, Klebsiella oxytoca
atgaatgaatatgtttcatcattaggtggggcttattttagatattgtgatgacatgctatttatcgttccttcaaatgaaaaaaataatatcgctggcgaagcggaaaagaaattattcaagttaaaattatctcttaataccaaaaaaacagagataagggatttttttgttactccatcaaaaataaaatgtgacaaacctttgcagtatttggggtttttatttgatgggcataatgtttttctaaggtcatcctcactctctcgttattctgaccgaatgaagcgaggggtgcgtcttgcgaaagcaacaatgaaaagaaagaataaaattagaaaattgaaggggttacctaaaaaggaattatttaaagaaaaagtatacgcccgttattcacatgtaggtaaaagaaattttttaacctatggttatcgagcctctcgcataatgaactccagttcaataagaaaacaattgaaaccattgtgggaaaggttgcagaaagaagttaataaatag

SEQ ID NO: 206559 - DNA, 162 bp, Klebsiella oxytoca
atgcgaatcatcaagaacgaattaagtgcagaagagtggctgttagcagctaaaactaaatccgatgacatgagcaatgctacatctgttgcatgtttctataagattctttttgaggcgactacgaaagcctataataatattcttttagatagtgattga

SEQ ID NO: 206560 - DNA, 1374 bp, Klebsiella oxytoca
atgacgaacaaaaccagcttgattcccactgagggaattttaacgaaagagggtttgcagcccgctaattacaacattgacagctatgtaagcatgatggaaagcgtgtctcatagcgctaaaggtgctgccgggatgggttcaccaacggctaaccgcatgaaggccagagccgcagagggtatgattccgctggtggcggcaatcaccggggaattgtccgggattggatggcgcataattagcgagccggtcgccgccgctatgcttaacggtttcgacatcatcactgacaagccggaagatgacgttaacattaagcaatttttcgatgatatgcgcatctggcaatctgtcgaacgtgcagcggtgttaaagcgacatcatggttgggctgtgctcgtgctgggcgaagaatgggtaagaagtcacggcgcaaactggataacgccatcagatgactggttcgcagattacaatcatcctctattcggcctgccggaaggctggcgcattcagttaaaaagcccgataggtggagaggttttcattgagcaggaagattccattctgtttggcgatccagagtatcagcctatttatgcttccgcaggtattgagtttggggctcccatcctgagcaaaccttatgcctcgttgcaacggttgggattatcccatgaacttatcattagcattctgtcattgtccgttcaggatatttataaaaaagaagaacttgcagaagatttaaaaacagcaaagggggaggcgcaggccgctcgccgactggctggcattgctgcaaccaggcatcttaatgacatgatagcgatagatatgaatgaatctatcgaccgtctgcaatccactatgacgggaacggctgaccttgttgatatggctatcaaactggtgtgtgccgaaacgggtttccccgtatcaatgctggcagagcgtcggtcaggactgtcaaacagtgataccagtgcagatgcacaatggcaaaaccttgtctcccatatcacgactaatgacattattccggcactgaaaaggctggcgttgcattatctgggcgtcaaggctgattttatacctaacaaatctcagggtcagattgaccgcgaagtagacagggacaaaaaagtagccgaaacagcacagatttattacggcatgagggccatcaccagcgaagaagccagggcgaccgcgaaagaaactgccgctgtaacgctgctgacagaatcagcgcccgcaactggcaccattgatgaccagaatgacgacgattcgaaccagaacaacgagaatctgaaccggaatagcaccaaaaaagacaacaacgaggccaataatggcgaagagtga

SEQ ID NO: 206561 - DNA, 1335 bp, Klebsiella oxytoca
gtgactcggattccgacagcgattccgattctgacagtgactctgactccgacagcgattcggactccgacagcgactcggattccgacagtgactcggattcggacagcgactcggactctgacagcgattccgactccgacagcgattcggactctgacagcgactcggattcggacagcgactcggactctgacagtgactcggattcggacagcgattcggactctgacagtgactcggattccgacagcgattccgattctgacagtgactctgactccgacagcgattcggactccgacagcgactcggatagcgacagcgattccgactccgacagtgactcggattcggacagcgattctgactctgacagtgactctgactccgacagcgactctgactccgacagcgactctgactccgacagcgattccgactccgacagcgattccgactccgacagtgactcggattcggacagcgactcggactctgacagcgattccgactctgacagcgactccgattccgacagtgactcggactccgacagcgactcggactcggacagtgactcggatagcgacagcgattcggattctgacagcgactcggatagcgacagcgattctgactctgacagcgattccgattctgacagtgactcggactctgacagcgactcggactccgacagcgactcggattccgacagtgactccgactctgacagcgactcggattccgacagcgattccgattctgacagtgactctgactccgacagcgattcggactcggacagcgattctgactctgacagcgactcggattcggacagtgactcggactctgacagcgattcggattccgacagcgactcggattccgacagcgactcggactctgacagcgattccgattctgacagcgactctgacagcgactcggattctgacagcgactcggattctgacagtgattcggattccgacagtgactccgactccgacagcgactccgattccgacagcgactccgattccgacagcgactcggattctgacagcgattcggattcagacagtgactcggactctgacagcgattctgactccgacagcgactcggactctgacagcgattcggattccgacagcgattccgactccgacagcgattccgactccgacagcgactcggactctgacagcgactcggattccgacagcgattccgactctgacagcgactcggactctgacagcgatattgaggccaaccccgatagcaacagcccggacgttgtcgcgctggaaggtaacctga

SEQ ID NO: 206562 - DNA, 300 bp, Klebsiella oxytoca
gtgaaaattgtagcagcattaacattcttaactttcatttttagctcttccgcattttctcaagaaaatagcattgaacgagctcaacgtgtcactacaaaggtgtgttcaaaggcggaagactacgatttgtgcatgttagagctaagcatggctttaggcgctgcatatcaagatggactgatcgtttcgggatgcaagttggggcttgatgagccttcgaaagacaaatgcgaaaactcggaacgttttggggagtatataataaaagaaatcaagaactatgcaaaaaagatgtaa

SEQ ID NO: 206563 - DNA, 189 bp, Klebsiella oxytoca
atgttagataccctggacaatctgcagttaagcaaggaagaggcgcttgcactggcgcaactcgtgaagcggttaacctggactgatatgcgagggtgcgccgttgatgatgatgaagcctatacgatcagtgatgcagtggccaaattgcagaagagtcttgccgaagccggcttcgcaccaaggtag

SEQ ID NO: 206564 - DNA, 279 bp, Klebsiella oxytoca; identical to SEQ ID NO: 179303

SEQ ID NO: 206565 - DNA, 432 bp, Klebsiella oxytoca
atggatggagagttcaccggtcttggttttgaacagcttaccgcgcgccgcgatgatgtccccgaggtcccattttttgaactgctcgttgtagacgccttccgccagatcgtcgcgggcgacgtacagctgaatgcggccgccaacgtcctgcagcgtaacgaaggaggctttacccatgatacggcggggcatcatgcggccagcaacggcgacttcaacgttcagcgcttccagctcttcgttttctttggcatcgaattcagcgtgcagttggtcagaggtgtggtcacgacggaaatcattcgggaacgggataccctgctcacgcagcgcagccagcttctcacgacgggctttcagttcattattaaggtcaattgccgcgtcagcgccctgtgcttgttgttcagacatgttggttcctcataa

SEQ ID NO: 206566 - DNA, 582 bp, Klebsiella oxytoca
atgggatctgctgctgcccgcatgatgttggatgcgacggcgctggcacgacctcacccggtgaaacgcgaaagggttgttcttcgggaaggtgcagttggactttcaatcgatgccgttgcaaaagaggctggcgtcagtaaggcaacggtaatgtacgatcataagtcaaagcaagatttgctcagcgatctcatcagtcgccttatgtcagtagaggaggaacgtgttcagcaagcgatagcggaaagtaataataccccacatcccgcactctatgggcgaattatttcagccagtaatgctctcagtcatactgagagagcagtagtgctggcggtcagcgcatcgttaactaacgatacgaatatcagggacaccatgcgttcctgcacaaacaaagatttggatgagataaaaagaggaccaaaaccagacgttgccgtcctagtatatttggcgttatctggtatctactgccaagaattttttgatttttacaaatggtctcctgtcgagcgagataaaattatcgaaggcattcgctgtttgtatgaatcataccctgacaagtctgaataa

SEQ ID NO: 206567 - DNA, 921 bp, Klebsiella oxytoca
atggactggaaaaataataaagaaattgctgcatattttaagttttcgaatgttatggaaagtgacccaaatgggttacgccaggcaatagtcagaaaaatggcatcaatacatccagacaacactagtggtgtttttattgatgatgagtcaaaaaatctatggcaacaccttaattcagcaaaagaattcattgataatcagtctattgagaaatctacggatgaaaatgacaaacagttgatacccatgtcacaagtgatggatttggttaaagtgattactgcgacaggaactcagactgttagtctgacgccttcattaataaagtcagaaattcggagtgatacacgatctagtgcgtttctccctcgattggggtcaggagtatttgcgacgctaagcgctttcttttttacgtttcccaatacggctaaagataacccaatcattggtccttggctacagctccctaattcgcaatattatctattatgtgtatcgttattgtcaggatggctctttattagaacttggattcaagaaaagagacaagaagaattaatagattatttatcatctgatgaaggacttcgaagaattctatttaacatgttctatggacatgttgatcataacatgtcaggacgacagttttcgcttcctagtttcactcacgctattaaattaaggcatagtaatcgggatcctagtattgtaagaattatggaagtatataaatctgtattattgggtgcgacgcctaagttatctcgttctattgtagataaaatagctttaatgcagatcgataaacttattcagcggggattggttgtggaattaccccattccggattggatcggatattcgaactttccgaggctgcgtataatgatattcgtcatagatattattaa

SEQ ID NO: 206568 - DNA, 579 bp, Klebsiella oxytoca
atgaacagatggcggataatcaaaagcaaagaagaatatgacaccgcaatgaccagactgttagagctggctgatacagaccttgatgaaggctctgatgactttgatgaatttgagcttcttagcctgctgattggtcattacgaagattcaaactttaaaatggacaagcctacacccattgaagcgattaaatttcgtatggatcaaagtggcttaactcaagctgacatgcgccagtatcttggctcggcttctaaagtatcagaagtgctaagtgggaaaagaaaactaagcctgaccatgatccgtaggctgcatgatggtttgggaattcctgccgatattttgatacaagatacagatgatgttgaatggtcgcctattgctttcagtgtcgaatctttagcaattgcatttggagatgtatgtaaggttccatctgaaaacctgagttttgacaaagttagtcaaacagttatggacatacagcttaccgcaaaacagattatttcggattcatctcaagaagtagagattaacgctatcaatgatgacatcccagtatattgctattaa

SEQ ID NO: 206569 - DNA, 255 bp, Klebsiella oxytoca
atgaacgctgtagaaatcgcgattgcggcagttggagggcaagcggcagctgcaaaaatctgcgggttatcaccagttgccgtccatcgctgggtgaagaatgcctgtcttccacggactgaatacacgcagaaaacgaagtatgccgaaaagttagctgctagttcttctgggaaattcaccgctgactggcttttggacaatgcaaacccagaccgcccaaaaatagtaaacgaatcgacatcatacctgtaa

SEQ ID NO: 206570 - DNA, 564 bp, Klebsiella oxytoca
atgcatcatgaccttaaacaccgtattcaggcgatgcgggtcaaactggaagggcgcgcccctgtcgctgaaattcggggtagctcgcaactttttgtcaccccctccccggaatgtcgccggttggttgagctggctgatgtccgggaaaccgatcgcattctggaacccagtgccggaacgggcgccatactgcaggcgatcagggatgcagtcccccgggcgaagtgtgacgccgtggagctgcacgccgggttagcccgtcacctgcaggctcatttcccggaggtccggatctggtgcggagattttctcgaatatcatccggagcgccggtatacacgaattatcatgaatccgccgtttaatcgcggtgatgatatccggcatatccggcgggcattaactctgcttgagcctggcgggattctgacgggcatatgtctggacgggccgcgtcagcaaaaggcgctggagtccctggcggacgtctgggagccgttgccacggggaacattcacgtatacccaggtagcgaccgccattctcagaataaccgtctga

SEQ ID NO: 206571 - DNA, 252 bp, Klebsiella oxytoca
gtgaacaaccttttttaccgatgcactggcgcgaatcagaccggttcccctggtggctatcaggacgtcttctgtattgctccgggtatgattgccaccgttcatgcgcgtctcacggtccaacatctcaagcagatcattgaagtccaccagctctccggcgttaagcgccttgttgaagcggtcagcagcgttctgattcagttttacccaggtaaagcctttcattgttctgacccggaaaccccatga

SEQ ID NO: 206572 - DNA, 768 bp, Klebsiella oxytoca
atgcccggccacgtcgtcggtcacctgcagaccgctgaccggagtcaccgtcgtgtccactgtaatttcaaacgccggagagcgctcgctgacgttccccgccttatccgtcacggtggtgctcaggctgtggtcgccctcgttcagggtgtccggcgtgaaagtccagcgtccgtcctccccggcaaccaccgtacccagtacggtgtcaccgtcgtagatcgtgaccgtggcgcccgcctcggcggtaccgctcagggccggcgtggcgtcgttggtcagatcgccgctggccagcgggccggtatgcccggccacatcgtcggtcacctgcagatcgctgaccggagtcacaactgtatccaccgtcagttcaaacgccggagaacgctcgctgacgtttccggccttgtcggtcacggtggtgctcaggctgtggctgccttcgtccagcgcatccggagtgaaagtccagcgtccgtcctcgccggcaaccaccgtacccagtacggtgtcaccgtcgtagatcgtgaccgtggcgcccgcctcggcggtaccgctcagggttggtgtggcgtcgttggtcagatcgccgctggtcagcgggccggtatgcccggccacgtcgtcggtcacctccggcgcactggcagacggcgcggtggtatcaatcgtcagctcaaacgccggggaacgctcgctgacgttcccggccttgtcggtcaccgtagcgctcaggctatgaggaccttcgctaagctccggtaa

SEQ ID NO: 206573 - DNA, 276 bp, Klebsiella oxytoca
atgatttattcagacgttaacgaaaaatgggccccagtgccgattgagctttattcaaaagcctatgaagtaagcaatcttggacgggttcgcagcattccacgtctggctaactctgaatattttattcgtcaaattcacggcggttttctgaaaggccgtatccgcaaagacggtaccaaaaccgttacgttgtcggttcagcgccagcgcgcgaagtttgtgattgccgaactagtggctatggctttcggggaggcaactgctaatgcttaa

SEQ ID NO: 206574 - DNA, 297 bp, Klebsiella oxytoca
atgcgacggtgcatagaactcatatttgctcaatgcaccaatggcgatcagttccttcatcgtcgttggcttaatcagacgctggtagtaattgcccaggaatttagcgaaaggcgtaccggaaaggccgatcaccttcgttgctgtgttgcgagtaagattgtcgataacctccagcagttttttgcgcttcaggtgggcttcatcaacgatcaacaggtcaatattgtccgggaactcacggcgaatcagcgtatccgcactggcaatctggatcagagcagtggggttgtatga

SEQ ID NO: 206575 - DNA, 414 bp, Klebsiella oxytoca
gtgaaaaccgatgaagcggagaagttgccgaaagaatgcagccagtgccactacgtcaaaccagccggaatctatatctgcccgaaatgtggtttcaaaccgctggccggggaagacgtggaaacagacaaatcccgggggttgaaaaaggtcagcaaagcggaagttaaatacaccgcggagcagaagcaatcctggtggtcacagattcttttttaccagcgcacccgtgcagcgcagggacgcccggtcagtgatggctggtgtgcgcatacctacaaacaaaaatttggtgtatggcccaggggattacataacaccccgcagcagatcacaccagaagtcacgaatttcatcaaatccaaactgatcgcctttgcgaagagaaaagagaaacaaggggaagctgcatga

SEQ ID NO: 206576 - DNA, 324 bp, Klebsiella oxytoca
ttgattctgaaggcgatgatatgccgcgccacgttcaaggggagtaagtgccagcccttgcgagcttgtcaccatgaaagcaatcttatcggcttcagtaccgacaaaatctttgcattcgaggcgcacaatgtcgtggcccatagcgatagcagcgagcgcaccgtgatagcggtggtgaccgtcgatcaccttcacaccacgctcagtaacttctacggccagcggcggaatatattcaccggcgataaacgcgtcgcggaactcatcgacatgcgcctgattcagttcgcgaacgttgtaaccttcttccgcataaattga

SEQ ID NO: 206577 - DNA, 1086 bp, Klebsiella oxytoca
atgatcttctcattgagtgacaagcgagctttcttttatttcattcctcctgtcgtggctatctatttttctatgcactatggctatggatttgactggattaactaccttaattcatatgaaattgtaaggtggcaaaacatccctcttacagagcctggacttttctacacaatgaaactggctgattatttcaatctcagtttcgggcagatgttcttatttatatcagcattcaattattattgcctgtacagattttgcaaaattttcaaaaatccgatgttcgcattcttttgtgcattttctttcttcggattctatatgtatgctgaacaaataaggcaaggattagctttatccataatactcctcggtttatcaaaacatggattcgaatctaaaaaaatatacatatggatgattttagcagcatttttccacgttagcgcattctttttggttatttgcaaatttgtttcaccatcatcactgcgttctttcagaaaaaatatagtgctgatgactattgttgttttcggattcttaatcgtattcacaactccgtcacttgtatctttcattccttatgttggttcgaaggtggctgattatagtgcatcatatgactcatcctggggtgggttcataacgttattcttactgtctaaatacacatatctctatctattctctataattgtagtgtacgtatgctttgttaaaagcaaagataagaaaatattgaaatctgtaatttcattatatttcctcatgctatctaaaataacacctttcttgttacgctttggttattattttgttccttggctaattctcggtttggataattatttttatgagaagcagaaaaaaggcgttatctttgtaaagaaaacgatgattcatgccattattttacttatatccagcgctacgatgtggaatccggcattgtttaccgctacacaaactccgttatcagtatttgattctcaatacagtatagataaagaagtaagcaacaagtgcattatcgtatacaagaccgggttcggtagggatgttctccctagttgcggttaa

SEQ ID NO: 206578 - DNA, 273 bp, Klebsiella oxytoca
atgagcattacgctgaatgtcagcacgaaaaaaacgttttcataccctaacctggttatttccggtgagaccgtagaaaacgtcacggttacctttgactatcaaggggcaacccttaataaagacagtgaatcgtcagccctgttctcaaccagcattgagggtacagagtcagtcggtacgattcaggtcgttttcacatgggacgaaacaaaaggaattcaggagcaggcagagagcgcgctcaaagcggcattcagtaccgcatcataa

SEQ ID NO: 206579 - DNA, 876 bp, Klebsiella oxytoca
atgtgggcgggggcatgggactcgataaagtctccgatgaatgtactgaaggatgtcggtaaaggcgattttagcggggcatggaaagacctcaaacatattccgggcaaccaggaacgcgcgaactcaaaaacgctcaattcctttgggatacgtgggtgggttggcgatcacccagggcaaactgctgcagcgatagtcgccagtatttttggtggagctgcgttgatgggcgggggggcgtctggatctggtgctgctggtggcgcagctggttccggggccgctggggcttctggctcgaccgctgccccaataaccgcagcagtgggcacgccagtaacgcaggtgggaacagctggcgctacaggaaccgcgggttcaaccgctgcatcaggaacggggtcgggtattatgggatcaatgcagaactgggctggctatgcccagatgggtagctctcttcttaacgcatcatcttcagcaacgtccgggaatcagagcgccagtgtctataaccagcaggcgaagcagctccgtcagcaggcggataatgtcgatgcggcctaccagcagcaggcaagagagcaaacaactcaagcccgccaggcagaatcaacatcacttgctaatgccgccgcatccggcgccagcgctaacagcgtttccgcaattaacaaccgggcagacatagcgcagcagggtgagttaaataacctgaccacgttatggaacggtacgcagcaatcaaatcagatgcgcaatcaagccaatgttcttaaagcacaggcaaaggccgctaaatcggccggtggacttggtgggttgacctccatccttcagggaggagcgtctttgtatagcatgtacaaataa

SEQ ID NO: 206580 - DNA, 444 bp, Klebsiella oxytoca
atgacaaataacatccgatacgcgacaaggaatgatatttccaactggtacgagaaagttcctggcaccatgcgggctatcgtactggaggttgatggggaagtgctggccttcggtggagtcatgcgtcgtgagcatcggctggtagctttcatggaaatgaaggatgacgcgccgaagtatccggtgtccatgatcagagctgcctgcaaagctatcaaagagattatctcgacatacagccagccggtttatgcagtagtcgatgaagagtggaagagtgctccccgttttctggagtattgcggatttatcgacagtggactatcagaaaatatcaaggtttttggaggaatgagccatgtcaaagcaggcatcagccatgtgggcgggggcatgggactcgataaagtctccgatgaatgtactgaaggatgtcggtaa

SEQ ID NO: 206581 - DNA, 222 bp, Klebsiella oxytoca
atgggtggtataggaaaatcagtagggaatgccgttagcagcattctcggcggtggtggctctgatgtcactattgagagtgaagaccagacagcggcgccaactgaagatactgatgcagttaaagctgcacgtcggcgcagcatgattcagagtcagcagcgcggtgggagaagtagcacaattctcacgggtagcagcaataacaaactggggggatga

SEQ ID NO: 206582 - DNA, 267 bp, Klebsiella oxytoca
atgatcactcttctcacgtatatcaactccattattctggccgcgctgcttatcgccggcggctgggtaaaaatccgtgactatttccgcaataaagcggcaaccaaagcagaagcggcagaggctgctgcaaaggcgaaagccgatgagctggaagctttggtacaggaacggctgaaaaagttgcaagctactgctgattcaaccgaccagactgcaacatctgtcaccggaactacagcggttggagcgggcgtaacggcgtaa

SEQ ID NO: 206583 - DNA, 531 bp, Klebsiella oxytoca
atgagtgaatccctgttatcgacgattatcgttggtgccctggtgctgcttatcgctgctggtggatatgccgggtaccggtataaatccaacgccgatcgcgcagataccgctgaggcaaatgtcacgcttcagggaacggttatacaggcgctacaggaccaggataaggcatttaatgggataggagatgttacggctgcgaaaaacacacgggcatctgcaaaatcagaggaaacagtcattgaataccggacgattctccaccgcgaaaaaacctgcgatttgcctgtgcctgctgatgtttctgacgggttgctccgctacacgaaccgtttacgttccagcgcaatgcaaacctctgccagcggcactgactcagccggtactggcaccattgccgccggcgggctgacttattgtcaggccgtactttggatccacccgctattgaccgctattgaaaaagccaacaatcagctttccgctatccggcaggccgaacaactcagacagggaacaacgcaatga

SEQ ID NO: 206584 - DNA, 165 bp, Klebsiella oxytoca
atgacagacgctgtatttctatcggcatatctcatcgcggtggcctgcttcctaattagggaatgggttaagcacaagaggctcagaaagaagatcggcataaagattagagccattagatatgcggaaaaataccgaatgctcaaaagactaatgaggggttag

SEQ ID NO: 206585 - DNA, 246 bp, Klebsiella oxytoca
atgagcaaagaaacaggcggacaagctttcccacgtcagcagtgggaatacgacggtcaaaataacgtccttcagtatcaggaagaaggcatgacgctgagagattacttcgcagcaaaggcgatgcagggaatgctggccaaccatggcatgtgggatctcataaatgaaaatcatgcgcagtgcgtggcaagagatgcattcttggttgccgacgccatgctcaaggttcgggaggatgtatga

SEQ ID NO: 206586 - DNA, 177 bp, Klebsiella oxytoca
atgttgcgccacagctgggagaagcgcgaagagagctgctctccgtattcgcggctgatgtgggtgacgttctccagcacagtggtctcgtcttttatttccggcggcgtcagcttcggcgtactgtccggcggcggcgtggcggcggctttccgcagctgctcgataagctcctga

SEQ ID NO: 206587 - DNA, 294 bp, Klebsiella oxytoca
gtgccagatcagcgcaaaggcgcggataaacaggctaaagaaggccagcgagcggtcggcgagatggataagcccttgggtaatcaatttcttattgtgaaatatcaggtacagcgcccagagcgtaatgcacagcataatcaccacgttggccagcgctccgaactgtacgttgacctggttggagataatcggcaccgcgacgatgagcccgtagccaatcaggctgctcagcgcgctgagacgcaggttccagtatttcgccgcttcatcgctgaggttgaacgggcgtag

SEQ ID NO: 206588 - DNA, 288 bp, Klebsiella oxytoca
atgcgttctaccgtcccggttaacggcccgatggtcaccagatcgccggtattcatgccgttctcaaactggatgaaaatcccggtaataatatctttaaccagggtttgcgcgccgaacgaaatcgccaggcccagcgcgccggcgccggccagcagcggggcgatattcacgcccacttccgaaagcaggatcatgatagtaatggtgctaatgaccaccgccagcgcgttgcgaaacagcgtcagcagcgttcgggcgcgggcgctgggcagcgggcggccgtga

SEQ ID NO: 206589 - DNA, 1005 bp, Klebsiella oxytoca
atgatgtctttagccaaactggcgcttgcgtcggtcgtactactatccggtcaggtcatggcagaaccgtttagagtgggtattggtggccacccacaggcctttcccgggacggctgacgagtatgttagcctgatgaaagagtataagttcaattctactcgaatagattattactggagccagatagaaaaaaataaaggcgtttttgatccgagaggaaataaaattgaggatgtgatacagaaatccaaagagaacggtatatctccattaataatattgggttatgacaatgggctatattttaagggcaagcctaagacccagcaaaactataacgatttcgctaattatgcaggatgggtcactcatcattttaaaggcgtttctaatacatttgaaatatggaatgaatggtcaacattcaaggtgtctctacaagaagggcacagccagcagtccgcagatgattactttaatcttgttaaaaccgcatcattaaacatcaagaaaaataacccgaatgccagagttattgctggttctttcaaccctctgcggcgtgacgaaaaagactgggcagataagttgataaatctaggcattctcaactatatagatggattttccgtacacccttacttctttaaaaattatgaggttgtaaatcctgaccaagttttatccggtattgacgcggcacaaaaagagtttaaaaaaatagcgggtacagataaggatatacctatatatataacagagataggaatcccatctaacgcagattttcacggaatgaattttagtgatgagtatatagccaactattcgcgaacattgatttctaaagctaaaaaagtgccatatataaaaggtgtctggtggtatgatctgtatgatgacggaggcagcaaaaaatattcagagcacaattttggcgtcattgacagaaacatgaagccaaagccgacagcgctcagcattaaatcattatcggaatag

SEQ ID NO: 206590 - DNA, 471 bp, Klebsiella oxytoca
atgacccgggaatcaacgctttttaatattcgatattcgtttcacatcgaaacaatgcaggcgacgctttacagccggctggacaggcttatgtcatttgtccagataatgctcgggtctgcaattttcgcggcttacggcagcctgccgttatttggcgccgtagtggcttgtatttcagcaatcagctttgtatggcagcctggtaaagcggcaatgctctgtgaggtccaggcaaaaaagatgaaggaattgataaacaaaccgtccaatttttctgccgaggaacttcacgcggcgtacctgagagccgaagaaggggataatccaacccttggtttgcttagggatgctgcacacaaacgagctttgattgcacttggccgatcgcaggagtcgatggcgatacagctaaccctttttgagaaaatcactgcattgtttgctggcgatttgcccaaggatgaatga

SEQ ID NO: 206591 - DNA, 405 bp, Klebsiella oxytoca
atgaactttgaagagagactacaaagagcccttgaggaggcaggcatatctcagtctgagttaggccgaagagttggcgttaattcgcagtcagtcagtggatggtgcaattccggtatcattccaaggaaagaaaaactcgccctccttcctgaagcactgggtaagccattatactggttctttatgaccgatgaagaagagcaatcggtcactgctgttacgcaaagtaaaaccgtgctgaatgaacggcaaagcaagctgcttgaggtttttgatcagctaccagaatctgaacaagataggttcatttcactagctaatgaacgacttgaagagcttgacaggttcatggcagaatttttaaaacgtcgtaaaattgacccgccaccgcagaaaaactga

SEQ ID NO: 206592 - DNA, 225 bp, Klebsiella oxytoca
atgaaagaacaaacccaacaaaaaattattgccctctgtggtagtcaatctgagctggcgcgtcggcttgggaagaactcgcaaactgtttctgcgtggttccgcacgcaagtagccagtgctgaggtactcaatgcgtgcagagttctgggttggcaagttacgccccatgaacttagaccggatctgtatccaaacccgactgacggacttcccaaggactaa

SEQ ID NO: 206593 - DNA, 138 bp, Klebsiella oxytoca
atgactaaatctctgaaggtcaaaatcaatggtcgcccgctgatctcggaacaatccaagacgcccgtagcggatgaccttcccggttctgactgcagcctggaaatatcgacctgcggtatcccggcacatatgtag

SEQ ID NO: 206594 - DNA, 339 bp, Klebsiella oxytoca
atgaaaatgcagaacaacattcacacatgggccgacgcatgggaattgttgcgcatgtggtggaatggtgatgtaccgctgggcggtgtattgctgtccatcgtcatggcggcattgcgagttgcctatacgggcggtggatggcgtcgtgttgtactggagtccccgttatgcggtgccatgaccctgacagtagcctccagtctggattacttcggcctgccgacgacattatcggtggctgtcggtggggcaattggctttattggcgttgaccagatccgcgccgcaggtatccgtattctacgctcccgtacaggtggcggcactaaggactaa

SEQ ID NO: 206595 - DNA, 417 bp, Klebsiella oxytoca
atgacaaaccaactttctcgcggtatccgcaacaacaatcccggcaatattcgctggggcgatgaatggcagggtctggtacccaaagcgcagcgcaccgataaatcattctgccagttcaccacgcctgagtatggcatccgggcgatgattatcatcctgcgcaactatcagcgtaagcatggcctgaacacagtgagcggtatcatcaaacgctgggcgccgccaaacgagaacaacacgcaggcctatatcaacagcgtggctcaggcgacaggcgttacccccgaccagcgcattgatacccgcgacagccggttcatgatgaagctgctacaggcaatcattaaacatgagaacggcgaacagccttactcgtttaatgttttcgttcaggcgatcaatctcgcggggtaa

SEQ ID NO: 206596 - DNA, 534 bp, Klebsiella oxytoca
atgcccacctggctgaaagaatactggaagccactggctatcattttgctggtggctttttcattgtggcgcgcctttagttttggcgtcggtaccaccgacagcgcctggcgtcaaaaatggttgaaacgtgattttgacgaatcggctcaggaagtgaacgcgcaaaccgctgcccggatgatcgaacaggggcgtctgatcgcccgcgatgaggctgtaaaagatgctcaaacccaaaccgctgcagcgcgcgctgctgccgctaatctctctggcactgttagccagttgcgccagcaggcaaaagcccttgccacccgcctggatgccgcaagccacaccgcaagtcttgccgctaccgtcagaagcaaaacaaccggcgccaccaccggagtgctcgccgacatgcttggagaccttgcagaagaagctcgacggtatgctgcaatcgctgacgaacgctacgcagcaggaatgacctgtgagcggatttacaaatcggtgagaacttctatccccgatcagggataa

SEQ ID NO: 206597 - DNA, 498 bp, Klebsiella oxytoca
atggcagaaggatggctgataagctctgctgaaagggaaaacatgccaacaacagtaaaaattcaatttatggacaaagatgggataatagtccctgattcatcagcaaacccggtaattcctattattattgctgcaagctctgaagaggatgaaaataaaggagtcaatgttgagcacaatgtaagtacttttgccttaatagatacaggtgctgatgacttctacattgacgaaaagataatacatcaactctctcttccccaagtaggaactattacagtaacaacacctcttggggttgaagaaaggaccatccatcatgcactgattagctttactggagacgcacgcgtatttggtattaaagtcatttcaaccaagatgactgaaaatggtgcaaattatcatgcagttttaggaatgcgacttataagcttaggttgtctaacacttgactcaagacaacgtatattccatttaactttcgataattaa

SEQ ID NO: 206598 - DNA, 429 bp, Klebsiella oxytoca
atgttcagtcgtgatgatttaaccatttcaatgtactacgcatcttcaactgatgctgaatcgggtaagaagctggcaacaatgactatcgaagttcgcgatgtatctcccgttgccgaactggctcagatgacgcagcttcagtgcgtgactgatagcgcgaaaaagaaaacatacacagtcggtaagcagagcatctcgaatggctccgatccgctactgattgcaatcgaagagtactggcggatcaatactgaagcgctggtcaaagacctgctaaccgaggtgatggaatttgttgctggcagcgtcggtcaggaaaatacctgggttggacaatatggcctcaaggtttttgaaaatacagcgctggctgaacgtctgccggaaagtgtgttgcaggctgacggtagtgcgtccgcaggctga

SEQ ID NO: 206599 - DNA, 339 bp, Klebsiella oxytoca
atgtcattcaaaaccactacagagcagcgtatcgatccacggatttttgccggtaacgacccggcacataccgcgacaggggcttgctctgtcacaaaagcaacgcccgtactgaccccactaatgctggacaacgccaccgggaaactggttgcctggaacggagaaagtgccggtacagcggtcggcgtgctggcgttgccactcgatggcagcgaaaccaccctgacgtactggaagagtggcacctttgccactgaggccattgagtggcctgaaacagtggatcccatcaaaaaagcgaatgctttcgtgggtagtgcgattagccacgcgtaa

SEQ ID NO: 206600 - DNA, 375 bp, Klebsiella oxytoca
atgtcaaaagaaactgatctgcaacgtttgcaggaactggcgacagtattgaaacgtacccctgacctctccgggagcgccgccgacatcaggcagcgcgtggcggaatgggaggaggaagcgctggcactcaccggtgatgaggacgacggcggcgaaggcgtcagcaacattggcgaacttatctctggcacagaagggatgcagtcggcttccggatggcgacgggttaaggcccgccagacgctgcacttccacgcccgggaagtcgacagcgatcgctctaaagaacttattctcgcaggcgaaatggcctgtgtgccggaggctctgctgggccagcttatcgccgcagagctggtgaccgaatgctga

SEQ ID NO: 206601 - DNA, 381 bp, Klebsiella oxytoca
atgtccgattccgacaatctctttaatgcagcaatctcccgggcagactgtaccatccgcaccgtgatgggggtcattgtgaaggtcacttccggagcgcttgcaggctcggaattctccggcgtcttcgatgacccttctgaggtcggctaccccggcacagggatcagggtggagggtacaagcccgtcggtgtttgtccagacttcagcggtcagcctgctgcagcgtccggacacgcttttcattaacggaacggcctactgggtcgaccggataggcccggatgactgtggttcctgttatatctggctgggaactggctcaccgccgatggggacccggcgacgacagggggaagcatggccatcaaggggttga

SEQ ID NO: 206602 - DNA, 399 bp, Klebsiella oxytoca
atgaaacataccgacatacgacgggtcgttattgaaaagctggagagcgccattggctctgatgtcgtgttttttgacggccggccagcggtgatggaggaggatgattttccggcgatcgcagtttatctgaccgatgcggaatataccgggaaggagctggatgcggatacctgggaagccacgttacatattgaagttttccttcctgcgcaggtccaggattcccaactggatgagtggatggaaaagcaaatttatccggcaatagctgaaatggacggactgagtcatttactcaccgtgatggttccgcagggttatgactatgagcgggatgactcgctcggtctctggagctctgcggatatgaaatattcaattacttacgatatgtga

SEQ ID NO: 206603 - DNA, 423 bp, Klebsiella oxytoca
atgtttttgaaaaaagagtcctttaattttaacggtcagtccacaacactcactgaactgtcggcgctgcagcgtattaattacctggactatctggccggggaagaaaaagcgctggcgtctgctgatgaggaactgagtgaacaggccatgacgacccgcctgattggcatgagtattcgcaacagcgcccgactgatttcgtattcgctctggcacaatgacccggaaggtccatccgaggatgaactgttccatctggttttgagcacgtggcctgctgaggctattggtaaggctgaaatcgccgttaaaacgctctcgggaatgctggcgccggttgctgatgaagagcagcctgcggatgagagcacagataccggggcaacggatgatgagcctgttacggcggaaaagccctag

SEQ ID NO: 206604 - DNA, 273 bp, Klebsiella oxytoca
atgcttgctggcatgacgtcctccgagctgggcgactggcatcatttttaccgggatcgtttttttcaggacgcgcaactcgatgcccacttctccgggctgctttacaccattgcaaccttcttcttccaggatccggatatctcccctgcacactttagcctgttgtctccctctgctggggtggcaacgaccagtgagcaggatgatgacgctatgatgctggccgcagaggggatcacaggaggcacccgctatggcccagcagattag

SEQ ID NO: 206605 - DNA, 2007 bp, Klebsiella oxytoca
gtgggtcaggttcgtagcgcgtctgcactgtcggcactccctggcagcgatggcgatcgtgttttactccttggctaccgtgaggggtgggcggcaacgaacagcgagctgtcgggcggcggggaattcatttatgtcagcgaattggctggcgaaaacaatggcatcacggtctttaacggctgggtacgcaaattcacgcgcagcgttattaccacgtttgatgcgggtctctggccaggtgaaaacgccgaccacttcgcgcagatgcagaagattctcgacgtcatcccggatgggtttacgttcgaaatccacggcgaacaccagatgagcagccagccgattatggaggccaaacggaatataaccattttcggcgtggccgctaagctgacgacaaagccgtataagtcgacaattaaagtggtgcgcctggcgtcggacggcatcacgtatatgggcggcatcctgtcggcaattaactgccctggactcagaattgacggtgatttagaaatcgagggtacacggatgtaccctaacgtgctgctggccgaccagacggctgcaggtgaggagcacgggctgcattttcgctactgcgatgatttgtatctcgggaaggatttgaacgtccatgatgttttcggctacggggcgctggggatttactgcaaccgggcattcgctgacaggtcgctgtttactgatactgtcagggaatctgggttaaacctcttcggcggctctgtcggggggagaattgtcggggtgcgcgcgcgacgtaccgcgttatacggcattgagattgaggatacctggtacggtggcgccagtgatatcaaggtcatcgtctgcgatgtggaggacgcttactggggcattccgaccatcaataactgctctgatgttgaggtgtccggttgccgtattcgccaggcgcgtgttggctctcaggcactccagtcctctgccggagcgtatgacacccggagaattcactaccacaacaacacgtataccggctgcccggtgggctttcgtaccgcgcacccccgtaatgtccgcattatcagggagactatcgaccagtcagaggtgatgtcatacgggtacacctatccgttcaataatctgttgtttattgatgctactgaccgccggatattctgggggccaacgtcttcccggtttctgacgatggtcggtcagactgtttatattgatgatgttgcctataccatcacggcggcagtgactgacgcgacaaaaacgggatactggaaggatttcgcgacggacccggactcactggttaaagtgacgctggacaaggctctgccaacgaacaccgatattcagaccgtcaaaagcaaggactgggggacggcagttcgaggggtgctcaccgaggggcgctcagtaaacctgacaatctgggataatgatttcaccggggacagcctggactcagtcggcatctaccataactcgtacaatatgactggcgtcagcacggtcaacgagtcagtgcgcgggaacaaattccgctcccacgggatatggctgcggatgaatgaagccattaacactcgtgatgtatccgataacgagcatgatgacggctcacaactgggtatctccacggctaacgtaaccgaggctgtcctttctcagataaaaatgggaaacagtatccgtgtatcgctacctgctcgatcatcggcttcagcaactgcggtgacaaaatacttccatgctaaccagcggtgctgggccgtcggtgtccgcatttcgtttactggcttgtctggcacgggcgaattgcggatagcaattgacggcacccagacacacagcaccacaagttacagcaccggaacggcggtggtggagatatatggcgtggcaaacttcaccaaaggcaatcaccagattgcgataaacaccgccaataacgacattgttttcacctcctgcgacattgaactgttaatcccataa

SEQ ID NO: 206606 - DNA, 276 bp, Klebsiella oxytoca
atgagcattacactgaatgtcagcactaaaaagacgttttcataccctaacctggttatttccggtgagaccgtagaaaacgttgctgtgacatttgaatatcagggggcaactcttaatagagatagtgaatcgtcagccttgttctcaaccagcattgagggtacagagtcagccggtacgattcaggttgttttcaccctggacgagacaaaaggaattcagactcaggcagaggcagcactgagggatgctttcagcgcggtttctgcctga

SEQ ID NO: 206607 - DNA, 279 bp, Klebsiella oxytoca
atggcctttactgtcacgcgaaaacttcagaccatgacactgtatcccgatctggctatcagagttccaggatctgaacgctccgttgaggtgacctacaccccgctgtataccagtggggtgaatgacaacatcgctactgtgatttttgatgttaataccccctatgcggaaagttcatcccggctcgattactcattcgagtttacagacccggctgatttgattactcaggcagaaaccgcgctgaaagcatccctcagtgctgcctctgcctga

SEQ ID NO: 206608 - DNA, 1950 bp, Klebsiella oxytoca
gtgggtcaggcagatacttttgatgttctcagggccactgagccgagcgttgataagcagtctattctggttcgtcggcacaatactgccaccacggttggcggaggcgagttttattacgatgccagtgatagtacgaccgaagacaattcctgcaccgtagtggtaacagcaggcggtgcccgctggaaacgcaaaaacgtgggtgatgaaatccacatggagtgggccggagccagaacggcagaatacactgacgaggcacaggatgaggcatttgaaaactgcctgaaggctgcggctgtcggctcttcgcaggggtatccatgccgccgtattgttgccccaatgtttggtaagacccggctgaaagaaaaacactattgccggggtggggtttacccgctcagcaccggcgctggcgtgattacggagtcactaaacggcaaattcggaatagatggtcatttcatcatggagaagggtgcggggttctacgtcgttcagacggtgaacgctgagttcaatctgacggttgataacgagagcctgacggatgaatcaacaaaaccgtccctgggcgtcactggtggggttgattacatactgaggcttgaggctttcaaccagaatccgaaattcagcattgacggtcaagggtatagcggtaacggcgtatacgttctgggtaagggcgctacgtccgaaaatgcggctcactggcctgatttaacggacgattatcaggggatacttaatgctacaggtgggcggtttaatttccgtaactgtggtcgaggattcaacctgaacaacaacctgtcaggacttggaagcctgggcaccgtctgggagcagtggagttccggcagtagcgtatttaacggggttgcggacctcacattcgaccactacgaaacaacagtggcgtacaatgcgtccgccacacagggttccttggtgttcaacaactgcgggcagcttcgctttggttatctggccgttggttccggcggaaaaccgctgtgcgcatttaataactgcatggctgtgtcgattgatagctactacgcggttcatggcgagagctacgcagtaaccgcagaggcattcatgcacggtatggaggttgccaatacggtcgtccagatcggcaaagcaactctgtcggggccaaacggcatcccgttctgtatcggtaagggtggcgctgtttatgtcggcaccctgtttgctaactcagttagctgccttgcggtaataactaaccaggcggattacctgaccacgttcgccgccagcacagacagtcctacatggaaatcgtgggggaaactggttatcggcagcggtgagacgctgtatatgaatcagagcggtaaagttctggccgcgcgtccatcggtccttattcagtcggatgcgcaggatgaaacttttgtcaccttcaacgatgtccgaaacctttttgcacacaatggattcactggcgcagatgatcgttattttattcgtaatgagagcaattttgctgagattcaactccacggctctaagttgggtgactccgcctacccgatttactgccgccagccctacaatatttcagctattaagggctgtgcactcacaggccagattgtgttctcatcgggagagaaatcgacctcgggcggtggtaaattctacaaagccactggcgaccagttgacgccatccagtccgctgagcaacacgtcaaaagtcaggatggattatttcatttcgtacaccgtttccagcggcggcagcattcaggtcgctaaaaacggtaaaacgatttacaaatcagcaatcgtgggtgagcacccggtctattttgacctgatgccgggtgagaccgctacagcgacgtacaacacggcgaatacaaccatttctgactacaacacatcctatacctatcactag

SEQ ID NO: 206609 - DNA, 336 bp, Klebsiella oxytoca
gtgccctgtgcgttgaaagggatgggcggtagcgtgttttttcttctggagagcattatgggtaatgataacgttttaaacttcttttgttgcctgactggcgtgttgataattgctttattaatttacaaggaatctttacccagcgatgatgacttaattagggacggtaaatactggtcgactgactgcaccctgaaggaggttgatattcctaccggctttttaaccagtaacattaaccgactggattgttcaggtattgttgttaatgtcgcgacggacaggtacgacatggccatatctgcttatgacaaatccaaaaatcaggagtga

SEQ ID NO: 206610 - DNA, 243 bp, Klebsiella oxytoca
atgattaactttatagactttcctggcgataaagagagttcattctttatctctcgtgatgaaacgcaagccactgctgatatgaatgaatggattggaagtcatgcaatttcaataatctcgattgagacgatagtgaaagaatatcattttatttgcatcagactctggtactgcattgaaataaaaatcagtgagtctttgaacgatgcgatggactctatacaccggggtgggaaatga

SEQ ID NO: 206611 - DNA, 405 bp, Klebsiella oxytoca
atgactgcttactatatcgacggtgttaatattgcctggctgaatggtgtatgcttatttcttatctttgccgggtttgtcgtggcactggccatgtttatcatccctaaaaaaattaatctgcgagtcaacagaggtaatacatttatctttagtgtgcttataacgttggctgcgtttgtcacggttgtcgtctttaccagaggggcattcacgatggatgagctagaagccgggaaacactggaagagtgactgcaagctcctggaggtgaacattccaacaggtacgtttactgatactgtcaacaaactggattgtgcgggtgtcactatcaatgtccctaaacctgaatatgacgtttatatccggcagtggaaattgtatgaggctaaaaataaatga

SEQ ID NO: 206612 - DNA, 348 bp, Klebsiella oxytoca
atgaagatattttttttaaaacctcccttgatttttatattagtttgcatccctggcgtgttacttttgtgtattttttacaaggattatcttgaaacactaccagctactccagaacaactgagcgaaattgcgaaagaaacaccctgtgcgggtaaagtattgctgctggcccttgacgttaacgatgataattcgtctgagccgttaactctcggttacgcaaacgaactcgcgtcagggtgtaaagaaaaagaaatgctaatggaaagcaaaaaaatccgtgagggtgaaatgaataaatttcgcgaaaaacaactgaaagctctgaacggtatcaataaatga

SEQ ID NO: 206613 - DNA, 399 bp, Klebsiella oxytoca
atgaaaggggtgatgacaatggggtttgttaaaaaaaatggatttctgcttattcctgctatttactggctaatctatcttggtgtcagattaacttataacggactggcgggagagtacacgcctgatttcattcagagcgttagtcatgatggtgtttttattatctgtagcttactggtgttctatcttgcttgtttacgaattaaagacagtggtagtgaaatctcagcagtactcttttggtctgttgttggttttcatgtggccgcgttagttattacgtttcttatctgtttatggcggggagcgcttttgtgggacgttattttcttctggcaactgggggccgccatgttattgctgttttttatgcctgcttaccttctcctgcggtga

SEQ ID NO: 206614 - DNA, 219 bp, Klebsiella oxytoca
atgcgcctgtccgggctacaaaatccgcaggcggcgcgggccggtagccccggtaagcacagcgcgaccggggaacattcccgggtggcggctgacgccttacccgggctacaaaattgcccggcctacacgttcacagccgccatcgggacgctttcccggaggcggcgcaatgcgcctgtccgggctacaaaatccgcaggcggcgcgggccggtag

SEQ ID NO: 206615 - DNA, 381 bp, Klebsiella oxytoca; identical to SEQ ID NO: 193608

SEQ ID NO: 206616 - DNA, 390 bp, Klebsiella oxytoca
atggcccgtcggtcgaagggctggcaggatcgtcggtgcaagcgcaagcctgatgatactgaagcgctggctcgtatccataccgttatcgacgatctgcccacctatggttatcgtcgtgtatgggcactgctgcgcagacaatcagaaactgacgacatggcggtgatcaatgccaaacgcgtataccgcatcatgcgtcagaatgcgctgctgcttgagcgtaaaccggcaataccgccctcgaagcgggcgcatagagggaaagtggccgttggagaaagtaaccagcggtggtgctccgacggcttcgggttcagctgtgataacggtgaaaaactgctggtcacgttcgcgctggactgttgcgatcgcgaggcacttcactga

SEQ ID NO: 206617 - DNA, 129 bp, Klebsiella oxytoca; identical to SEQ ID NO: 166488

SEQ ID NO: 206618 - DNA, 444 bp, Klebsiella oxytoca
atggtaattaagacagtgactccaagcgatgtttaccaaaacatatctctggaggtagatcacatactgcaaaacctagcgcagaccaccagcgatccatcgctacaacaagctaacgataatgcttgccaacagctagatggttttcgtcagaagcttaacaaaaatatagaaagccttcaaaaaaatgctgaatgggatacttttacgattgccttttacggcgaaacaaacgcgggtaaatcgacggtcatcgaaactctgcgcatcttgcttaatgaaaaaagtaagctttcacgccagcaggcattccgcgcttttcaacaaacacataagcttactgacagcgatatcgaaatcttgcagcgcaatttgctcgagaatgaaaaacgtgcctctgagctagggaaggtgcgaataagcggggaaattcttctcggctga

SEQ ID NO: 206619 - DNA, 888 bp, Klebsiella oxytoca
atgacaggtaatctaaacatgggtggaaacgatataaataatgttaaaaatattactgcagcgggaacaggtaatttcggtggtaatattactacggcaggaagtgtcactgccactggacaagttatagctcgtaatggctatggagatgtaattagatttggtggtgatgcagatggtaatgattacgaaataagattagataatggaagcaaacctctaagtattttttctcctaatgctgctaactatactacagtcttaaatgtatataaaaatgctgttgttcagcagagattagctacaaacggattaaaccctaatgatttaccttcaggatgggcggggggcctcagaacatatgatgtctatgctgctggtacggttggtgctggttcaggtggatctgttaatgcttatatgaacagcagcggtaatatatacgcttccaatgatgttaatgtcgggcatcaggttaatgctcagtatgtctgggcctcgggtaatcttaactctaactatattcattccaatggtaatattgatgctgatggcagactgaatgcaggtgagttcctatatattaatgggaaagcaaatgtaggagcaaactgttcaccaaatggtttacagggcacggattcaacgggattgttgttgtcatgtgtcggtggtaaatgggttaagacatcaggtacagcaggtttttttacaaaaaatcaaggctcttgcttggttaagaatcctgacactaatgcttgttcatgtccatctggaacaacagcttatgaattattttatactacatctactgagcaatcaggtggaggaagtcatggcggtggcacgacagtggttaaagatagaatattataccaatgtagatga

SEQ ID NO: 206620 - DNA, 675 bp, Klebsiella oxytoca
atgaattcccggacaacaaaagatattccctgcttccgttcttatctacccgatgctctgcgtttaagatttgaagacaagttaagcatcaggatcatcgcccagcgtcttggcctcagtcactcgacaatacatacgctttttcagcgatttattgcatccggtatcgcatggccgttgcctgactcaatttcattcgctcagcttgatgccatcctttatgccaaccgaaaaaatgaatccactcgtactgatattaacgaagaaaaatggcgcaaagacaggcgtgccagctacagccgtgaatttaaagtcagcctggtgaagcaggcattacgacctggtgctgtcgttgcacggctcgccagagagcacgatatcaatgataacctgctgtttaaatggaaaagccagtacgaggacggcttactgagtgatgatgacatacaggaatgccagcttgttccggtggcgctgactgatacgccagagccgatcaaggcagtgacaaatcccttctggcgtaacaaacctgatgactctccgggagatgagcccggaaacgcgccacggtgcgagctgcatcttaaatcaggcgttgtaaagttgtttgacccggtgaccccggagcttcttcgggtgctaatccgcgaaatgaaaggtggtgtccgatga

SEQ ID NO: 206621 - DNA, 201 bp, Klebsiella oxytoca
atgagcaaatacccaagagtcggcagtgttgccgccaaaagcaaaaatacctctgccaaatgcaagtgcggtgcagttgcgaagtttaaaaccacggtggaagtaaatgttttccgtggtgatgacgaagtggtctggtcttgtaacgagcataaaaaagactgttcatttttggtcgactggcaagggggtgcagcatga

SEQ ID NO: 206622 - DNA, 237 bp, Klebsiella oxytoca
gtggacaataaaccagagtggcaagagcaggctgagaagctggcagaactgtacggaacaagctttgtgatattcaggaacggtaaggagcctgagtgtgtcgatcccactaaagtggtgctttcatttgatgccgaaagcaaaaggcgctttgacgaactcaaagaaaccgtgcggcaggaacacgagatgggagcccggctgaccagtcatcgttttataccgaaacaaagatga

SEQ ID NO: 206623 - DNA, 177 bp, Klebsiella oxytoca
atggaaaaccaaaagcaaagagacatgattgcaagcctgtttgaagagcttgttatcgccagaggtctgattaaagaaatttgcaaggagcgtggtatccctgagccgaaggcctcattgatgaggatggagaaggcgataagcgaagcaaaagaacacatggcagaaaatatttaa

SEQ ID NO: 206624 - DNA, 984 bp, Klebsiella oxytoca
atgacaataaaggccatagataatgagtggatggttgacgttaggccgcagggccgcaacgggccgcgcgttcgtcgtaagttcaagacgaaatcagaagcccagcagtatgagcgctgggtgattgctacgcagaataataaagaatggctggggaaggataagaaggatccgcgcacgttggaagaattgatcgaggcgtggtcaaagttttacggtcaatcactcaagtctggggataaagttaagggcgaccttttgcgaatatgcgccgagatgggaaacccgagggcatccgaccttacaaaggcaacgtttacaaagtaccgggccgctcgcctcgatgccggaataagcccagtaaccattaatcgtgagcatgaccatttatcgggtgttttttctgctctcacaaaagccggacaatacaccgcgcccaatcctctctcacatctcccacgccttcgcacccgcgacaaagaaaaaacttttctcacatctgagcaaattgatattttactgaatactttagagaattcttattatcgcttagcagttctagcgcttgctaccggcgcacgatacgaagaagccgcgcaactgacgatctctcgcgttcaacataataaggtgacttttactgatacaaaaaatggacgggatcgcactgtcccgattggccctgatgttcacaaaatcatcacggataaagtgaagagtgggaagctttttcccggggtacgttatgaaacctttcgcgcaaccctaaaaaggcattttgatcttcccgaaggccaggctacacacgtgctccgtcacacattcgccagtcatttcacgatgaatggtggaaacatcatcacactacaaaagctcttaggacatgcatcaatcaaacagacgatggtttacgctcacttagccccagactatttgaatgaagtcattaccctaaatccgttcataaagcgtgacgtgaaatga

SEQ ID NO: 206625 - DNA, 306 bp, Klebsiella oxytoca
atgagttccatgtcaagccatgctgaaaaacttaaacagatccgtaaagctgaaggtcttacacaagcaagttttgctcaggctgtgggtgtagctctgagcacggttaaaaattacgaaaggggggataaagttgttggtttatcaataatcgacaaagttactaataatcaaaactttaagaaatacacactatggctcatgaccggtgatacacatcccgagtcgggtcaaatctccccgactctctcccctgatgggcaagaaagcatatccagccgccaaaacgggaaacaggctggctag

SEQ ID NO: 206626 - DNA, 261 bp, Klebsiella oxytoca
atgcgagctagtaaaacaaaatattcagtgacagacgtaacttgcagcaatacagtcctgtttgttccgcagcctcgaatgactctctcacagtatgcccagatgaccgggcaaacgctccgccaggtgcaacagcaggcagacaaagggcggtttattcttgcggagggcaagtacggcaaagagcgtgagatcaacatggttgcggagtacatgcgggaaagagtcgcggcggaagaagcattgaagcggttggcataa

SEQ ID NO: 206627 - DNA, 249 bp, Klebsiella oxytoca
atgaatcagcactacattgaaatattcaatcaggcgcttgagtcgtaccacttcaaccgggagaacggggcaacctcgctagattccggcctgaaaattctaaacagcgctgttacccacctttatggcctggcattctgcctggaggatgaggatagcctccgtgttcttcgtatcattctggaagagctgcgcagccataaaatcccgcgtccgatctccagattcaacacgacgatatggagctaa

SEQ ID NO: 206628 - DNA, 231 bp, Klebsiella oxytoca
atgaaaaataataaaagtgaagcggcgaataattcaagactactaacggtggcggaaattttcgattccggcgtagctactggaaaaatggcaatgtgtgcgacgtttggaacgcatatagcaattttaaaaacaaaaattaggcgcgacaacctcacgccgcgtgatgttttggaggatttggaaagatggatagaagtaaagattggggggataaatgacccactctag

SEQ ID NO: 206629 - DNA, 825 bp, Klebsiella oxytoca
atgattaaatctcctttgcgctgggctggcagtaaagcaaatgtgatgtccgaattaaataaatacctcagaccatccgagcgtcttgttgatctctttgtgggtggtggtacggtttttttaaatacaaactatatgcgttatacgttatgcgatagtaatttcatgttaatgaatttctatcgtgagctaacaactaacacagatttttttattgatcgcgcaaagtttctttttgataattatggcgatgagtcatcttattatgcttttcggagtcagtatcaccgacactgcgccactcttgaagatactgtcaagggtgacaaaatatccgctgcattattatttctctatctcaatcgccattgttatggcggcgtatatcgctgcaatgaaaaaggcgagttcaatatggcttatagcaaggttggaaaagccagatttccagagaaagaattaaggctttttgcagaaaaagcaaacgacactcatacaacatttattgttggggattttcgccaagcactttctatcgttacagggcggctatttactcagcatgaatctttgactatttacgcggatcccccttatttcccaatggaggggagaaagagttttaataaatacggtgggaaagtattcgagaaggccgatcatgaagagttgaataatattcttatcggcacggcggagtatttcggatcgcaaatcgttttatcgaatagcgatacaaaagacactcgcgaggcatatacgggctttgaatttttccggttgaaacgctgcgaaagcttgcgcctaaaacgcgtgagaaggtga

SEQ ID NO: 206630 - DNA, 426 bp, Klebsiella oxytoca
atgaaagttgacccgcaatacctaaaagatttactgattgcttttgaggatactgaaggccctgacactacgttagctgggttagagtctgccggttacaacagagacgatcccaactttatttttcacatgcggttgctttatgataatgggttaatcgttcgcatagatggtaaacagggatttgggtatgaatattattctcacattggtgggcatagctacatgtggactccggtgccattaaggttaactgcgcgcgggcatgactttattgccgatctaaggcaaaaggaagtctggcaaacaattaagaccaactttaaggatgaggggattagcaccataatggagctgtctaaatcgcttgcaattggatttgctaagaaaaaagtcaaagactttacaggtctggatatcgactaa

SEQ ID NO: 206631 - DNA, 1767 bp, Klebsiella oxytoca
atgacagttcggttgattaaagtttcaatatctaacttcagatcttgtaaatatacggaagctttcttaagaccatatacagcactggtaggttataataacgcaggaaaatcaaatattattttagctataaaatggctattagatggctcacttcttagcgaagcagatatgtatgaccccaaaaacccagttttagtcgagggtattattgagggtattactgatgacacgttgacattactcagtgaagaaaatcaacaaaagatcgccccattcatcataaataaaactttaaggtttgcccgaaagcaagaaacagagatcgccgaagatagaactaaagtaaaaaaaactcttgaagtatttgacggaaccgtatggaaaaagaacccgggggggattgatggtgctatatctaatcttttccctgaacctatccacatccctgcaatgtctgacgcagctgaagatgccactaaaaacaaatctggtacaacaatagcaaaaatcctaaccgcaattgttagtgaaataaaaagtgaatatgagaaaaaattctcagaaaatatttctgaaattggtaagtatctttctcatgacggttcaacaagattagagggcttaaatcgtattgatagcggcgttaatcaaaaagttaataaatttttcccggatgtaaatgtaaaactacacttccctacacctactcttgatgaaatctttaaatcaggcacattgaaagtgttcgaacaacgagcagagttttcaattatgcgagacattaaccgattcggtcatggcacacagcgctcgattcaaatggctttgattcaatacttggctgatataaaaaagaaaagtcaagatgcaaagaaatcaaatacgcttatatttattgacgaaccagagttatatttacacccctcagctataaactctgtgagggagtctttagtagatttgagcgagctaggatttcaagttattatttcgacacattcagcaagtatgctttcagccaaacatgcctgtaatgctatacaggtctgtaaaaaccacgatggtactttagctcgaaaaactatttctgaaaaaatacaagagttatataagacatcctcgccacagcttcattctgcatttactctatcaaattcctcatatcttttgttttctgaagaagtattattggttgaaggtaagacagaaactaacgtactctgtgcactatataaaaaaattcggaactgcgaactcaacccaacaaaaaccagcattgtttctgtagatggtaaaggtagtcttttaaaaatggccaccgtgataaattctattggaataaaaacaagaattcttgcagattgcgactttctctcaattctagttagttccactcataaagaaaaattaaatgaagagtgtgagcaattattagcaactttatctaacttatctgacccgcagagtttacagcttgcaacacctattatctctgttgactcactgaaatgcagctccagcaaagactttatcaaaatctgcaatcaccatgaaacaaaaccttacatcaaaaaaattcatcaaaagctaaaaaatgagggtatatatatatgggaatcaggagacattgagcaagtatatggatttggaaaaaaacaaactgaatgggatcatttgctggattgtttaagtgatgaaagtaaagatgcccgtgagtttattaaaaattatgatgagatggaggatttcatcaactggatctaa

SEQ ID NO: 206632 - DNA, 405 bp, Klebsiella oxytoca
atgttttcggtatatgcggatggtgcaaatacttacgaagagtttcagaataatcgatttgtcctgatgagtgtgatggggttgaaaacatttgtggatgggctggctgtcacaaaatcggtcggtcttctgctggaacagtttagtaaaccgatagctaaaaaaatcgctggcaaaattacaggtgctttggcctgggagcttttagggatccgaatacttgcagtactgatgacctgggaagtcttggtggcaataactttgctgcaggtggttgtgacctggatatcggacgatgagctccaggtgtggtgtaagaaatgtgtgtttggcacagcaccattcaaccgcagtgtgacagaccagaataaagccctggaagcagcaataaaggatatttcatga

SEQ ID NO: 206633 - DNA, 1884 bp, Klebsiella oxytoca
atgaacgctgaaacgctcaaggactttctgatctcgctcgggttcaaagttgatgaggctggcgccagaaaattcgatgccgtcgttgccgggacaacgcttaaagcgattgagctgggcgtcaaagttgaagcggcagcgctttccgtcgtggcgttcaccgccaaaatatccagcagcctcgacaacctctattgggcctctcagcgcactggcgcgacggtggagggcatcaagcaaatcgggtatgcagttagccaggtaggcggcagcgccgattcagcgcgtggctcgctggagaatctggcgaggtttatacgcaataaccccggcgcggaaggttttctgaaccgtctgggggttcaaacgcgtgatgccagcggtaacatgcgggatatggcgacgatctttactggcgttggccagcgcctgagcaacatgccgtattaccgcgcgaaccagtacgctcaaatgctgggtctggatgaaaacaccctgatggcaatgcgtcgcggtatcggccagtttagtggcgaatacaccgcgatggcgaaggcgatcggctataacgccgatgtggccgccgtcagctctaataagttcatgacctcgctgcgctccttcgggctgatggctggcatggcgcgggataaaatcggctctaatctggctaacggtctagcaggctctattgacaccctgcgccgtcatatactggacaacttccccaaaattgaaggcgcaataaccgctaccgtgaaaggcattctctgggctggcgagatggttggcagggtaatttatcgcctcatccagttaggtcggagtatcagtgactggtgggactctcttgataagcagtcgcaggagctgatagagctgctgggtgcgctgactgccgcgtggtggctactgaaccgcgcaatgctcgcatccccgattacgtgggttctcggtctggctggcgctgtcgcactgctttgggaggactaccaaacctggaaagagggcgggaaaagcctggttgactggggcaaatggaagacggagatcgataacgccgagaagttcattaagtcgctgcgtaatacggtttctgacctcaccaactcaatcgcaaaactgcttggcatagacccgaaagcctggtcactgaaatgggacttcgacaacttcatcatacagatgggggagttcagcaagatgctgagcatgatcggcgatctactgaatgccatcaacgaaggtaactggagcgaagtgaagcgcctgggtatcgcaatatggcaacagggcaagacgccagtcgccggcgaaggagaaacccagacaagcattgttcatggcgccaatatccagccggatattccaggcggtacgggcaataccctggccgatcgtaacaacaaccccggaaacatccgccccgtgggcggcgggggcttccgcaccttcgagaacgcccttcgcggctggaccgcgatgaaaaaccagctcatgcggtacttcacagggaaaacgaccgggcgtcgcctgcagacgatcatggatattgtcagcacctgggcgcctgcggccgataacaacgatcctgccaaatatgcccgtgacgttgctggctggatgggtgtatcaccgacagcagccttaaacctgtccgaccccaatacgatggctatgctcatgcagtctatggcccgcaaagagggatattcgaactggaatagcccacttgcccatcaggctgctggcgcgcaggtgaatcagcaaaacacctacaacatctatggcggtaatgctcaggaaattgggcaggaagtcagtcgccgccagcttgatgctaatgccagggtgctgagaaataaccaaactggagcaggatga

SEQ ID NO: 206634 - DNA, 723 bp, Klebsiella oxytoca
atgagaacaatagtgctagttccggtaataacctctttgctgctgacagcctgtaatttggaacgccaagggtttaaggctcaatcaaagagcctgactgaagaaacgcaggagcagatagctagaaatgaaaaaaattcagctgatcaaattgctcttattaaaaaaaaccaagaaagtagagagcaatttgaattatctcatcctgaagtttccatagataaagcagatgaaatggaaggcggtagaaggaatgaatttaaacatgctttgaaccagttaaattttgtgacacgcgaccctcaaagcgacgacatgaacaaggtttacattaatgtcggaaactttaaactaacaatgactagatttttattggccgttaagtctcagatgacagagtgcaagcgagcctcggcctatgctgaagtggactataaaaaaatatgcgagccatcaataattaaggaattgatggattttgcgaatatgaacaacgatccaaacattccagctcttaccaagcaaacggcgttgggagaggctatgtatggtggttcaattaattttggtcatgcggctaggctagctagaatgcactataaggtttgtgggcaacaaaaaaacagtggttatgttctcatggacactgcggcagtaccatgcagcgggaagggggatgtgttgagtgggtatgctgccgataaattaggggtaattaattaa

SEQ ID NO: 206635 - DNA, 3192 bp, Klebsiella oxytoca
atggctttatataaaacgggtaacccagtcccgtcttcagctatgcctgatgtttgggataataaccgtgttcaggatgaaatactgaatagcgaggagttggaagtcgagacacgcacaggaattatgacaccaacctggaaaggcgtattaaagaaaaacgaagacgaaattgaagaaacccgccagaacctgatccctctcagccggcagtacatgaccctggctgcggcgcaggcggatatcgtgaatataccagtgaactccacaacctacgtgcgtagcccggacggaagcgcgctggctgacgagtacatgaatgtagctggcactctcacggctacaggtcgtaaaatgccatcgcagaccacagtcgatgccaacacctcagtaatcacagggttggatcttgaccgcgttgatttatctcccacgtcactgggaacggggaaatattatcagatcaccacagggacaatcacgaccaatacggataccaactggagcgcatgcgctccagtaaatgttgctggttttaaacgattaattattaccgggacgtttttacatagggagaaggcagcgcccgtattatttatcgacgaaaataacgctgttatttcggttgagactatggggcttccattgaccgaagacaataattttacgtctttagcagaatatcaggtaagcattcctgcaaaagccgttagcgcactgatctcaacctacgccgagaagtccgtaatggtttatggaacaaatacggatttcaaacagtctgcggttgcaatgtctgcgggccgcgtcagacgccgccttgttaactggataaaaaacacttacatgagcgcgactacgggcgagcttgtgacaaacacagatgattattacaccactcagcttccggtttcaccgggcgatacctttatcctttcatgcaaactgaaagggcaatcaagtacggtaagactggtgggttttctcgatgcagcaggcaccttggtaggagctttttatcccggcccagggagcacgaccgttgcaagcattagcaatctgtcatttcgggcgccagccaatgcggtgacgatgattatcaccgcttatgcggtggatgcctcaacggtattacagcaggctaccgtttttgaccgttccatgacagacactcagatggcggtcgactcggcaagcagcatcgcaaagcacacctccttgccgtattaccccggccggtactggcgaaaaatggacggggcgctgatatccatcgatgatgctccgtattgcgcattccatcccctagaggtcaacccgggtgaaaaataccggataaagaccaatatgtttacgggcaatccttcactagttgcgttagtcgttttcaaaggcgccaatggtgaatatattggaaattcagaagtagcgccgggttcatcagtattcgtttccgtggatatcacggtaacggtgcctgcaggagccgcgcttatgcttttgactgcttacagcccgtacatcgatatcgcctttcaagggagcgcggtggaaaatcttgggtcttccgtagcggggatcgccgccgatttcactcagcaactcagtatcggtttcaccaagggctattactggcacccaacatccggagaactcaccagtaatccggacattaactggcgcgcattcgatgcaatcccggttaacgcaggagaagcatatcgcataacggctaccgagttcagcggcagcgcgtatgtcgtggtcttcaaaaacgcgagcggggctgtcgtaagcaagtcccaacccggcccgggtggggcttcgatcgtagccgtcgacgtaccggtaacggtaccagatggcgcaacgttaatgtgtgtcacggcctacacagataacgtgactatctcgaaaaatatcaactacaaggccgacctgcgtaaagatatcatccggagagactttgagagcggcttacgccttttgtcgcctaaaggcctggatgggtattactggcgtcaggaaaccggtgtaagaacactaattaccgcagactggtcctacttttcggcagacccgttgagcgtaaaagagggcgagtcataccggattatctgcgataaattctcgggaaacccttcgcttgtatatcttgcactcttcaaggacgcaacgggcgctgtcgttggaaggagcaacgccgggccgggatctggcgtggtgcaggccgtagataccaacgtaaccgtacccgctggcgcggtaacaatgtgtataactagttacagcagaaatatccaggtaatcaagtctggcagcattctaagcaaaataccgggtaatagcccggcacaagacaacagcccgctggattactggaaagggaagaaaatagtctggctgggaacgtccattcctgcgggaagcggttcgaatgcctacccgtatatgctggctcagcgcctgggggcgaacatagttaaccggtctgtggggtcgtcaccaatccgtgggggacttgacacgtttgccacaaccgatgacccgtatggatggacaggaagtctgtatacgcgcgtcactcgagcgctgtcccactccaacgctataaagcaggagttcatagataactacgattcaaaatggaaaagtcgggttaatggcgggccagcaaccttatctgattcagataaagcagccattttgagcaattcgtatgaaaaccgcttagcgggtaatcttgatgccgatttgttcgtgatagatcacggcattaatgattatctctggcttgaggagcgtggaggcgatctctccagcttgctgacgccgccagtcgaaacgcgggatatcaacactttctacggtggaatgaatgtagttattgactatattctaagccagaatccacgcgccagaattttgctgatcggtttttatgagaataacctgcggccacagattgcgcagattcaggagaaatcagcgcagttatgggaatatccgctggtaagaatgtgggaaaaaacaggatggagccagcaagttttaaccggttctagtggtgcaggtaaaaccattacagagttttggttgccggacaatttacatccgcataaagattccaccggtcaggcaaacacattgctggcgaacattctggaaatggaaatcagatcggttcgttaa

SEQ ID NO: 206636 - DNA, 240 bp, Klebsiella oxytoca
atgcaccgtcagtcagatatcaatcaggctttccgcgagtcggtattgcgcaacgccaaaggctaccagtacctgtacacccgcgatttcgttaccgcgctgcgccggcgtggaatccacttttccgaggtggaggctaacgcctggatcgcacgcgagcagtcttatttcgtcgacaaaacggcagagcacagcgaaaaccgcctgtggatgatggccaacatggggagggttctgtaa

SEQ ID NO: 206637 - DNA, 534 bp, Klebsiella oxytoca
atggatgctagttatataagatcaattgaaaatacaatgatgtgcttggccacattctcacggtctattaactctttctatgcgctgagcgataacttgcagtatttggactatgggactggaaacctagttccttaccagaacatctgcaacgcattgataagtgatgcggctataaactggtgcaaagtttttggttctaataatgagagtactcactggaaatatagtattgatgatcatgaagattttcgtagtattctctttgatgaaattgggctaactaatgctgagtttacagcctactggaaaaagatgactgattttagaagtaatattattgctcatttcaattatgactttttcttagaaggatctactcctgaatttgatacggcaatagcagcggcttgctctgcacataaatatttgcggaaacatttacctgctggtgttaattatacggggccaactgatttgaaagtttacggtcaggatgttggcagggctgttttgaataagataatactgtga

SEQ ID NO: 206638 - DNA, 147 bp, Klebsiella oxytoca
atgatctcaccgcagatgaacttcgtgttgttgttgatcggcttaaccaacaacgtactaaatttgatactgaactgcctgaaattaagccaccagttactggtggttggttgtctaggagtcggtcgttgcagcaaacccaaataa

SEQ ID NO: 206639 - DNA, 1167 bp, Klebsiella oxytoca
atgactttttggaatgattctcaccagagcgaattaaataatatagccaaatggatcgatgccaatttaattagtaaggcaaatatcccaagagatttaaactctattgatgatacacaattcccggacgccgttttagtccatgcttggtcgtattttatttttctgttcatcaatagaagagaatcactcaataaatacactcaattcaatcaaaaacgtttgaaagaaaaggctataccaagtttagacgaactaaaatcgaatagattgtacttcttgagtaatttattaagagttgtatatgaatattacttttggactcaggaatcggacagtcaacctgtattttccgacacaagtatccttgaaagactagaccgactatcacccgcaactgattataatgtacaattcatatggatagagcgatcgatgcctgcagcattaacaatgagtgttatgtcatcggaagaatttgttacgttgagaaagatggctaacgatgtctgcgggtatgaggaaaaattctccaaccaaatagagttagggactcagaaagcgaatgaaaaaatagatacaatttctgatagccttgaggtgttaattaacatagctgaaaactctcaaaaggatattagcaaatatgttagtaagcttaatgaatataaaagcgagtataacttcgtcttattgagtaaagccttttcaaaattattaacaacaaaacaagaagagtaccgaaaaaatcacaataccatcactttcttttcagcattattggttgttatccctgtgggggctttactaaaccatattttggagtggtataaagttgagttcaattttagcgcgcttgcatattacttgccaatactatcgctagagttattaatgttttatttcatgcgcctttattatattgaaggcaaggctattaaggctcaactcttacagatagaacagaggcttagcctatgtgagtttatacatgattacgtggagaaaaaaaacaattcaggctctgaaaaggaatcatggtcgttatttgaaaagctaattttcagtcctatacaggtttcttctgaaaatataccgtccttactggatggtgcatcatcaattgcagagttggcaggaaaaattctatctaaagaagcaaaataa

SEQ ID NO: 206640 - DNA, 720 bp, Klebsiella oxytoca
atggtcgatttagcatgtagttggtcaccgacattaatagttgaccttataaaaagtatagtctggccagcggttgttcttctcattggattcagttttcgagtccgaatttttgacgtggtacgttcttttttgtctaaaaatacagtatctgaaatatctgcttctgtatcaggagtatcggcaaaattcatggcatcaaaacaatctttagaggttttggaaacatccaactccgataccgtgaagttaccaaaaaacatggattttgaagctataagggaaagacatgaacagcataaaacagaattcagtgatgagctttaccaagctataagtaaacacgtatactctttagaggttgataatgaagtaagaattgatttattagtgcgtgaagcatccttattacaaagcgcagtgcgatactttcaaataaacaaagtactatttcgctcgcaatataatttatttttaactatgtttaccaatggtaattatataagtacggaaagcgcacttcaatattttgaaaaaataaaaaacaataataaagaggctttttccgaatgggactggataaagtatagtgcctatccggtcagcaatgacctaatctatgaaaatgatggtggctacaaactcactacaataggcaggtcatatgtcgcatttatgtcaaaaaaaccacaattaattgatgagctagcaaaattgtaa

SEQ ID NO: 206641 - DNA, 561 bp, Klebsiella oxytoca
atgaaacttattgaaaatcaatactctactttattttcctgtatctatgacgaacaacagcctgtcggcaatctagggcgcgggactcactactcaatatttagagctatagagtggctggatgttatcagagcgcctcttgacttacctcagttgcatgatttttcagtcatctgggatgaggatcatgatgagcgagtcattaatgtaatcgaaaatatatacatggctggattactttcacctgtacagtttattggtgagagaaaagggtcattgacagttattgtcgctgcgaaattctatttcggcggcactccggacataagcgattatcaaaaacaattgcaaaagatttgcgataaatctactgacggggatttctggcctgtcgagattggcatgtttgaccgttcacctggatttcctccaacttctccacatcaaaccgaagtatgtggattaataaatgatgagtttcatcgagtagtcacatatttaagaaatatcgactcactctgggggttgggcacaaaaccctttacccctcatagtgcataa

SEQ ID NO: 206642 - DNA, 123 bp, Klebsiella oxytoca
atgtctatggaaaatatagtaaaatgcttgttacgtcttgctgacgtagcggatgagttaacgaaactgtttgtcgcggctgccttactcttgtttgtttactatttggtcatggggaagtga

SEQ ID NO: 206643 - DNA, 777 bp, Klebsiella oxytoca
atgaacccactttggaagccaatgccttactacataatgagagataaaaaattcttacaaagcttaaagaaaaataaagtttctcagggaatttctgttcttaagctctttatcgtaatttgtttaaagtcagatattgatgaagaaggcaagatcggcgcgaacttaacctatgacgactttgctgcaatgtgttctctgagcagaaaattgatcaactctggtttacgtgtcctcgaagaggctaagattattcgtacaaaaggcgagagaaagaaaagatacatactaataaattgcaagccaagagaaaaaggtagagatttggctgacttcagcacaagtcatggtttttggtgcaaaatgccctacaagggagtggtagacgacaagagtcatatcccttcttttgaagcaatgactaaccggggagttaatgaactaaatgctctaaaggtatacctttatcttttgatgataaggtctagaggggaggtttatatttcagtaaagttatcaatcatttgtggtaagttgactctatcaaatcaagaggtaattaatgcagttgggtatttaaaagcaataggtttagtggctaaagtcgacgttggctcgaacaccatggttaataacgacgaccgttttgctattgcttttttagttagtggttgggaaagtttagaatggaaacctaattacataacagatgaatcttggaataaaagggagcaagaggtctatgaacgttttaaggatagtaaagatttcttttaa

SEQ ID NO: 206644 - DNA, 966 bp, Klebsiella oxytoca
atgaataaagctaacaatcaagcaaaagcagaaaagcctgtgtcgactaaaaaactgtctccacccccaaaatctaagactgtgaagtcagaggcagaaaaaaataaaactgaaggcatgacatatccgaaaaccagcgcagaagggcacgctggggagtacttatttgcctattggatttcccgttacttcaaatggccttgtcgactgctggatattgatatggggttggatgcacaggttgaaatctatgaaaatgaactttctaccggtatgtttatcggagttcagataaaaaccacttcacgcataatgagcagtagtttaggggtgcagatcccctataaaaatttaaagtattggggagaatgcgatttccctatagtgatcgttttaatttgtttgaacgaagaaaataaacatgaagagccagatatttactggcgacatttagacaaacaaaccatcacatcattattaggtactgcgagtgataatgacactggaagcacagctgtgtcatttagcgaagatcaatatctgaaatctccgagggatagagagaaatggcttagattatggctgtcaagtgaagatctgaagattattgaacaatgcgaaggtattgagagaggaattacttcattaggagaattctttgaagaaacaattgtggacgggaatttaaaagagggactacctggttttgattttgtttgtaatttaaatgatttgttggactcatatgatgagatggaattggctattagaggcaacaatcgactagagtatctgtccgaggaagttaaatcacttaaaaaatgtcatgaacgctatatgcctaaaattatgtatgcctttgaacaggcgtgcgaatcaaacagtgtaatgatgagtgatttcgatacgtatgctccaataaataataaacttcatcctatactagttaaaaatagaatccgttaa

SEQ ID NO: 206645 - DNA, 411 bp, Klebsiella oxytoca
atgaaagtcacatggaatagtgatagttacgcccgatttttggaaccggtcttcagagtaatgcctgatctggagacctccttacttactgatttcgtgagttttaagaacgggttttacccggacgtttttggcaaagatggcccctataccgcacctggttctgtagtatcctctcgtgtttaccacgtccatctcttattcaccaagcaagaacgaaaaagccaccgaaacaggttcaactgtacaagcgatcgcgccctcgtttacacccagcacgccaagttacaggacgtatatagcctgttggccatcttcccaaataatgctcacaacacggcaaatgacaatggaataatgaatgacattgccaaatacgctgaagcctttcagaaattaacaaacccgtag

SEQ ID NO: 206646 - DNA, 2289 bp, Klebsiella oxytoca
atgtcggtaccgaaccagacaccctataacatctataccgccaacgggctgaccactgtctttgcctatgagttttacctgatcagcgccagcgacattcaggtgacaatcaacggcaacgaagtaacgtccggctataccgtgtctggtgtgggtaatactggcggtggcgaagttacttttctgtccgcgccggccaatggcgctacagtcatttttgaacgcgttacgccgacataccggctcaccgattaccaggacaacggcgacctgctggctgacacggttaacaaagatttcgatcgtctatggatggctattcagcgcgcatttatttatctcggtgttgcgcttacgcgccctttgtttggtggcgggccatttaacgctaacggctaccggattgctaatctggctgaccccgttaacgaacaggatgcggctacaaaaaaattcgtggtggaaaatgcaaatattgggttagctcgcgtattacgagtgcctgaggttagcgttgatttaatccctggcactaggattaggagtaactctctgctcggctttaacagcgagggaaatcctgtttctatttttagttggactgacactgctgatctagcaataaaactagcatctagtattggtacgtctctcgtagggtatagtgcaaatgatcaggcagcattaaggactgtttatgcgagattgaaggattttgtgagcctgcatgattactggtacccgaccgatggcactgattatgctccggcactgaacaaagcgctgtctgtttctccgaatgttctgatcccaccaggaaagcattatttaaaatcgaccgtttcccttatctctggcaccaggcttatcggccttgggccgaactgtattttgtcatctccggatgcggtttcggcaagtggagcggaaatgcttaccgtgctcagaactacaggtgcgtctgatattgttttgcaggatttggtaatagaaggtggctgtaacgccggtgtgacctcgaagcggaatatacgtggcgtacggtttattaattgcactgatataaggatgattaactgtgaggtaagtcgtaccggcgactgggctacttcattcgaaaaatgtacagacgtgagcgtggttaattatcggcacagaaaaagcggcggcacactatatggtgggcgggacggtattcattttctggattgcgtgaattttacactaaatggcgctgatattgagtctggtgacgatatggttggctgcacgactgagacgcgagatcagcggaatgccgtgatacgaaacgtcattggctattccatgctcgcatctggcgttatcttcaatgaggagggagctacaaccttttcaaccgtagatattctggttgatggtgtcaccattaaatccggaaatgtcgtccgtgatgtcgtgcgcgtgcaggcgattaatgacgccacaaacgtcacaggagtgacagttcaaaatgtcaaaggaacgggctattcacatggtgttttcatatcaggtaaaaaactgacgcgagtaagcgtgtctgatgttgatgtcgtttcaactcagtctcacggggtctatattaacggtgcccagaacatgcgagcatctggtatgggcgtcagtcaggccgcagcctttgacggatggaacataacgaattgcagctactttgacgcatcgccccgctctttaagctctcaggggtggggagttcaggttctgaactgcgccaacttcacactcaatggcaactgctataacaacggagcaggactttttgcagcagccaacggaggaaacgggcgcataaacggatgttcaaattacaacgccactggcgtttatgccggcggcagtacaacatcttactatggccttttcaatgatgagacccctactggtcgtgttgaccctgctacagtttgcaatggatatatagcaagaaatcgcccacgcaatctgaatgcgttgcgtgacccttatgctgcatgttctttcggacaaactgtaagtgggtctgtctcattgcagggtgttgttaactgctcagtagagcttgtttctgatggccggtacaaaattaattttacaacaccttttgaatcaactttttacaggccggaaattgttgcacaggtaatgaatcaggatctaatcgtccgcccgattgcgaaagacggcagctactacacgtttgaggttcgtaactcatctggccctgtaatggcaaacttcattttatgtgaattcaaaaaggcgatttaa

SEQ ID NO: 206647 - DNA, 297 bp, Klebsiella oxytoca
atgagatttcttggtggagctatttttttcataattagcattattcagatgctggcaattattggtggattccatgattggttggggtggaatttagtaatatcggtactcttggcaatgtgtttaacctggttccctttgattggtgcgatacttggtgtcatgggggcgatgcatgcatggtactgggaatggtggcaggcggtattactttttgcatggccagttgtacttatgtttgctcttggcataggtagtttcattttcgataaattcagtaatcgtcaaaggttttag

SEQ ID NO: 206648 - DNA, 303 bp, Klebsiella oxytoca
atggatgttaatgaagtagatgccctcgaaaaggagtaccaaaacgctaacaccaataaatggattggggtatttattgctgttttttcagcctttggacttcttgctggtttagcatggggcgtctctgctaaccctgtagttatgggggtgcttttgggcggggggattgtctttagcggggtgtgttatgaaaagtctaaaaaggcgttatctaagctagatatgctatgttttcaggagtttggaaaaccttacacgttgtctaagagcgagatttttaataaaaaattaagtcgataa

SEQ ID NO: 206649 - DNA, 525 bp, Klebsiella oxytoca; identical to SEQ ID NO: 94227

SEQ ID NO: 206650 - DNA, 234 bp, Klebsiella oxytoca; identical to SEQ ID NO: 94228

SEQ ID NO: 206651 - DNA, 339 bp, Klebsiella oxytoca; identical to SEQ ID NO: 94229

SEQ ID NO: 206652 - DNA, 498 bp, Klebsiella oxytoca; identical to SEQ ID NO: 94230

SEQ ID NO: 206653 - DNA, 693 bp, Klebsiella oxytoca
atgcgacaaccagtgagacctggcagagatggtaacggtctactgtatccgacgctctgcctggtagccgggaagcgccagatatgttgtaaacccacgtttaatgtctactgtgtgcgaccccaacatatttggcgaaggtctactgtattcgagtttttgttcaggggccggataataccggtcgtactggtggctgacataatgtgtctactgtgtgcgacaaccagggaagcctcgagggtaaaggtctactgcatgctacaactatcatactggccattggctggtatgtgcggctgtggtgaggttatcagctttttaaggaaagctggtggaggaaatcactatttctattggatgctatgccatggcccgggactggtcagtattggaagcaccagcgtcgaaaccaggaatgtctactgtaggcgacaacgatctaaattttgcatcgagcgttattctggctgcgttgtgtctactatatgcgataccctctgcttcgtgattaaaactcaaacaaaattatcaggacataccgaggttcctgtcttttgtgtcgactacagtagaccagcgggaaaagaggggggaggggtaacctgtataccagaacgcaaaagctataattcaaaagagacagccacctgcactgaatcagatcggtttcctgatttttgtttaacctga

SEQ ID NO: 206654 - DNA, 1536 bp, Klebsiella oxytoca
gtggcgctgaccagcttttttgctaacacggcgcgtccgcgccccatactgacggtcgcgacaatttttcttggcgcggtgctcaccacatttcaggggcgtttattctcagcggccctgcctgacctgcgcgggcagttcggcctggatatgctggaagctgcctggctgagcacggcattgaatggtgcgcaacttgtcaccatgccgatcgttccctggcttgccacagtacttgggccaacccgtgtgctggtcgtgcccagtttcacgcttggccttgtcgcctttatgatccccacgtttgcccaccactatcctgtgttggtcacgctgcacgccattgccgggttgtgcctaggtgtttatctgccgttaaccatttcgctggctctgcgaagcgtgcatccccgtttctggctggcggtcatggcggcatacagtctgcgcgtgtctactggcatggatgccggttatggcacatccggtttcctggtcgaagaaatcggttggcattggttgtactggccaatggcccttgtcggtccgataattgcttttctggcatggaaggcgttgccgttgtcatcgctcgatcgtacccaattacggcagggcgactgggcggggatcatcatgttctgctcggcgctggtactggttttcattggcatcgactcggccgaacggctgggctggagtgattccggactcgctatgtccacgctggcaggtggagccgtcttgttctgcgcatccgtgttacgcgccctgagccagaaaaacagcttttcaagtctcattgccttcggcaaccgcaatatttgcatctgtctggtgatcgcctgcctgttcggcatgcttatgacccccacgtctctgctgatcccgacattcctgacacaaatgggaaacctgaagcccattcaggcaggcacagcgacgtgggttgctttcggtacctaccttgccgcgacaccactggctatttacctggcaagacggatggaacctagactccttataatctgcggcctgatcgtcattgccttgactgcctggcaaggcacctacgtcagccatgactggcgggtggaccaattcgtcacgatccttgtcatgcagtcgttgggcgaaagtatcatgctaatcggccttattgccgcgttcgtcaccaatctcaatccgcagcacggcgtggcgctggggacttacgtacccatcgctcgcgtgctggcacccgtcgctgcgggtgcggttatgtcaacgtggcagagaatagctggcgacgttagctacgctagcctgagcacctattttccggttggcgagccctgggtggtggaacgtgctgagtcaggggtggcagggattgctcaattgctggcgcgcgaagcgctcgttgccgcacaaatcagcggttatcacctcgttttctggtgcagcttgctggcgcttggcctggccgtcttcattcgtccatccccgcctaatcagattgcgcctccgctgttgaaagttgccagtgatacttaa

SEQ ID NO: 206655 - DNA, 1143 bp, Klebsiella oxytoca; identical to SEQ ID NO: 94147

SEQ ID NO: 206656 - DNA, 1446 bp, Klebsiella oxytoca; identical to SEQ ID NO: 94148

SEQ ID NO: 206657 - DNA, 642 bp, Klebsiella oxytoca; identical to SEQ ID NO: 94149

SEQ ID NO: 206658 - DNA, 411 bp, Klebsiella oxytoca; identical to SEQ ID NO: 94150

SEQ ID NO: 206659 - DNA, 522 bp, Klebsiella oxytoca
atgaagtgtttctgggttttctcagttgctttaactctgtcgtttacagccgttgctgctgagaagaacgacaatgttacgaatgtaaaaccgtccaccggtagggatttatatcttacctgcaaaggttatcaggtgaagggttcatctgtaattaacatcgataaaccctcttaccttgaagggacaggtgagcaggttgaatttgcaatcattactcctagtggtacgtctgatggacttaaggttttttttgattcatggggtttttctccttttggattgattgaaagtcatgtgatgcaggatcactggtctttagtccatgtaggagggcgcgcttcagttaagggggacaagattgattattcatttgttgataaccagccacaggcgggagatggttatcaacccaaaactggggtgttcctgtacggctgcatgacctcggataaaaggccatcttgggtcgaaaaaatctactcaagaacaggcatgtttcgagggggcatagaaggctaa

SEQ ID NO: 206660 - DNA, 717 bp, Klebsiella oxytoca; identical to SEQ ID NO: 94331

SEQ ID NO: 206661 - DNA, 804 bp, Klebsiella oxytoca; identical to SEQ ID NO: 94330

SEQ ID NO: 206662 - DNA, 993 bp, Klebsiella oxytoca; identical to SEQ ID NO: 94329

SEQ ID NO: 206663 - DNA, 747 bp, Klebsiella oxytoca
gtgaagttaacgccaaactggggctgggcctcgttgcccgctctgctggtggtctggataattgtagccagtcactatccttcttacgtcctcccgcaaccctgggatgtctggcgtgaagccgtgcgctggttcagtgacggctcgatatgggctcagctgggcgcgagcctgctggaggagttcgccgggttcgttgtcgccgtagtgctggcgctgatcctgggcgtcagcgccgggctgtccgatcgattcagggattttctcactccactgaacagcctgtttatggccatcccgcccattgcatgggcaccgctcatgctgcttatttttggcctgggcatcgtctctatcgtggtggtgattgtcatcgccgcgctcttcccgatgtgtctgaccattcaggaagggatccggggcattcgcggcggggaagtgcgcgcggcgcgcacgctgggtgcccgtccggctcagttgttgctccatgtttatctgcccagctcattgccgtttatcactgccgctttgcgtattggattcagccaggcgtggcgtgcactggtggcggcagaaatgcttggggcctcccggggcattggctggatggtggcgatgggcggtcagacgggtaacagcagccaggtactgctggggatctgcgtgatcgggctaattgcctggctgatggaaaatcttgtgtttcgccgcatcgagcagcgctaccggcgctggcgtgcccaataa

SEQ ID NO: 206664 - DNA, 240 bp, Klebsiella oxytoca; identical to SEQ ID NO: 94327

SEQ ID NO: 206665 - DNA, 666 bp, Klebsiella oxytoca
atgctcatcactgttagcagtagcgcccagtcgataaccacgttccagtgcctcagcatacacccagtggaactgtccccatgcagagccgacttcaatcagtctctcaagttcaggatggtgccagtcgaggttgcagcgccgcccgccgacgtgcgggataagcaggtgcttgtgcggctcgcgcgcgtaagcggcatacagctcatccagcggccacgcccccggtttgatggtaccggcggtaaactcgttccactcgaaagagcgcaccagtctcccctgattatcaaacgggaactggggttcatcatcttcaagaaataccacgttgtgatcgccaccggcacaggtattgccgcaccactcggtaccggaatagcagacaaagctctctggctggttcaattcattaatcagctttaccgcttgtttccagcgcgcttcggtgacgttaaagtcgtttgcggtatatcccagaatatcgagaccggcgacatcacgtccgtaactcaggttatacagcgtgtcattggtgccaacggtgtcatcagaatgcacatgaagatcagcatacagcgggcgcaggcctgtggcggtctcttcggtcgtgacccatgcttttccttccagcagggggagtgcatccagtgtcgcgctgactaa

SEQ ID NO: 206666 - DNA, 246 bp, Klebsiella oxytoca
atgactgcaacaacgcaaccgctaacacaacagtgccgcgatagttttaccctggcacggcattgggtcaccgcagccaatgtcattttcctgtttgtaagcgcacatatccgggagccgctggagcggggaacgcccctgaaaaatgggtggcgggccggtcatatttgctgcgcgcttttccctcactatttgctacgggacagcataccgcgtcgtatgctgccttgccgttcttttcgttaa

SEQ ID NO: 206667 - DNA, 360 bp, Klebsiella oxytoca; identical to SEQ ID NO: 206152

SEQ ID NO: 206668 - DNA, 162 bp, Klebsiella oxytoca
atgatggaaggtcaattagttttctgttcggattcgatacccttgtctttctggttcaggtgcgaaagtcatcgacattcgtggatattaattaatgtattgtttgatgaagcctcaacttcttaccagaaaaggctctataacgccgtatctcaagcgtga

SEQ ID NO: 206669 - DNA, 726 bp, Klebsiella oxytoca
gtgcccgccacggcggtattcggttcacgtgggggactgaccggcgtactggccgaatgttttgaccgtaagggcgtagcgaccgtgttgcgtgcccgtcacacgtttgccactaccggtgaacgcagctatgccgaactgcgggccggcaatgcgctgatgggtgatgtggctgcctacagttccgctgaggcgctgagctaccgcctgttaggcgatgctggctgggagtcaataacgctttatgacggtgaaaaagaggtgtggcaccgggatttgcacgcagaactgggccgttctcagcgacagtttcgtgtacgtctgagtggcgcacgtatcaaagaccgctaccgtggggcgtactggacaggacatattgatgtcatcgggacgcccatcaatggcttctccctgactggcgctgacccccctgaacagacagtatggcgcgagagtcatacgcagattgggttgcggacggacaccaatggagacagcgacacggtgacagtcagcacgggtgggctgaatggggcaacggtacgcgtgcatctggaaatcagcagctacatcaaagtaggcgatccacttacgcctcaacctcattcatgggcacccgttttagatgctgagattgatggcaaaacccttctgttatcgggcaaagagacttttgctctggcgggcactgagctgctggtcgagatcgagttggtgacggaatag

SEQ ID NO: 206670 - DNA, 1590 bp, Klebsiella oxytoca
atgctagtttatgtgaatagttttagctgcattggcgataacagtttttttgatgtttctagatcggttactgggtggataaagaaagtatctgggcttcacctatcaatagatgaagttttctctagaaatgatttcaaggtaggtggttcctacgtaagaacatacacagctgataaatttgattcaaaaacctactctataatgtatacacatcctgacaaaaatgtcagcggtaggcaatggataacggaaataggaatatccaaagaagagcatgctacatttatttctattttactggagataagcgacgttagtacaatggttgatagccgtcctatggcgaccaggccattattggtttcctttttaaaaagaaattgtacctttgatcatgatgtggttggtcagaacataatctcaattagaaacgattatggtgactatcaatatcttctacatgagatatatagggatgatagaagttaccctctagttttccttagttctaaaaacggtgtctttccaacaaatgcgttgaagctacaagagcaattgctgggtctagcgcaggttgtttcaaccgagggagacatagactcctgggaaatggagcgtcttttagggaggaggtactctagttgggatggtgcaataaatattatttatccgataaatacatctggtgaagctgggactcgtttgatcttaccaaatcaaatagaggctgttttttccaatggtacgccggtcaataactatatcctttcaataataactcatgggacgaatgggttcaaaaagaaaaaacatatatcacctgtactcaccagagctaaaaggcttgctgatgataacaaatcatttagagagagaataaggttagctcagaataattctgaatctgaagagcttttaaatgaagctctgaaagaattggatgaaatgaaagtgtctcatgatgaaaaagagttattttatcttgagcaggtggagattgctgagaactcattgagggaggaattaaaaagaaatgtatttcttgagtctgaagttgataggttaaaatttgaaaaagagtcattatcatcaaacgcgcaaaccaataatatagacatagatatagataggttagcgatcttgttgtctaacaggctaactccagttgccgttctctctatattggagattcttctccccaataatgtggttattcttaaaagtgcgtatgcctcagcaaaaaaatcatctggatttaaacttggtcaaaggcttcttttccttctgtataagctgagtactgaatacttatctgtctttcttgaaaagggagataacgaggctaaatcaatactgggcgctgcatactctgcaaatgagtccgacagtgtcgaaagatcaaaatctctttctgacttacgtacatttgagtacgaaggcaacaagataaaaatgttcaagcatgtaggtattggtgttgcacacaataaaaccgagacgataagagctcatttttatatcgacttggaaaacaaaaaagtagttatagggtattgcggagaacacctgcccgtgcaatcaacataa

SEQ ID NO: 206671 - DNA, 939 bp, Klebsiella oxytoca
ttgcataacgccgcactcgcactctttaacgaccgcttaccgcacaagccgtacttttcggacgatctgcacttcggtgtacgcattgccggtaaggaacgcgccattctggcgaaatacattcagttcaatcagcctcatgccatgttctggctgggattcgacgtcgatcgcgccggtgccgccatcgactggagcgaccgcaacgctcccgcgcccacgctgacaatcaccaaccccgacaacggacacgcgcacctgctgtacgcgctgaaaacctcgatacgcaccgcgccggacggaaaaatgaagccgctgcgctacgccgccgccgtggagaacgcgctacgtaaaaaattagaggctgacgcggggtattcgggactaatctgcaaaaatccgaaccacgggcactggaaaattgccgtgtggcagccggaactctacacactggactggctggccgactttctcgacctgagcgcggcgaacgacaaagaaatcgttgccgactacggcttaggccgtaactgcaccctgttcgacaaaacccgcaagtgggcataccgtgccatccgtcagggctggcccgagtatgagcagtggctgcaagcctgctatgagcgagccagtgcctataatctgcaatttgcagctcctctggatgaaaatgaggtgaacgggatagctaaaagcattgctaaatggactgcatcaaatttcacagaagaagctttttatgaatatgtgaagaacactcacaattcagaaattcaaaagaaaagaggtgctaaaggcggtaaattaagcagttcaggaggtagaccaaaagggagtcataagcttgattcctataattttaagaagagttgggagttattaggtattagtcgagctactttttataggaggttgaaaaatgctagtttatgtgaatag

SEQ ID NO: 206672 - DNA, 192 bp, Klebsiella oxytoca; identical to SEQ ID NO: 195677

SEQ ID NO: 206673 - DNA, 963 bp, Klebsiella oxytoca; identical to SEQ ID NO: 180336

SEQ ID NO: 206674 - DNA, 1194 bp, Klebsiella oxytoca
atgaaaggaatgcaacggataaagaggcataagaactttatcagtgtcgtgaagtatgtattgaagcctggttctcgccatagaagcaccccaacggttattgggggtaacatgactggtgatcgtgcaaaggaacttatagcagagtttgatacagcaagtaagctcagaactgacattgcaaaaccagcctggcataactcgcttcgcctccctaaaggtgaagagcttacaaacgaacaatggaagctgatagctgacgattacatggatcaaatggggttcagtgacactcatcttcgttgttatgtattacacgacgacagtatgggtcagcacatacacatcattgctaatagagtcgatgccgtgtctggtaaagttcatcttggtcggcatgagagtttagtcagtggccgaataattcaggaacttgaaatcgctcatggccttactcaaaccccagcagtaagagtacaaccgaaacaaacaaagcgtaagctttcacgtaatgaagagatgctttctcaacggacaggcttgccctgccccaagaaatccctgcaacagatcattgataaatgtttgaaggataaacccaatctagaaacttttatcaaaagaatcagagaagctcaggtttcatggacggcgaatgtctcaaaaacaggaaagatgaatggattctcgttcgaatatcaaaacatcgcatttaaagcctcccagcttgggaagatgtattcatgggcgaatcttcaaaagatcctcaactacgaacctgaacgcgacaacccacttctactaaatgccaagtcagttgctcctgttcctgttcctgttcctgttcctgttcctgttcctgttcctgttcctgttcctgttcctgttcctgttcctgttcctgcaacagttttaaaaaccactgagagaaaggaaagtatcgttgaaaaaattgcagaactggaattacggctcagagaaggcaaacgaaacgagattgtagaaaagattcttcaaaagaatgcagtacaacagcaaaagcatcacagactcagtagatgggttcctttattacaacggctcatagagcttctcagaagttatgggaagagcatccttcataagactcctacaaacttcttagaagtctactcagcacatcatcttaaacctgcaagaaaaattcatttataa

SEQ ID NO: 206675 - DNA, 477 bp, Klebsiella oxytoca; identical to SEQ ID NO: 107983

SEQ ID NO: 206676 - DNA, 774 bp, Klebsiella oxytoca
atgaataaaatatacaagtatgatagagctttttattatgagggctctgataaaaaacaaatttcagccgcaaaccttaacgacatcaaggtatatgactttgcaagaaagcagatactttttgataaaaatggctatacattattgcgtccaagatattgtaaaaataaaacatctcatttttattcattaaaccaatcaaatgcgagagaagtatcatttttcgagacagataaatcacataacaaccatgtaacctatcttttcaatttattaaatggagaaaaaacctttcagataggtcatccaattttcgaaaataataaaataactggttttgctccccttgcaactttacataaatatcattgggatactgaagtacatagaatatgcaataaagacttaactattaggcacgatttattcgggcaaagtagagatttggcaatgtccattcgtcatccatgggtagctatcgaggttataaatcatcacttcccagaagaaaaggctttcacagcaatgattgagttaagtaaacaaatccccttgctggtcatgtttgatctccttacagtaaaagctaaaaaatacttcataaatattgatgcaatcaaagggcaaataagacctcttttttatatttacgaaggctatgtatggtgtggcgactcgattgacagcagcataacaagttcagcaatacttaaaataaaaatgaaagaacgtgaggcaaatatgaaagacctaagacgtcaggaaaagtcgtaa

SEQ ID NO: 206677 - DNA, 126 bp, Klebsiella oxytoca
atgggttccaaggaatatgcactcaatagcaaaattatccattcaaagattaaaggtattatcaaggatggcaaggtgtcttggctgatgactactaaaaatctctttcatgccattaggatgtaa

SEQ ID NO: 206678 - DNA, 327 bp, Klebsiella oxytoca
atgcgtgatatctaccatcagcttgttaaaagttctcctgactttaaaaacttcacagatgaggatttggcggagtctgctgatttttattctgcaggagctttcgccattaatagtgctctcacattgatcggtaatttggcacttgatgcaactaattcagaagattattccggtgatgatgctcgacgagatttgcttcttgtaagccatgcattacggcaccttccgagaatgtctcaagcgcttaatcagaacagtgagacggcggaatatgtgcgcggccaacgcaaaaaaaagctggaggccagaagtgacaaatcctga

SEQ ID NO: 206679 - DNA, 219 bp, Klebsiella oxytoca
atgcgtgaaattacccttgatcaggccgttgagcgtgctcaccagaccgaaatcatttgtcgtctggttgaagattatccgcgccagttagatggcgatgaagtgttagcaattgcaactttgctgaaacgcctttcgggtgatgtggcggcatggttgattgaagaacaagcctcaattatggctgaacaacgcaagaaaggaggcaaacatgcgtga

SEQ ID NO: 206680 - DNA, 189 bp, Klebsiella oxytoca
atgactaactccaaatggtcagaaattgatattgaaaatgagctgcgccgcctggagtcgatgctttcaacgtcgctttttatgaaccttgatgatgacaacgagcacagtattgcaatggagttgatcggtatgtcgttatcgcgtatccgggaactgaaaacagcttgtggggtagatcatgcgtga

SEQ ID NO: 206681 - DNA, 204 bp, Klebsiella oxytoca
atggctgatcaacagcatacccaaactcgccccaaatatacatggcgttttcttgccctgaaccgtctagacaaaaacgcgaagccttgccgtatatccgtagaagctgagacagagcttgaggctcgttgcattctggcccagcacttcattctttcgctttccgctcgtctgcctattcagggagtttattatcatgactaa

SEQ ID NO: 206682 - DNA, 261 bp, Klebsiella oxytoca
atgtcggaaaactcaaagcctcaacaccccacgccgggcgcgctgcgctccgaactgcgtatagaacttcatacccgctacgctatctccctatggcaaggccgtcgctcttcagagggcaagtcggccatcatggggatgccgcgcttcttccagcttgctggccgaatcaatcaggactccctgacggataacccttgggcggatgcgacgatgctgcatctggagaagctgatcggcgcatcgcatcagcaaatgtag

SEQ ID NO: 206683 - DNA, 285 bp, Klebsiella oxytoca; identical to SEQ ID NO: 102270

SEQ ID NO: 206684 - DNA, 141 bp, Klebsiella oxytoca
atgactggcgtcaggattataacgagcgccgtctccattcatcgctggattaccagacgccagctgaatttgcagcggactggcgaaacgggaaatatgaagaaaaaccaaccgacattactaactgaaggttgtatctaa

SEQ ID NO: 206685 - DNA, 576 bp, Klebsiella oxytoca
atgttaccagaaagtctccgcggctatgcccctgtggttcggggaattgccagaactaatgcgcaggtcattattcggcagaatggttatacaatttatgaaacatatgtatctccaggcgcttttgagataacagatatgtatcctacgggcagttcaggagatttaaatgttacgatcaaagagtccgatggcagtgagcaaaatcttgtagtgccttatgcttctttacctgtgttacagcgagaaggccagttcaaatttgcattgacatcagcgacatatcgagcaaataacaacagcgtcaccgatactccctttactcagggaacgattatatatgggtttccctccagtatcacaggttatacagggggacagttttcaagtaaatatcagtctctggcgctggggatcggaaaaaatatgggcatgtttggtgccgtatcttttgatatgactcactcatggtccaaaatgaaggatagccagcaagacaatggacgttcattaagggcccgctttagcaaaaactttgctgaaagtggaactaattttgctattgcgggttattga

SEQ ID NO: 206686 - DNA, 531 bp, Klebsiella oxytoca; identical to SEQ ID NO: 158545

SEQ ID NO: 206687 - DNA, 936 bp, Klebsiella oxytoca
atggcaacgtatcatctcagcgtgaaatttggcggcaagggtaaagcccttgctcatgccagttacattacgcgggaagataagttcagccagcgccaggatctcgagcacaccgaacacggcaatatgccggaatgggcgagagatgaacccgcccatttctggcaggctgcggatgcgttcgaacgtgccaacggttcaacgtacagggaaattgagatcgctctaccccgcgagctgaatgaagcgcagcggctggcgcttgtccgggattttgtgaagcaggaaacgggcgacaaacattcatggacgtttgcgatccacaatccgaaagccagcattgacggcggcgaacagccgcacgcccatatcatgatgagccagcgcgtcaatgacggtattgagcgcagtcccgaacagtatttcaggcgctataacgccaaatttccggcgcgtggcggcgcgcgcaaggactcagggcataatttaacccctacagaacaaaaacaggcactgaaagccctgcgggagcgctgggagcgtacgcacaacgcgcatatgaaacgatatggctttgagcagggttttattgatagccggtcactgaaaacacagggtatcgaccggaaaccggaacagcatctcggttttgaagcagccggacgactggacgacagccagaggcaggatattaaagacagccggacgttttcagtcgtggatgtgcctgaacaggcgaaacatatcgaccacagcgaccgtagctggatgaatgccagcggtatcgaggtaaaccggaaggaactggtcagatctctgacgcatgatatctcgcagcagtacgggcgggagatggctgcacgggtcacaaaacagggaaatgttgaaatagagcgcgtgaaatccctgtcacgcggattttccataagcaggtaa

SEQ ID NO: 206688 - DNA, 387 bp, Klebsiella oxytoca; identical to SEQ ID NO: 158544

SEQ ID NO: 206689 - DNA, 258 bp, Klebsiella oxytoca
atggaacaggcggcttttttattctccggcgtgggggggatgctgttgacagaaatggaaataagtaacatccggaatattacgcttattgcccggcgtcttgcctggattaatgccaaaagaactcatatcgatataccatcgtttgcagaactgcttttctccggccaaaaagcgctgttcttcgaacaatataattattttcactcacgacggtacacaacggcaggcacgtcaaagccaccggatttaccataa

SEQ ID NO: 206690 - DNA, 426 bp, Klebsiella oxytoca
ttgctgtttatccggcaggggcaggggaaaacggccagcggtaaagcgctgccggtcatcactattacccgccgggacggtggcagtcatcgcttcagccaggcggacaggggagcgtacaccggggtaattgctcactggctgcatacgcgcgaaccggagagaaaagaaaccaccaaagtgaagcgccgccggaagacgacaaaaccaaaagagccagaagcaaagcagggagattatctgatcgggacggatgaaaacgtgctggttctgaaccggacctatgcgaaccgcagtaatgcggaacgcgcagcaaaaatgaactgggagcggctgcagcgtggtgtggcgtcattttcactgcagctggcagaagggccgcgcggatctctatacggaaatgcccgtgaaggtcaccggctttaa

SEQ ID NO: 206691 - DNA, 321 bp, Klebsiella oxytoca
atgcagaaggtgagcgacgacgtgaagcaatgcaggccgcattcaacggtgacacgtgcgctgttactcgtgtgcctgacgctgtcagtcgcagcctgcaaaaaagcaccactcgcaccggtcattcagctgatccgtgaacccgtcccggagagcctgatcgaggagacaccatcaccggcgctggatgagcccgtgacatggggcgcggtggcgatattcagtgacaggttgcttgatgcgcttgattcctgcaatgccgacaaagcagcgatccgccagtgggacagtctgcgccagaacactcgtaaggagccataa

SEQ ID NO: 206692 - DNA, 3027 bp, Klebsiella oxytoca
atgaccgctaattatcccgccagcattctgccacccaacaccaccgccgtggagcgggccatcgacagggccagcgccgccgcgctggagaggttgccggtatatcttatccgttgggtgaaggatcccgacagctgcccgctggcgctcctgccgtggctggcgtgggaatatcaggttgatacctggaatattgactggtcagaacaaaagaaacgcgatgcgatcaagcgcgcccactacatccaccgccatcgcgggacggtcgccgccgtccgtcatgccctggtggacagtcctttcgggacggatattgttgaatggttcaatcagaatccgaaaggggatccatatacctttcgtctgaacgtgtatcagaacgatttgccggtgacggaatacgaccagcaggatctgaaacttgcggtgctgcgcgccaggaatctgcgcagctggttttcagttcatgtattcggccgacttcagggaacctcatatacggccggttacatgtacgccacggagaaaatcacgccgcgctttgttccgctatacgtgattttatcccgctacgagctgaatctggcccctggtgacgtggaaacggtcacggtgaccatcctccctgaatatgcggaagataaaacctttacagtaactgcgtcggataaaacaattgcgaccgccagaatagtcaacggcgctattctggttacgggtttgaagcggggcacctgttcggtcaccgtcacgacgactaacggcgtcagtgcggtgatcagtgtgaaagtggtcgcggtaatgaaatttattacccgcattgataaaacaacgcgaccgttgttctttgtccgtatggatgaggatttcaccattgattatggcgacggcatagatagccgggattaccgtttcgatccagccagtgcaggatatggctgggttattccgacgcgtgacgtggtggagggaaaagagtacaccatcacgattaagaacacggaaacggcctgtctgcgaacccgtttatctaatatgtcctcaaaactgaacactgttgtagagttgattagcgtgacaggggatagagataatctctctgggtttgcactggataccgctggcctgctggctattcgtccgggggcatttgacgatctaccaaacgtgacggattgtacaaatattttctccggctgctcatcactgacaagtatcccggcttcgctatttgctcgaatgaaagtagtatcctttacaagcgcgttcaagagttgtacctcacttactgaaattcctgtggggttatttgcaaatcaatctagtgcgattgacttttcatctgtatttacgggctgtactggcttgctcagtatcggcaataatctattcaacggctgtgtatctgctgtgaatttcaattacgcatttgatggttgctctaagcttgaaaatatcggagcgggtatatttaaaggctgtattttagcggcggcattctcttataccttcagagcgtgcacaaatcttcttgcattgcctgccgatatgttcgcggatgttccgggcggcgcatttacgggagtattccagagatgcgcggctctcactgaattacccgctacattattttcaaattgtgccgaggcgaatcattttggcggcgcgtttaacggctgtgccgcgctgctttctgttcctgcccgcctgtttgctggactgtcgaaagtgacctatttcgggacggttttttctggatgtaataaattgaaaactgtcggtgcaggagtgttttccgggtgcgctctggcggaaacattttcctccgtattttatgcgtgccgctcacttgaaactgtagcgaaagatattttcacaggttgtgaaggggcgacaacttttgccagtacgttttatggttgcagcagcctgacagcgctcccgtcatttgcagactgcgcgaaagtcaccaccttttcatacgcttttgctaactgtgaatcgctcacggaaattgatgcagatgcttttgctgataaagtgctggtgacgacatttgtctacgcgtttatgaactgtatttcgttggtttctgtgggggaaggggcattccggggttgcagctcgttaaccagcctgggctatacattttccggctgtagctctctggtttctctcgcgggcgatatgtttgctggttgcagcaaagtgaccgccgttcatttcttattcaatcgatgcatctcgttatctacgctgccagatgcgctgtttagcgatatggcttccctggcaggactgcaagccactttcctggactgtacagcgttagccgcccttccttcgggattgtttgacggctgcccaaatctcacttcgttaacgctgacgttctctggctgtacctcgcttgcggtattgccagatgatttactgaaaaacaacactctgctgacaagtgccgcctcgacgttcctcggctgtacggcactggtggatattccgccgacgctgtttgcgtcctgctcgcttattaccttgtttggcgcgacgttccagaatactggcgttgaggaaataccggaaaaactgttcagtgccaatcagcttgttacagcctacggccagactttcagaggctgtaaaaaactgcgctcagtgcctgccggtctttttgtcgccagcgtaaatgcaacttcattcactaatgtgtttgcggattgtctggcccttgaaacggctggagcgggtttatttaatagcacggcagcaaccacggttggctatacgtttgacggatgcgagtcattacgcagtgacgttaatgcaatctttaacctgccgagttacccggacattatcaccactacggcattattcaggggctgcgcattgttgaccggcaaaggtgaggtatttatgagcaaagtaccaaacgttactgcgcattattacacgttcaataaatgcactagcctggaagattacgacgttttacccggcaactggataacgaataaattatga

SEQ ID NO: 206693 - DNA, 1242 bp, Klebsiella oxytoca
atggccacgggactgacattaacgacggcgggggccgctgaaatcgaggctgcgtatcaggcgggagaagtcgtggatgttaccgccgtgctgatcggtgatggtggcagcgtgactttaccgaccgaacccgacgacctggcggcggtcactgccctttttggtcagtttggccgcgaaacttttgactctgattcaagctatgaggggtttatcagcggtcagattgttatcaactgcaaggattatccgggtaagacgcttagagaggcggggctggttagcgccaagggtacgctcatcgcttacggcacatacccggcgacatacctcccggcgcaaactgattctattatcaaagagatcatacttacgctggtgctgacactgacgcacagctcaactgtacagctcgttatcaatccgtcacttgctgtattgacgcaggagtcaggcgataaacgctatctgcgccgggcgctaaacctttccgatttagccgataaagaagaggcccgcgagagcctgggcctgaaaggcgcggcggtgcttgacgttggcaccgtagcgggcacggtggcagcgggcgacgatagccggatcaccggagcgctgcaaaaagataaaaatctggctgatgttgctgataaagcgaagggtcgcgagagcctgggcctgaaaggcgcggcggtgcttgacgttggcaccgtagcgggcacggtggcagcgggcgacgatagccggatcgccggagcattgcaaaaagataaaaatctgtctgatattcatgataaggccgaagcccgtaaaaatctggggttaagtagtgatggagatggattcaaagctattgtagatgccgttctttatcctggaatcatcatccctagtgaaaaaagcccggctgagcgttttccgtggcagacctgggagagtttaagcaatgcttttgccgacagggtagtacgcattggttctcagcacggtgcgaccggcggcagcaataaggtaaaaatcgcagccagcaaccttccgccgcactggcacaaatcgggtgacagatcacccggcgagatctgggatccgaccgcgacacacggcacggacaaccagaagagcgggccgctcaatatgacggcaggaacctatatcgacgcagcgggcgagcaggaaaccgcaaacgaatcactcgatgtgactaacgaatatgtcaccctctgcttgtggaaacgaacggcataa

SEQ ID NO: 206694 - DNA, 2244 bp, Klebsiella oxytoca
atgagaaataatactattgttttggatgagggcgcgatcaatttactcgaacgtgcaattataaatgaagagtggtttaatgaccttaaaattccatcttcttatagaaacaacttatgttctctcaagcacaatggcattgactatatattatcaaaaaaagcaagtatagatagcaaatatcttgttattaaaactggagaggaatttcctttttggggattaacaggcaaagatatgatctatgcctttgaaaggtgcttaacatttgcagtgcgtcacttcaataaaaatagtaccagcggacgtcattggggcaagtttatagatgggaatatcatatcctttttcgcaacacagagaaatgcagaagattcactcaggttgtattttaatatgtgccccatggatactaaaaatatttatctatataacgctacggaaaaattcccacgtaatcctgatgaattaacagaagatgaggtgtttgttgatgcaatcagtaatgtaaatatagctatcgaaaaatccacttaccctaacgaagaaaataaagataatgaaataaacttcggcattgagcttactgaacagataaatgataatatttactataactattcttttcaacaatggtatgataataagctaacaacggagcaaagagattttgttgataagaattacaatgaccctgttcgcctaagaggagccgcaggaactggcaaaaccatttcgatggtaataaaaataattaaagatagttattcatttgaaaaatcaggcatgacgaaaaggtttttatttcttacacatagtcattcaacttgtgacttagtgaataatatgatttcatctctggataaagagggcaatattaggaaactaaaaaacattaaaattaaagtatgctcattatatgacttagctcaagaaacattaaattacaatcacaaaaatatatttccaatttcaaccgatggtaaagaaggtcgagaaaatcaatatgaaatagttaacgatcttatcgaagaaactaccaaagacttgagatttcgcacttcaataataaataaatgttctttgaaactacaagaaaaaatattcaatacagagcatagacattttctttgtatagaaatcttaaacgaatttgcttgcatactggatgctgaaaatatttttctagggtctgagaattctaaagattatttacaagggcatcgtgaatcatggcagatggaactagttacaaaagaagatagattattactattgaacttacataatgtatatcgagagaagttaaaggaactaaatgctttaagtatggaccaaatgattgcagatttaagtaattacttacactcgcacatttggaatagaatatgtgaagaagaaggctatgacgctatttttgtagatgagttacattacttcacaaagccagagagaatggtatttaatgatttgtgtaggtctagacatacaaatggtagataccctatatttatggcttatgatattaaacaatccatgagcgatgtttttttaaactcaattagaaatgagtctatagcaaacatcttcaagtctacaggtgttggtgcatctgagttagttgagttaactaaggtcttcagatattcaccagaaatagcttctttcctaacggatttagatggtgcatttcccgcactagatctttcttcagagtggaataagttaaaattatcttcagaaaatgtcagtggagaattaccaaccatacatgtatataaaagtgacatagatctcattgacaacgttttccaagaggcatcccgattagcgagaaaagaaaaatctaaatcagtggccatactctgccttaattttactatattctctcgatatttgaatgttggcagaataaaaaaactttacgaaccattaacatctagggatgaactattaaagccgataaaatacaagggaaagtgcttatttagcatgcctgaatatgtggcaggcatgcaatttgacacagtatatttgatacatattgacaagaatgaacttccagatgaaattactcatagtggaatccacagaagatttgtctctcaaatttatttaggcgcaagtagggccaaggaatgcttgattcttgcaagctctgatgaaagacgtggcatatcacctattctaaatagcgcaattagtaatgggacccttgtcctacactcccatgtaaacaattag

SEQ ID NO: 206695 - DNA, 852 bp, Klebsiella oxytoca
atggaatatttttataaagattttaaaagttacaatggaattttacaaggggacgtatttagggtgaacagtcgtagtgactcaccatttcagtttgacgaacgatttgccatgttgattacggcagattgtgacttagctaatccatctagaaatgtaaactacctcacttttcttccaattgtctcaagtacatgttatttggagaaagtatggattcctgcatattttgagaagattcgcgcagaagtagcgaagtcactccataagctaataaatgagctggaagtacataaaaaaaatgggtgcaatgaactaaaagagtcaggtattaaagaatggttaaaaaaaaatagttacaacgatattttaactgatttagctataactgaccgcactcaaaacatggaagatgttatcaaactagacgatgctctaaggtgtgaagaaacgatagataacttcattaaactaaaaatgattaagggtactaagtttaaaaatataattagtgaattaaaagaggctattaataaacctaaagaggaattttttgtattaccgatgattgactctttatttgatgagtgtggaattttaaaacttagaatgataaggccggttcatagaaaaaacgtttacactcaggagatcgatgcgaggttatcaaatcagtcagatttcactagcctcgtacgtattggcagattgagtgattatttacggtatagtatctctcagagtttcgcttcccttttctctcggatcggaatgccagaaaactatgaaagtgatagggaagagtcaataaatttattaattgaaaaaattgaaggtaaatatgagaaataa

SEQ ID NO: 206696 - DNA, 1215 bp, Klebsiella oxytoca
atgctcatggcatcgctgtcagcgcatctggagggagcgcctctccaaagcgagcagaaagtcctggctctcaccttcatgcatggatctcgcaggcgcttggaagagcgccttgggttgcttcagaatctgaggggaaagaccgagtgcacgaccatcgacagcttcgcatggcgtctgttccgacgttggcgttcgctcgcttcagccctcggttttgtgaacatccaaccgagtgagtacgagcgcatatgcgaggccgcgagtgcactcgcacaggtcagagatgtccaaggctgggtggcttcgacgtttcctatccttgtcctggatgaggctcaggacatgacagcgcaccgcctaggcatggtggcaggcttggccaacaggttggaggtcttcgttgctgccgacgagtttcaatgcctgagcgaggagctacgccccaaccctgcctgcgcttggctggcccaggtatgcgcccctcaggagcttttacagcctcgtcggacaaacgttgatgagctactcaatgcagccagagcaattcgcgccggtgaggcgcccaagtcggagaagttcttcctcgttgcgcagacctccactgcgccgttggctggcgcatggatcaactccaatttgaactggtatggcggaggcaagagcgtcgccattatcaccccgacccttggaacgtttgccaaaggcgctttggcctgggctgctgccaacaagaccaagaaaggcgcaggcccgtatgaagtcgcatgggagcagtcagaggctaaagccgcaagcgagtacctcgccgcgatcaaacttgcggaccggaccgacgctccctccatcaacgccgtcctcgcggcggctggtgacgccagaacagccagggatgtgttcgaatggctagagactcaacgtcggacccgggcaaagctggagttctcaaaggatgagatcgtgaagtcgattgagcagtccttttcccagcgccgccaatctcgcagaaacgaggtgcgtgggtggaaagggatgacagttcatggcgccaagaaccgagagttcgacaacgtcatagttttgtggccagcggcggttggtggtagcgacgaccagaagagacgtttgctttataacgcagtgacgcgtgcgaaggaacgatgtgttgttcttgtgcaggcatccgcccatatgaaccggcctcctttcgcatga

SEQ ID NO: 206697 - DNA, 1791 bp, Klebsiella oxytoca
atgcgaatagccaacttgaggatcgagaattttaggggtgtaagaagcggttttattcagtttggaaaacatcctgttcttgtcggagacaataactcaggcaagactaccctgatcgaagctttgactctcgtgcttggcagggatcgtcttattcgcgagctgagcgagcatgacttcttcgggtccaatccacaagcagccgataggatcaaagtcgtcgcaacagtcacaggttttaccggcgacgacccagaacagagtagccaatggtttcgtgatgaaagagcagtagtgaaatggcttgacgagacgtcaggccaagtgcatcccgtgcgcaacagcccggaatggaaactatgctgtcagctcggcgttcaagcacgcttcgaccatgacaccctagccgtggagactgtacgctacttttatgaccacgatgaacctatagatccgtttgctgatgaggctccggcccctgttccaggcaagctcattcaagaactgagtttctatctggtacgtgcgagccggacgtgggacaaagtcttctcgtgggggaacgagctcttcaaacgcacagtgcttgcagctgcggctcagcccgcagctgcgttgctggccgagcgggaccgtctgcgagaaccggcgcaacctatcgacgccgacccgggcattcaaccgctgattcagaacttgaataccgagcttgcgctctcattcccaaatgctccaaaagttcagttgaggcttactaacacagacagtcggtctgtgatggaagcagtttcagcccactttgcagccactgatggcttcagtattcctgcaggcagacagggcagcgggctggtttccatgcagggtctgctactactgctcgagctgggtcgtgctcgtgctgcaagcggtggtgaattcctgatggcattggaggaacccgaagtccatctaccgccatctgcgcagcaacggttggttcagagggttcaagctctctccactcagacattcgtcacgacccattcacctcttgttgctagcatggccgatccgacctctgtgctgatcttgaagaagcatgacggcgtactttcagccgaaccgttcctagcgagcccacttactgccgcggcgccaaactggaagcgcaagttcttccagcacagcagaattgacgtactgagtgcgctgatgcagccggcactcctcgttccagaaggccgtgccgattttcagttgatgcgttgcatcctccggccgttgacgatgactgaaggctgggtcgaaacaatgactcgccccttcggcatcgaagtcggcgtggtcccaacggaagacgcaaatgtcattgagacccacaggctgatgaggcgcatccacaaacgtgtgtgttgtctcgtcgatggtgatgccgcaggtctggaatacgcagatcaactgcggctggaggccgagccgcccagctcgatcatccgctggaacgatggcgcaatgatcgaagatgtcatcgggtggattctcaatgcggatgagcacgcagtggttgccaagctcgcggagatatcccctcagcctccaaattcgagcgcggatgtcgtggcctatttgaagacaaagaagatggacgtcatcgcctatgaaagtctcgcggaagccatttctacgacgccagcatgcagggagcgggccgcagatctcttaagcggtctggcctgtgcctgtgccggcgataacgctacgcagcgctttgttcgcggagaccatggtgtgtgggtgtttcatccatga

SEQ ID NO: 206698 - DNA, 1764 bp, Klebsiella oxytoca
atggaaaacttagtattcaaacgactagtagtggcgtccgataccctaaaatccggaaatcagttcgagttcaaacctcgcttcaacttgataacggcgaacgacaatagcgttgggaaatcgactctagcgaagttgcttttttgggctctaggtggagaccctgtcttagatgttacgtggacggggtttgacgttcgatgcctggttgacttcagtgtcggcaatcagacttatcaggcggggagatacgggaacatcatgttccttcgtcgcccaaatggagaatgggaaaaatttcccaaaatcacaggcgcatactcggatgcctttgctgagatcgtaggcttcgaggctctattgccgagccggagcgactcaaccaaactcgaaacaccgcctcctgctttctactttctgcctttctacgtagatcagcagcgcagttggtcccacgcatggaacggctttaccaatcttgagcaatacgcgaaatggcagaagaccatcatcgaataccacacaggctatttacggcctgaatttttcacgttcgaagagaagattgctgctcagaaccttgagaaaaaaactgcagaaggtgaagttagaaagattgagacagctattgatgtagtcaaaacatacgtacctcaatccagaaaaatggtcaccctatcaaaaggtgagttcgacatcctcgcctccgaggtctctgacgacatcgcaaaattgcaggctaagcaagaggatctgcttgggacgattgccgaacttcaaacggaacgtgtctatttacaaggccaacttgatctggcagcgattgcatcttctgaacttgataaggattacaccttctctgtcgagtgtattgaaggtgagtctcttctttgcccgttgtgtggaaccatgcacgacaattcgtcaccgagtcgagcctccattctcgccgacaaagacgaggctgaaaggcaagtaatgcaaatcaacgggaagatcgagcggctgaataaagagttggctaactctcagaaaaggcttgagagtacgcgcaccgaaattgatgagataaacagcaaatacaaatcgcttgagccctcgagcatgcctgaaaatcaggaaaatgcttccgaagcatcatttctagacagcatagcatctcgtgcagttcaaaaacatgtacagcggacgatggagacaaaaacagctttaatacgttccataaattctacgaatagaagcttgagggccgaacagaaaaaactactgaccaaggaacagcgggaggatctgaacgctgcattcaaaaactctttgacctcttacctacaggagctgaatgcgcaaggcgttaatctggcacctgtcgaatcccccctagattacaagaaaatccatggaagcggaggcgcagcggaaagcacccgtggcatcttggcttactacatgtccgttatccggcaggcacacaaagcagaaaatgaggctttttcggctattgtgatcgacactccgaatcagcaggaacaagctgacttcaactacgaaaaaattctccaattcttgacgggtgcagtaccttcaaacgcacagctgattttatgcgccatgaatcgcgacgaaatcaaggactacaaacgtgaggcgcatgtgatcgaactggacgaacagaaaatcctcaaagagacgaattacacggagtgccgatctttgcttaactttgatggatcaatcacagggccttcgaataatttgccgagttaa

SEQ ID NO: 206699 - DNA, 930 bp, Klebsiella oxytoca
ttggcgacttcgaccgatgaatctctcgcgcggtttgaattcaatcagatcaaaaacgtcaatgctacaccttggaatcagaagaaattgacttcgatcccaaagtccactaccaaaaaaaattcaaattcaattcttggaaaaatgctccaagggattcaaaaaaagccctttttcgaaaagctgaactcgctcgatttggtcgcgacctgtggctttaagctacctcctaaaaccgatggcttgaagctctcaattatttcaatcggcgatcttcatgatgagtgtctgaaagacatccaggctgcaatcgacaaagagcttggctcctaccctattcccagaaccttaaggttcatcacacctgatctagccaccaccggatttcaggatgtagctattggccgaatttccaaacttgtcaacattaaagctcccggagccatgtatgactcatcaacgatttatcgagtattaattgatgacttgcatcgcaagggaactgtagcctttgattttactgactggaaaaatcttataaagaacaaaggaaccactcatggcgatgttgagcgggttatatcgtcttatacggagaagaaggggctcgaggcattcgagaaagacttggacgatattctcaaggatcttgaactgaaatcgaataagcggattcaggtacgcagagcgtttgaacgctatcacaacgccgtgcgcctggagcgttcattgattgccattgacaaccaacaagcagttaaggatgcggttgaacacaactttgaagtattcgaaaaacaaggcgtgatggattttatgaatctgacacttgaaattttgccagaggcaaccaaaaagaatctggtgaacctggagtcaatccaagcagccatcatttacgaactattgagcaagtgtcatgaaaaatga

SEQ ID NO: 206700 - DNA, 1041 bp, Klebsiella oxytoca
atgccattccccatctcacagtggacgcagattgcgcacagctatcaacaaggaacgattcttctgggcaacggagctagcatggctgtctcggacagcttcggctacggctcattgctggagcatgcccagcgaacgggattgctcgccgaggatgtaaatcgcctctttcgctttttcggaacattcgactttgagctgatccttcgactggtctggcaggcgtccaacgtcaacaagtcgctggagataccagacgatcgcacgcatcaggcctacctgaacgtcagagagtgtttgattcaagccgttcgaaacgtgcatcctgaatacgatctggtgagcggtcgattgcccagcatgtaccagttcctgaaggggttcgacacagtcatttcactgaactacgacttgctcgtctactggacgatgacctatggtctgaatattgaagacggccatcagttcaaggattgcttcctcggaaacggcgcacacggtgccttcaatgatgcgtggcagagattccgtgagccctatcgggagcgaaccaacacattggtgttctatccccatggaaacttggctctatgccgcaacgctgtggaacaggaactgaaggtccatagcgctggagcgggcttactggaggcaatcctacaggcgtggcgcagcgagcgagtcgttccgctgttcgtcagcgagggaacgatgcagcagaaagtgtcctcgatccagaatagctactacttggccacggtataccgggaggtgctcacgtcgcagcgattgacgttgacgctgttcggttggggaattggagagcaagaccggcatctgctgcagcggatgcgtgggaccggaattcagcgggtggcggtctctgtttttcgtggtaatcaggtcgactgcaattacgcgtatcaagtcattcaagatgatctcggacctgttcaggtagattttttcgatagtgaaagccccggttgctggattcacgcagcgccgcagccgggacttggccaattcggacactactag

SEQ ID NO: 206701 - DNA, 297 bp, Klebsiella oxytoca
atgacagcgttcaagtcatcgttgcccgatgcactgcggcggatcagaaaggcgcgaggtctgagccaggaggcgttctcggatgtgtccagccgaacttatctcagttctctggagcgagggctgaaaagcccaaccctgaacaagctgaccgaactgtgcgaagtgatggaagttcacccgctcacgctactgacgctggcctatgccggtgacgacctgcagcaggccgaccagttgctggcgcaagtgcggcagcaactggagactgtgacaaagaaaagtgacgcgccatag

SEQ ID NO: 206702 - DNA, 600 bp, Klebsiella oxytoca
atgacagcccatcccaccgccgcacgcacgcccgaagccgcaccgctgcctcgctcgcgcctgcgcgctcgcctcgtgctggcgggcttcgccgcagccggcctcactgcgctggcctggacggttttcgcgcagccgctgccgcgcctgatctacaacccatccgacagcgttccggtcggctggtatcgcgtgcagccgctcgaccatcgagccgccgcgctgccacgtcccttgtccgtgggcagcatcgtcctgacccgattgcctgccgacgctggcgtgctcgctgcgcagcgcggctacctgccggtacacattccgctgctcaagcgtgtgggcgcggtcgcgccgcaacacgtctgcatcgtcgccgggcaggttcgcatcgacggcgtgcctgcggccgccgcgctgcctgccgaccggctgggccggccgctgccatcctggcagctttgccgccgcctcgaatcgggcgagctgttcctgttgagcgtgaccaatccagcgtcgttcgacagccgctatttcgggccggtcagcgcatccgccgtgatcggcgtcgcgtatccggtctggctggaaacacgcccatga

SEQ ID NO: 206703 - DNA, 135 bp, Klebsiella oxytoca
atgcagaacagcagcattatggcgttagcgctcgcgctgtgcaacgtagaacgaggtcaaccggttaaagtgccagctatgaagggtagccaactgaaagcccttcttgattacatacgggctttaaaaggatga

SEQ ID NO: 206704 - DNA, 840 bp, Klebsiella oxytoca
atgtcagatccaagttggttgggattcggtggtctagcagcaagcgcactgtcggcgcttgctgcttaccttgccattcaacaaaccattaaacaaaggagaatagctaataaggttcaattaattttaaaagacaataaaatacctgtaagtcttgataatttattacaacctatccagttaaacaaacaaattgaaaaatataatataacgctccctattctgaatgttggcttaggtccagcaataaaactagaatatgaatgggtatttgattatgagcatttcctctcaaacattaatgtattaaaaattgatgataaatcacttttaactggaaacgaatacttaaagaaaattgatggaactgaatatagctatttttatagaaaggaaagtgatcgtattaaagttggaatatttggattcggtgcatttcatccatacactcaagaaacaagatacactgatataagctatatactttcatgcagtgttgataaaaaccaaacagaattaaaggtcccaaccctgataataattttattaatacaatcaattttaaaaaactcccaagattttataaaagtttttgaaccaatagatggtcctactctcattgtaaggtatgaagatgtaacaggtgtaagggaagaaaaaatatataaatcaagtatgaaacttgaaaccattactggtgattcaacctctgaacatcaagatttaatattttctctgagctacacccacgcatacacatggacagcgatagcacatgaaaggctacgcaaatggtacgcaaactgtaaaaaaaaaatattactcagtaataacaggtag

SEQ ID NO: 206705 - DNA, 951 bp, Klebsiella oxytoca
atgacaagtatagcaattattgaagcagttaacacctcttacgtaccgttcaacggtcagcagattattaccgctatggcggccggtatcgcttatgttgcgatgaagccaatcgtcgaaaatctcggaatgagttggtcaactcagatgcgtaagttactgagtcaaagtgaaaaatacgggtatgctcatatgaacatacctaccaaaagtggcatccagaagatgctctgccttcccctgaagaaactcaacggctggctgttcagcatcaaccccgagaaagtccgcgccgatatccgcgacaagctgatccagtaccaggaggaatgctttaccgttctgcatgattactggacgaagggcgaggtcaagaatccgcgtaaaaagacaacggtcgatgaaagaacgccgctgcgggacgcagttaatatgcttgtaagcaaacggcatataatgtacccggaagcttatgcgatgatccatcagcgctttaacgttgacagcattgaagatctggagccttcgcagattcctactgccattgagtacgttcaccgcgtagctttggaaggggagttcttgggcaaacaggaaacgcttccagcgccgaagtttgacgttaacattccacttcaatggtggatcgataacaacccggtagttcgcagtggcaacctgtcatttggaaagtctctaacagccccggcctttgacgtgacgatggagatgctttgcggcgacaactctacatctgcggcaattcggctgattaacgttctggaagatgctggctttgatgtgtcggcgccgaaggctgaaatcgtggcgatgcgcaaacatctgggtaatgtcgagtacggcatgaaggctatcgctgatgcttgccgccgggcggggagtaaaaccatctcgtttcgcggtggcaaagctgagtacgtgatcggttaa

SEQ ID NO: 206706 - DNA, 426 bp, Klebsiella oxytoca
atggcagggcgagtccgcggcatgaaagaggctaagtccaaaatggacatcatcattaaagacattactggacgaaaagcagtccgcggcattcaatcggcaatattgatccttggcgctgcttccgcaaaagaggtgcctcgtgatacctcaacgttactgaatagccaattccgagaaattgacttcaatgggactctgataaccggacgggtagggtattcagcgaattatgcagtttatgtgcatgatgctccgggtaaatatttaaacacccagacggatcgcccagtaaaggccggagaggctcctggttcaagaggggttatatggggtcctcatggtaaccctaaatttctctactggcctgcgagagataacgagaaagccatgtatgaagcattcaagaaggaaatgaccttatga

SEQ ID NO: 206707 - DNA, 348 bp, Klebsiella oxytoca
atgtcgtctacggctctctggtcatacaacaaaccatgtactttttggaagagtcttggatttgatgaatatggtgacccattagggtatgaacctccaattatcatcatgtgtgattacattggcggaatgtccgcaaaacttggccagatgggtaaagaggtggttgtaaaaaatactttttttacagctttcgcgcttgctgaagagggtgattacatccttattggaaccagtgccgaacttgatccattaaacactaaggcagatgaaatacgagcttctacgcgttggaatgacacgctcgatggtcttgaagatgactgggctataattacgggagtctga

SEQ ID NO: 206708 - DNA, 420 bp, Klebsiella oxytoca
atggaaaaccaagaagaaaaagaaattcaagaagtcgtgtcacacggcatcgttgatgcctctatcatccacttagttaattgcgcaaatttcggtctgggtgttgatgtaacgatcgttactggcgggcaagttattgccggtgaattagtttctggtaaattttatgctgagacgacagcggaaaaatttcgcaatgctaacgctgatgaagaacttctagaggtgcttgctaagttcttcgatgaattagctaacgattatcgtgctgaggatggtcatcaaatcccgataaattatctacatattaagaacccagcctatctgaaaggtgatggtaattggctcacaattcatgaatcagttctgagggttgctatcagcaaaattgatgggttttcacctggaagaccaggataa

SEQ ID NO: 206709 - DNA, 1452 bp, Klebsiella oxytoca
gtgaacgaaagccaaatgaaacaagagcgcgcctcgaatgccaatcttgagaaagaacgccggaactacctgtcgtcgctgttcaacggaaccagtaacacgaagcgccagcgcctatatcaggagttcggctatcccgtcgatctctgctttgaggatttctaccgggcatgtcgccgcaatgctgttgctggcgcggcagtcagtcgcatggttgatggatgctgggaggatttcccggagatttatgagggcgataaaaccaaagatgccaccaaacaaactcagtgggacaagcgggttaacaagctgctcaagagatgctggaagcagattaagggcgccgaccgtcgcaacctggtaggtcgatattctgcgttgttgattcaggttaaagacagcaagtcgtggcgtgatcctgtagataccgtggccgtagggcggttggaagaaaaggcgctggtaaaactcatccctgcatgggaagcgcagattgagcccattgaatgggatagtgacccagaaagtgagacgttcggcgatgtgacgatgtactcgttcattgagctgtcggtgggtaacaacaaagacgcccgcccgggcagaatcatcaacgttcacccagatcgcgtcattatcctggctgaaggctccgacgatggctcaatgacttccgggcgctcgatgctggaagagggatttaacaagctcctggacctcgaaaaggtttccggcggcggggcggaggggtttcttaagaatgccagccgccagctcaatttcaatttcagctctaagacgaacttcgctcaactggcgcgagccctcggcgtaactgaggccgagctatcgaatgcgatggatgatcaggtacgtcgactgaatgacagcaccgacagcgcagtaatgatgcaggaaggcgatgccagcgtgctctcagtggcagttgccgacccggaacctacctggcgaacggcgcttaatgagttctgcgctaccgtgccgatccccgttaaagttctgatcggcatgcagaccggggagagggccagtacggaagacgctaaggactgggccaaaacccgcatgagtcgccgtaatggcttccttaccgacgtgatcacggatgtggtttcgcgcttctggaagattggcatagtccctcccgcgcaggccgaggaaatctctgtcggatggtcagatctgctggctccgagccaggcagagaagattgccaacatggacaagctcgcagatgtagctgtgaagtcgacgaatgcctttggccgttctgctatcactgagaacgaaatccgcgcggcgggcgaactccagccattgcctgaacttgatgatgagatgccgcctgatgacagaaaaccaaaacctgatcctctggccgacccagaaccagaagccgaaaagtccggtgataccacggtcgaaagttga

SEQ ID NO: 206710 - DNA, 489 bp, Klebsiella oxytoca
atggcggcattaaaaccagagattaaagccttcatagttcaatcagttgcgtgctttgataccccctctcaagtggtcgagtccgtcctgaaagaatttggtattcaaattacccgccaacaggttgagcaaaacgacccgacgaagataagcggcaagggcctggcgcagaaatgggtcgacctattcaaccgcacccgtgaccgctttctcaacgaaatctccgacattccgatcgccaataaggcataccgtttacgcgttctcaatcgcatggccgtaaatgccgaaagcatgaagaacatcggcatgaccgcacaactgcttgagcaagccgccaaggatgttggcgacgtctacacgaacaagcaaaaagtagagcaaagcgtggttgcgactcataacgttatgccggtcccgtcttgtgacaacgttgatgaatgggaaaaggcagcgcagaagcagcagggtgaggtattaggtggatga

SEQ ID NO: 206711 - DNA, 639 bp, Klebsiella oxytoca
atgcgtaaaccagcacgtcgtaaatgcgcccactgccgcgaatggttccatcccacccgggaagggcaggtggtatgcagttttgaatgcgccagcgcgatcgccaaaaaacagacggcaaaagcccgtgaagcggcgaaggccaaagcggtgaagcaccagcgcgaatccgagaaagaagggcgtcagcgtcgccgggccaagcgcgagtcattcaagacaaaggcgcagtgggataaagaggctcagtcggctttcaaccgatacattcgcattcgtgatgaaggtaagccctgcgtcagctgcggaaacccgcttgtcggcaaaagcaactacctgaccggcagcgccattgatgccagtcattaccgttcccgcggcgctgcatcacacctgaaattcaacgtgttcaacgtccactccgcctgcacccgctgcaaccggcagttgagcggcaacgcagttgagtaccggattcaccttattgatcgcattggccttgaccgcgtagagcgccttgaggctgataacgagccgcgccggttcgatattccctacctgcagcgcattaaatccatattcacccgcagagcccgcgcgctggagaagcgccgcgcacgccaccaggaggccgcatga

SEQ ID NO: 206712 - DNA, 918 bp, Klebsiella oxytoca
atgaaaaacgagctaatgccccaccaagaagaaatggcattatttccggtaaaagaagtggaagttaatggtgttcaaatgggtgttcttaacgatgggacgccattcctaagtcttcgtggattagcccgtctctgcggtgtagaccacacaaccctgcttccgttaaccaccaattggcttacagaaagaaataagccaaggggaagaagaatctctgagcttctcatagagaatggatttgaaggcaatgagctttattcagttgttaatggtggcgcattcggtgacagtcatgcttatccagatgcagtgtgtatgtctattctggaatattatgcctttgacgcctcccaagttgatagctcaacagcaagaaaaaattaccgtctcctggcaaggcaaactctcaaagaatacatttaccgcagtgtaggtattgatccaaggaatccgataactggcgcttggaagtgtttccaagaacggatattgctgaacgataaaataccagccggattctttagcgtgtttcgtgaaatggtagatatcacagtacctctaattaatgctggatttgaattgggtccaaaaaccgtgccagacattagcgttggaactcggtggtcaaatcactggaaacgtaacaatttaagcgaaaaatacggggatatacaaaaacaccctcatgtttatccagactggttcccgcagagcaaggcaggaaacctgccagccaatatttatccggaagaggccttgggtgagtttcgcagatggcttagggaagattatgtgccaaaaggatttaaagaatatcttgcagataaggttcaacaaaaggtcatagaaaacaagaaagcaattgaggtcttagaaaacctacagagacctgagcttccaaataaaaaacactga

SEQ ID NO: 206713 - DNA, 477 bp, Klebsiella oxytoca
atgaatactgcagaactccagaagattttagatgagcacaaggtatgggttgagtcttgctgccagcgcggcgatcgggcggacctgcgtggcgcgaacctgagtgacgcgaacctgagtgacgcggacctgagtgacgcgaacctgcgtggcgcgaacctgcgtggcgcggacctgcgtggcgcggacctgcgtggcgcggacctgcgtggcgcggacctgccagatctcaccttcgtcattatgggtatggaatacgcaatcactatcactaacggtgaataccttcgcgccggctgccagaaccacaaaatcgaagactggcgacagttctctaagcgagatatcgccgaaatggacggccgccgcgcgctgaagttctaccctcgactgctggatgttatcgacttctatatcagcaaaggcccacgccctgagtggcttaatgaaccagaagttgcggagtgtgaagaatga

SEQ ID NO: 206714 - DNA, 972 bp, Klebsiella oxytoca
atgagcgaaataatggatttaaccgttatcgaaataaagccagagcaggctccctccctgtaccgggctggcggtcttgacgcttaccttgagcagattcgccaggccgtgaacgaggttccggacctgaccaccaagaaaggtcgtgaccgtgttgcttctctggcggcgcaggtatcacgcagcaagacggcaatcgaaaagccggggcgcgagtacctgaaacgccttaaagaggctgtgcgccctgctgaggcggaaattaagcggttcgttgacgcatgtgacgagctgcgcgatgcgacacgtaagccgctgaccgagtgggaagccgaacaggaacgcattaaggccgaagaagccatgctcgcccttcaagtcgaagcactggccatgaatgaagagttcgatcggcagctggctgctcggattgagtctgaccacgaaatggccctgctgatgaatgacgctttcgaccgtgttcaggccgagaagaaggcagaagccgaacgccagctcattgcccgcgaagaagagattaagcgcctggcggaagagaaagcgaagcgtgaagcggaagaaagacaccgcgctgaactggaagcagcagcccgccgtgaggccgaggaaagagcagcaaaggagcgtgctgaacgggagcgtattgaaggcattcaacgcgcagagcgtgaaaagcaggccgctgtggaagcagaacgccgcaaagcacaggaagaagctgatcgcatccgccgcgaggcagagcagcgcgaacaggtccgcctggccgaagagaagcgcaaagctgacgagcaggcgcgccgcgaggccgatgttaaccaccgcaaggctatcggtaccgacattgttaaagctctgcaggccaataccagcttaacccgcgatcaggcgattgaagtcctgactgcgattaaagacggaaatatcccacataccgggatcagctactga

SEQ ID NO: 206715 - DNA, 345 bp, Klebsiella oxytoca
ttgaccccaacgcccatgctgccatcgtttgcagccccgatcgatacggaacgcgcgaccctctccgcgatcctgaatgacaccggcctccgcgccactactccaagaattaacgttcttcactttctgaatatcgcagatgtaccagtgacagcagaggcagtcagccgctgcgttgacctgccgctatcgactgcgtacagaacgctcacggcgctggaagtcacccacctcgcaggggtcactttcggacgcggagacgttaccagatggttccggtttacaccggatacgccgcaacattgcccggcctgcggacagagcctttacggcgaatacgcctga

SEQ ID NO: 206716 - DNA, 147 bp, Klebsiella oxytoca
atgaccgtcaccaaaaaggggccaccatgccccgcttacatcgacccggatgcactggaacgagctattgccgccgctcgcaaaatcaaagatgccaacccggacaagtacaaatcgctgcccgtccagccggaggttaaacaatga

SEQ ID NO: 206717 - DNA, 627 bp, Klebsiella oxytoca
atgaaaaacgtccgtatctactgccgagcgagtaccaaagagcaagacgctacacgtgcattatctcagcttgaacaattcgccagtgaaaagagtcttcatattgttgaacgttatgttgaaaacgagtcagggacaaagttgaaccgtaccgaactcagcaatatgttgaacgacgctcagcccggtgatgttctgctggtggaatcaacagaccgcttgtctcgtcttgagtctcaggattgggataagttgaagtctcgcatcaatgatgccggaatctctctggtgataatggatttacctacaactcacggcaacctgacaaccagcagcactgatgacgttaccattggtatccttaaagcagtcaactcaatgctgatagacatcatggctactatggcgcgtgaagactacaccaaacgccgccagcgtcaggcgcaaggcatcgccagggctaaggctgaaaacaagtacaaaggcagaccggcagatatcaatctgcgaagtaagattgagtcgtacctcaacaaaggcgggaatacctatgcggagatcgcgaagttatgtgattgctctgtcggcatggtcgccaaggtgaagaaaattattgaggcgatctga

SEQ ID NO: 206718 - DNA, 252 bp, Klebsiella oxytoca
atgaaatcacatccgaataagcatattcaagaggccattgaatacgcgttgagtaaaggctgggtttgggttccagcaggtaagtcagcacattgcttctgcaagctgcgctgcggcgataaatcaggtgaacatacaagtcaccacagaagtgtatggtcgactccagatgtaccggagcaccatgccacgcaaatcaggcaagcggtcgaccagtgtggccgtatcaaaagccagatgagcaaaaaatag

SEQ ID NO: 206719 - DNA, 1275 bp, Klebsiella oxytoca
atggctctgagtgatgtgaaggttcgttcggctaagcctgaagcaaaagcctataaacttactgacggcgacggtatggttttgctggttcacccgaacggttccaaatactggcggcttcgttatcgcttcggtggtaaagagaagatgctggcgctgggaaaataccccgaagtctcgctggcggatgccagggcacgtagggatgaggcccgtaagctattagtgaatggcgtcgaccccagtgagaacaagaaagccgttaagatagagcaggagcaagaggcgataacgtttgaagtggtagccagagagtggcacaccagcaatcagaagtggtctgcatcgcatagcgctcgtgtattgaaaagcctggaagataatctctttgctgctatcggtaagcggaacattgcggagcttaagactcgggatctgcttgtacccatcaaagcggtggaatcttccggacgactcgaagttgcggctcgtttgcaacagcgaactaccgcgattatgcggtttgccgttcagagcggcttaatcgattacaacccagcacaagagattgccggtgcggttgctactgctaaaagacagcatcgtgctgctctggaactcaatcgcatacctgaattgcttcaccgcattgatcactattccggaaggccattaacccgacttgctgtcgaacttaccttgttagtctttatccgttcaagcgaactgcgttttgctcgctggtctgaagtagattttgaaactgctatgtggacgattccgggggagcgtgagccattggaaggcgttaaacattctcagcgtggttcgaagatgcgaactcctcatcttgtacctttgtcgcgtcaggctctagccattttggaaaagatcaaaagcatgaatgggaaccgagagctgatctttgtgggcgatcacgatccgcgtaaacctatgagtgaaaacgcggtaaacaaggctctgcgagtgatgggctatgacacaaaaatggaagtctgtgggcatggtttcaggaccatggcttgtagttcactgatagaatcggggttgtggtcgagggatgcagtggagcggcagatgagccatcaggaacgtagctctgttagggcggcttatatccataaggcggagcatcttggggagcgtaggctgatgctgcagtggtgggcggattatcttgatgcgaatcgagaaaaaatcttttctccttttgattatgcaaaaatcaataacccattaagccagaataagtaa

SEQ ID NO: 206720 - DNA, 1374 bp, Klebsiella oxytoca
atggtggatttaatggtgagtgagcagcagtcgggtacggcggggaaagacgtgcctgcgggatttaagctgactgaggtgggggttattccgcaggactgggaagtaaagaccattggccaactgaacccatttatcacaagtggctccagaggctgggctgacttctatgtagattatggcgacctgtttgttcgtatcacgaatatgagccgcaattctatctatttggatactaaaacatctgaaaataaatttgtttctcttcctgctacctcaacagaaggaaaacgaacacaacttaataatggcgatattttaatctctataacagctgatataggaattattgggtatatcgacgaatccattgcgaagcctgcatatattaaccaacacatatccttagttcgatttgatgatgattctattgataataaatttatcgcatatttcttagccagtgagaatgtgcagaaaaaattcctcgcaaactccgatgtgggcgctaaagcgggaatgaaccttaatggtgtgcggtcaatcatttttgccgttccaaccatacaagaacaatcagctattgctgaagcattgactgatgttgatacccttatcattgaactgaaaaaagtcctggccaaaaaacaggccatcaaaacagccacaatgcagcaactactgacgggtaaaacccgtttgccgcagtttgcgttgagagccgatgggacggttaaggggtataaaaagagtgaatatggagaaatccctgtcgattggtgttttgtagagcttggtaatctgtttgaacaaaccataaatagaaaaacaatagattccactgaggaaataacctttattggaatgcaggatgtttcagataaagcacagctatccacatatttattaatgaaaaagtgcgatatcaaacccggacttacttattttgagagaggtgatgtccttgtagcaaaaatcaccccttgctttgaaaatggtaaagggtgctatacccaaacgctgacaactaacattggttatggaagcacagaatttcatgttttgagagccaaaccaaatgctgatcctgaattcatttattactggacgacggatattcatttcagatcgacgttgaaagctgaaatggtcggtagcgcaggacataagagagttccatttcatgccattcaggcttataaaataccatgtccagaaaataaagaagaacaaaccgccattgccgccatcctctccgatatggataaggacattcagaccctgcaacagcgtctggacaaaacccgtcagcttaaacaggggatgatgcaggaactgttaacaggaaagactcggctcatagaaaggaactag

SEQ ID NO: 206721 - DNA, 576 bp, Klebsiella oxytoca
atgtcagatattcgcacacagcaatttctttatcacttaacggatcttgacaatctggaagatattttctccgaagggctaaaatctcgcagcctcttgcgtggtttttcagatattgccgattctgaaatcatagcttcgcgcagtgctttacgtttgcaagagtacgttcctttccatttttttgcccgaaacccttttgatggcagggttcatcgtaataatccagataagacgttcgtcctaattgctgttcgtcgaagctatgctcagacaaatagctggtcagtcattcccagacatccgctatctggttcagcgattactttgcttgattatgaaacgggtatggctaccattgactgggaaaccatgaaccgccgtgaatatggggatgacaattgcaagtgtgtttgtatggctgagtgcctgtctccagccactgtaaccgcaaacaattttcatagtatctatgttccagatgcagcaacagaaacagttgttaacgccttgaagcaaaagtatagactcgatatgtatgtcaacatcaattctcgtatgttcccgggagcctga

SEQ ID NO: 206722 - DNA, 801 bp, Klebsiella oxytoca
atgtcatcagtcacactgacacatctgaaaaacctcaagcagcgcggcgagaaaatcaccatgctcacctgctacgacgccacgtttgcacacgagctgagcactgcaggcgttgagatgcttcttatcggcgatacgctggggatgatcctgcagggccatgacagcaccctaccggtcaggctggaagatatggtttatcacacggcctgcgttaaacgcggaaacaacggcggcttcatcatagccgacctttcattcatgacctgttcttcgcctgagcaagcactgcacagctccgcgcagttaatgcaggccggtgcgcagatggtcaagattgaaggtggagagtggctgtgcgacacagtgcgtcagctgacgcgtaacggtataccagtttgcgcccatattggactcacccctcagtcggttaacgtctttggcggttttaaagtgcagggacgtgacagccatcaggcggccgcactcgtcgacaccgcgaaaaagcttgaagaagccggcgcggcaatggtattggttgaagccgtccccgcctcgctgggcagagcgctgagcggggctgtgtccgtaccagtcatcggcatcggcgctggtccggatacagatggacaggttttagtgctgcacgacatgctcggcctgagcatcaccggcagggccccgaaatttgtcaaaaattttatgaaaggacagcacgacattcagggcgcgttaaaaagttacattgccgccgtcaaagacggcagcttcccgtcggcggagcactgctactcagaataa

SEQ ID NO: 206723 - DNA, 615 bp, Klebsiella oxytoca
atgtcactgagtatgttcgccgccttctgggctgtttccgtgcttttcgtaatcacgcccggcgccgactgggcttacgccatttcagccggcatccggggacgccgggttgtgccggcggttgccggcatgctgagcggccatcttgttgcaacgctcatagtggcagcgggggtcggctcagtcattgcaggcacgccgggcgtactgacgctccttaccgtagccgggtcggcctatctgctctggctcggcctcggcatgttgcgccatccgacagcaccggcggcggggcagaatgatgatgcagactcgccactaaaatgggcgctcaagggcttttacatcagcgggcttaatccgaaggtttttttgctgtttcttgccctgttgccccagttcactgacgtccacgctgcctggccgcttccactgcagatgatcgcgctggggctggtgcatttgattagctgcggcgtggtctacctgcttgtggggtatggctccggcacggtgcttgggacgcgaccgcgcgccgcacagaatgttagccggatttcgggcagcctgatgatcattattgcgaccctgctgctggcagagcagtttctctga

SEQ ID NO: 206724 - DNA, 453 bp, Klebsiella oxytoca
atggatagaacagactgcaatattcttgcagaacttcagaaggacgggcggctttcgctcactgacctggcggaacgggtggggatcagcctgtcatcatgccagcgccgggtcagagcccttgagcaggaaggggtaatcagcgactaccgggcgcatctggatccggccagattcgggctgaacttttcagccatagttttcgtcaccctgcgcgagggagaccgacaggcggtcgccaccttcgaggcagcagtagaggagataccgcaaattattcaggcgcagcgactgtttggcgatcccgattatctgcttcatgttatcacccgtgacctgccggcttttcaggagctgtatgatgaaaaactctctgatatctcaggtgtgcagcggcttacctcaacattggttatgaaaacggttgtgaaagatcgggtgctgcctgtctga

SEQ ID NO: 206725 - DNA, 633 bp, Klebsiella oxytoca
atgacagagaagttgtattacaccagtgatgatctggaactggatactgaggtgctgagttgcacaccggaagcagatggtcgttttcgcgttgtactcgcgtcaactctctttcatccgcagggcggaggtcagccatccgatcgtggcatgattggaagcgcaagtatgctgcaggccattcaggacggtgcagaggttattcactttaccgatacagcggtagaagccgggcctgtccatattcaaatcgatggtactctgcgccgtcagcatacgcggtaccattctgctggccatcttatagcttatgcgggagaaaaatatggctggtatggttataaaggtaatcatcgtccaggagaaggtcgtatcgtctttcagccagtccgcctgacctcgccggttacagcagaggatttcgccgctggagctgctgatctggtagcccagaaccttgcattgagtacttctgaagaagacggaaaacgaatggttacctggggtaaactaccggtctatgcgtgcggtggaacgcatgtcctgagtaccggagaagtaggccaaatagtcattacccgtgtaaaagagaagaaaggcgaactttcagtccaatatgaactcagggactga

SEQ ID NO: 206726 - DNA, 921 bp, Klebsiella oxytoca
atggatcctcgtgcgagaaaacaatttatttctccggcgctgctgttgatactactacccccgttattctgggcgggtaattttattactggccgtgctgtacacagcattgttcccccaatgacgctatcactctggcgatgggtcattgctttggtctgcgtattgccttttgcctggaaacccatgtgtcgggactatcggttgtatctgacccataaatggctgattgtaagactttccctgtccggggtagtggcgttcaactcgctggtgtatgtggggctccatcagacctcagcctcaaatgcactgctgctcaactcatttattcctgtgctgatagccttgttcggagcggcattttttaaagagaagctgcgtggcatccagacttttgggcttgtcctgtcatttgtcggggtgcttgttattgtggcccatggggactggaggatgctaattgcgttctcattttcgcgcggcgatatcattgtctttttggcaatggttgcctttgccttctacacactctggttgcgaagtgttcctcagaatatggatcgtgttggtctgatgggggctcagatagcgaccgcttttatttttctcgttcctctctggcttgcagaacaggctagcggacagtttgcacaatggaccccaatgagcgtaatggctctggcgtacctgggcgtattcccttctgtactggcctatctgatgtacaacctgggggttgcgaaatttggcgcagcacgtgcagggctctgcatccatctcattcctgtatttggagtggttcttgctgtcatttttctgaatgagtcgttgcacgcatatcacgcggcaggactcattgccattctgattggtatcagactggcaatgaaaaatcggacaatcccggcgacaagctag

SEQ ID NO: 206727 - DNA, 909 bp, Klebsiella oxytoca
atgtctttgagtatcaatactcctttgctggagtcgttgtccctgggccgtctgaataagacccgcgtctggatgaagatggaagcaatgcaaccatcagggtcatttaagatccgtggtgtaggacacgcctgtgagcagcattatggccgtggcgcacgacgcttcatttcctcttccggtggaaatgccggtcttgcggtagcatatgccgggcgtaagctgggtgtgcctgtcattgtggttgtacctgaatctacctcagaacgtgcgcgtcatctgctgagcctggaaggtgctgatgtcagagtacatggtaaaacctgggcagaggctaatgagctggctctgtctctcctgaataatgaagatgcatttatccacccttttgacgatcaacttctctgggaaggccatgcgtcaatgatcgacgaagttgtcgccgcaggattgcgtcctgacgctgtcattctctctgttggggggggtggcctgcttgccggtgttgacgcgggccttcgtcgcaataatctggatattcccgtcttcgctgttgagacggtcggtatgtcatccttccacgcggcattgaaatcaggccacccggtatcatcgcctgaactgactggtgtggcaacgtccctcggggctcgtcaggtatgccagcgggcatttgatcttgcgagtgagagagaaattatttcactaacggttagtgataagcaggctgtagatgcttgcctggccttcctggatgaccatcgtacgctggttgaacccgcctgcggcgcatcccttgccgcactctatgaatcactaattgatgtcagcaaaatgggtaacgtgctggtaattgtgtgtggcggatcgacagcgaccactgcatccctgcaaggatttaagggctaa

SEQ ID NO: 206728 - DNA, 357 bp, Klebsiella oxytoca
atgaaaaaatatgcaagcacaatgccctttccgttttcacgcgcagttgaagcaaacggatttctttttctctcagggcagttatccatgaatgaaaccggtgagtctgttaaaggatcagtggaagaacaaacccaccttgttctacaaaacgttgaaacgacgctgaaagcatgtggttcctctttcgagaagattgttcgtatcactgtctggttgtccgatatggctcatttccaggctttcaataatgcctatcgtacccactttcctgacggattcccggcgcgtacgactgtcgtaagccgtctagcgttcgatcttgatgtcgaaatggaagttcaggcactggcctga

SEQ ID NO: 206729 - DNA, 702 bp, Klebsiella oxytoca
atgaacgtatcgtatgaacaaagctataccgaggacatgatccttatgttgtcggccacagtgcgtgctctgggaagtgtactggcaggtaacgctgaaattgtgctgcatgacctgcggaatccaatattttcaattgccgagattgccaatgcgagtgtaacggggcgtaaaaagggtgattcagtgctggctggtatgcgtactgatcgtgcatttatcagtgcaatggagaataaaaacgaacccgtttctttactgctggattacgaaacgttcactcgcgacggtaaagcgctacgtagcagtacagctttataccgtgaccgcacaggcaaaccatacgcagcactctgcatcaatgtcgataactcgggcattgatgaggctctcaggctactccagtcactagccgggatccgacctgacgagatgccagccattcatgaagacgactcttctgaggccagtcacgacaatatcgaagatttgatgcgtgacatcatcagtaccactacagcactgagttctggtagcagtcgtgctgataccaaaaggaccaacttgctggcggtaaagaatatgcaggaaaaaggtatttttctaatcaaaggcggagttgaaaaagcagcagcagcgctcggggtcacccgctacaccatatacaactatcttgatgaacttaagagcggtgatgagtaa

SEQ ID NO: 206730 - DNA, 1116 bp, Klebsiella oxytoca
atgactattattgctggcatgagttttaatgattaccctgtaattataagcgatctattaattaccagtgataaccataatcaattttcaaatagttcaatacctaccctgtctgactgtgagccacatttaattgattcaaatttttccatttacggaatgatgaaaaaaattgaaataataaatgaaaaatttgtaatatcttgggcaggtaatgtatttgaggcaattaatattataaaatcacttaaggataaatttgaaaaagtagttccttctgatgaaagtattcttttggagataggctctagcaagaatgtttcttttatttggagtgttatcagagatgaatggccaagattaaattcatataacgctgaggttaaagaaaaaaacataaaaccatttgataaattaatttattcagggactggtagtgaagccattgaggaggctatagatatttttgagaataagcatcctgtagaggatgtcgaaaatttggttgttgattccgtatgtagttgtctttttatgttcagtcatttaatgaatcacgaattaatttataaaaaagactccaatactctaaaagatcgtttcggtggcggttatgatgttgtgtgtttttatgacggtgaatttcgaagaattaataacataacttatctatatcttgatgcatcaattacaaaaaaaggaatgatagaaatagatggttcaggaacacttataaaacaattaactgatgatgaagcaatgtatatcagaaaaattaactttgaatttattcatagtatagataacgaagttcttgccacaaaaataacagaggatgatagttatgacttaactggtaaaatttctaccagaaagagcgaggataaactgatacaagacaatgacttagcatcgtctttcatgtgtgttaatgttagagttaaaggttctgataaaggtagcatggcttatattcataagtatgcgaatagtgcctcggccgcagaaaaatcaatcaaatttacttgccaccacaaatttttggctatcaaatttaatcaaaaatactggagcgaatttgagagaaatattctagaattttataaagaccaataa

SEQ ID NO: 206731 - DNA, 456 bp, Klebsiella oxytoca
atgaataagaaagatttaattaattctatagacattagtgagttgaggaaaatatcaagtgtaatcgcatcgtatgatgtgcttgataacataaaaaatccagacgacatggcatcttatctatatgagggtggtaatgatttactgttcgcatctaataatgaaaataatggaacaaacacaagaccgacaaaagctatatggataaaggttaggaatgagttaaacttgttgttgtgtactgatgatgaaaaatatagtgatttatgggaaagaataaatcgaattgagaaggtttctacgcagtacgttattacgacaatttctttgtttctttgtgataaatttaactttgataagttaatcgcaggtgcgattggccaatttgttgctatagtatttttctttgctttaagggttggtaaagaatcatattgtagtacttatattaaatag

SEQ ID NO: 206732 - DNA, 999 bp, Klebsiella oxytoca
atggggttttcatacgggttcagacccgggcgaagccagcacaatgcgctggacgcactggccacagggctggttcggaccaatgtaaactgggtactggatgccgatatcagtcagttcttcgacaaggtaagccatgaatggctaatcaggttcatagaacacagaatcggcgaccagagggtaatcaggctcatacgaaagtggctcacagccgggacctcagaggaaggagaatggcgggcatcggaggaaggagaatggcgggcatcggaggaaggcaccccacagggtgcggttatctcgccgctgctggcaaacatctacctccactatgtcttcgatctgtgggcgcatcagtggcgacgccgccatgccacaggcaatgtggtcatggtcagatacgcagatgacatagtcatcgggttcgacaagcgaatcgacgctcaatgctttcgtatagccatgcagcgcagactgaaggagttcggactcacggtacatccgaagaaaacccgactgacggagttcggccgcttcgcagccgaaaaccgcgccagcaggggaaaaggtaaaccagaaacgttcaacttcctcgggttcacgcatatcagtgggaaagatcgtagtggcaggttcatgctgatacgaaagacacgccggggcaggatgacggcgacactgaaagcgatcaaggacggactacgaaagcgctggcattactcaatccccgaacagggaaaatggctcaggagagtggttcagggatacctgaactaccactcagtcccgggcaactatcccatgatgcggaagttcaggatatacgtaacagacctctggcgacgggcgctgaggcgcaggagccagcaggatgatacgacatggacgaaagcaaacagactggcagccgtatggctgccgaaggttcgggttctgcatccatggcctgtggagcggttcaccgccagacacccaaggcaggagcccggtgcgtga

SEQ ID NO: 206733 - DNA, 264 bp, Klebsiella oxytoca
atggcggtagggcgctatgtcctctctgccgatgtctgggctgaactggagcgtaccgagccgggcgcctggggacgtattcagttaaccgatgcgatcgccgagctggcgaaaaaacagtcggtcgatgcgatgttaatgactggcgacagctatgactgcggtaaaaaaatgggctatatgcaggcttttgtcagctacgggctgcgtaaccataaagaaggggcaaaattccgcgagagtattaagaagctgctggcgtag

SEQ ID NO: 206734 - DNA, 150 bp, Klebsiella oxytoca
atgactaagccaggcgatattgaatctcgcctgatcaaacttgagaaagggccagataagcaagttctggccgctatgaatagtaaggcaagagctattgcaggtagcttgcttaagcagattccctgccaggcgttgaaagatcgataa

SEQ ID NO: 206735 - DNA, 336 bp, Klebsiella oxytoca
atggcaagagcaatatcagctgcagaacgccgggagtatgtccgcgcagtgattcgtatcacgaaacatcagggacgcctgacgaccagcgatgcaatgaaaaaactggggttaagccgcgataccgtcctgaagtatttccgcgaggcggaagccactggcgaagtcgttcggcatggccgctcgggtttattccgcgaccagcgcgctgttatcgattttgacatgaaacgatttggtctggtgccgaaagctgctgttgggatgaatcacaacttgttgggcggttccgcttttcagcgttttttggatgttcaggaggctatgcatggataa

SEQ ID NO: 206736 - DNA, 702 bp, Klebsiella oxytoca
atggataacaaaatcagcatcaacaaaatcatcgctgatatcaaagcgaccaaaggcaatcgctctgggtgccaaggattaagttcctcacttgagagtgacggctacataacttcaatctgcaagtgggtacgagcaacaagtcctgatcggattaatgcgttggttgagcatgtcgagaaacaagacgccgctctgattgcctgggaaaaaaccatgatggaagtttgcggtgaggatggcccggcgtcggtagccagcgaaattcgtaatcttcgggctttgcgcgatacctcactgacggcgctcagggcccaggttaagcagctggctgcggagaatgtggggttgaaggccgcattcaacaaaccagatgcgtggctgtcttggcattcgattccgccaacatatcaagatccaggccgcggcggtgagtatcttgcagtgcatgagcagcccggcgagaaaaacgacgacggcagtgaatcgtgggccgtttatagcaagcctgacctagaaacccccgccaccgatcgcatcgtaaccgggattaaggctgatggggtggaggagttcattggtcggttgcagcagtgcgtcgatgatggcgattttgttggcgatgaagtttccttaattgttggcgctatcgactgcggcaaggagttttgcgagcagctgcgcgagggggccaacaaatga

SEQ ID NO: 206737 - DNA, 1197 bp, Klebsiella oxytoca
ttgtcatggttctcagagatcagcgcggtattagtatccgcattggcctgcgggatatccgagtcgctatcagagtcggcatcgctgtctgaatccgaatcactgtcagagtccgaatcgctgtccgagtcggagtcgctgtcagaatcggaatcactatcggagtcggaatcgctgtcagagtccgaatcgctgtcggagtcagagtcgctgtcagagtcggaatcactgtcggaatccgagtcgctgtcggagtccgaatcgctatccgagtccgaatcgctgtccgaatccgaatcactgtcggagtcagagtcgctgtcagagtccgagtcgctgtcagagtcggaatcactatcagaatccgagtcactgtcagaatccgagtcgctgtcagaatccgagtcgctgtcagaatcggagtcactgtcagaatcagaatcgctgtcggaatcggagtcactgtcagaatccgaatcgctgtcagagtcgctgtcagagtccgaatcgctgtctgaatccgagtcgctgtcggaatccgagtcgctgtcagagtcggagtcactgtcagagtcagagtcgctgtcagagtccgaatcgctgtctgaatccgagtcggagtcggagtcactatctgaatccgagtcactgtccgagtcactgtccgagtccgagtcgctgtcggaatcggagtcactgtcggagtcggagtcgctgtctgaatcggcatcgctgtcggaatccgaatcgctgtctgaatccgagtcactgtcagagtcagaatcgctgtctgaatcagaatcgctatccgagtccgaatcactgtccgaatccgagtcgctgtcagagtcagcatcgctgtccgagtcggagtcactgtcagaatcagaatcgctgtctgaatcggagtcgctgtcagagtcagcatcgctgtcggagtcggaatcactgtcggagtcggagtcgctgtccgaatccgagtcgctgtctgaatccgaatcactgtcggagtcggaatcactgtcactatcagaatcgctgtcagagtccgagtcactgtcagaatccgagtcggagtcactatctgaatccgagtcgctgtcactatccgagtcactgtccgagtccgagtcgctgtcggagtccgagtcgctgtccgaatccgaatcgctgtcggaatctagactggccccctga

SEQ ID NO: 206738 - DNA, 672 bp, Klebsiella oxytoca
gtgcctcaaaaaatcggaaagtttaatataaccaaactatggttgaaagaaaaaatactccaaaaaataacaaggccaataggtctaatatttttagtccctgtgataagcactatagtttatactactttcaatgtcatcgccgaaataccccgttatgcagaaaagtacaataaagaccaggtattagataacatgccagatataataagtgctatgcccgctttatctggaggaataataattaccctatggtacatttatagaggaaaatcagtaaaatccttaaatgatttctttttgttttcatctgcaagttacggattatatttgctaatttttgattacgcatcatacctgcaatcaactaacatccaggatttcgccactaacatcaatcacctcttttttaaaatatgccttctagtttcaacacttgctaaagcacttataacatttatagagtgtttgaatgaaagtcatagagaaaccaaactcaaacatgaaaaaataaatactaaagaaaattctgctgagccatctgctgagttagtaaaaatagaggaagtaaattccaaatcagaagaactgattcattatcataaaggatggtttattataatcttcttattagcaattgctatagcaatgctacctctcatttttttatag

SEQ ID NO: 206739 - DNA, 183 bp, Klebsiella oxytoca
atgattaaaatttcatttataatttcattttttgttctaaattttctcgttttgaattttcattctgatatgaaaggtctgctcattatggcggatttttatttcttaatgatttttttgggttgggttatttcatttgtaaaaataacaccaacacaaaaaaataagactataaaaaaatga

SEQ ID NO: 206740 - DNA, 1269 bp, Klebsiella oxytoca
atgaaagggatgcaaaaaatcaaaagaggaaaaacctttaatggccttatttcttatttattaaaacctgcttcacaccacaagtcagatccgtatatagtcggtggcaatgtgatagaaagcttcgcagaagcactaagtgcagagttcaacgctacgaagctcctacgctccgatgtaagtaaacctgtatggcataactctttacgtcttcctgttggtgagagtttaccaatgcagaaatggaaacagatagctgatgattatatgaagcgtatgggcttctctgaaacgcatctacgtgcatacgtgcttcatgatgataaagatggccaacatatccatatagtagcaagccgcattgatgctacattggggaagctctacttaggtaaaaatgagaaccttatcagcacacgtatcatccaggaacttgaaaaggactaccagctaacaagaactaaaggaactgatgctgtgaaaccttcttcctcacctgccaaacgtaaaaaatcacgtagtgaagcaattatggagaaaaggactggtgagctatgcccgaaaaccatcatccaaaacgctctggaagtattccttgccgataaaccgtcaaccactgagtttgtgcatcagcttgccgcacaaaacatcagagcaatcccgaacatcgcttctaccggacgcatgaacggcttctcattcgaatacaacggaattgctttcaaagcatctcaattgggaaaagggtattcctggtctgccttgcaaagcagaatcgactaccaacaggaacgtgataatgctttcctgtttaaactgaaatcatctgtcagagaaacatctgttagtgcaactcatgatatggccataactacagatgctcctgaaaccacgacagaatactttaaccgccccatagaagcacttatcctcgataaacgagctgctggtcaggacgaatactctatctcttctgtcgaagcgcttctcccagaagctgttgcaactaacaaagaagcgatagcaaccgaagcgttaaaagtagcgcccaagcgaagcgatgcagtgtcagcgttcaggtggttggaatacatcccctacctagatgtaatttatcgtatgttgaaaaacctcaaaatcccaaccctcaaacgtcctcgaaaacacaaaaccatcactggcgtgagaatgatagagataacatcatcaccccccaaaactgccattgaaacaccacataaatcgcacagagcttcgctttcaatgtag

SEQ ID NO: 206741 - DNA, 609 bp, Klebsiella oxytoca
atgattgtagcaggaattcttttatattttttatggagattcaagattctaatttacttttctgtattattattcattgtcgggtggggattgcaatgctaccactcatatcagtatgtttatgagcaaaatgtttcttatagttatctaatctttagaaacgcccttactattgggctgccttttatggctataggtcgcttactgagagaaagaagccttagcaacttcataactttcacacttttttatatatcattatcaatattttttgttgagataatatttaattatttctctttcgcttctaaggctgttgatattcttggttttacaatagatatttatatttctctgattgttatctgcccttttatattcataatagcaatgaaaattgattatggatttgcaataaacagaaaaatcccaaactatatttatttcatacatccactacctatgtttgtttttaataagttctatccgcaagggagtggaattttggtttcgcttttaatagctatttcttcaatagcaatatcctatatatttcttaagatgcaaccaagattaatgctattcattaggccaggagcaaaggcataa

SEQ ID NO: 206742 - DNA, 747 bp, Klebsiella oxytoca; identical to SEQ ID NO: 184677

SEQ ID NO: 206743 - DNA, 192 bp, Klebsiella oxytoca
atgagcacaatgttcgccctggtgataaccgtcggcatgctaattggcggtaatcaggatgttttgctgggtgtatatgacagcgagcaagcatgtcaggaagccgcagttgagcaaggtgtaaaaggcgaatgccttcctttgaaaggcgttctggctgaacaccccaccggattcaccgcacagatgtag

SEQ ID NO: 206744 - DNA, 1662 bp, Klebsiella oxytoca
atgctggccattattgcctataaaaatattttcccacgagattttagtgagttgcaacttaatcaaggtatggtttttaccatatttagtgaaaaggataatcttattgtaaaagaaataaatgaaatagaaaaagatattagcgatagaaaaaaagagattgaggtaatcaacggtgaaatactcaattccagtcaggaggttgatgccatatatgacaaggaactgtctaaatataataattcttactatcatcaggctgagaaagctgatatagaaaagagaagggccgctagaaaagaaagtgttgaaaacaaaatcaatgggaaaatagaagaaatcaatgagcttatatcaagatcaagagagaatttggtttattctaggaataaaaagcttaaagaaataataacaagagaaaacattgatgaaatttttaagctcacctataccaatgaaattggagaaaaaagagattttaatgaaataaaaagcagtgagtatttcgacttgcttaaataccttattcgtgatggctatattgatgaaacctatgccgactatatgacctatttttatgaaaatagcctgagtcgaattgataagatgtttttacgcagcattaccgataaaaaaggcaaagagttcacctatcaactcaagaaccccaaactggtcgttgcccgccttcgagaagttgattttgaacaggaagaggcgcttaattttgatctattagcttatcttcttcaaacgccaacccaagtaaacttaataaaacgtttattcaaacaactaagaaaagatagaagagttgagtttattcgtggctactttgaaacagagagggttcagccaggtttcattaatcgattaaatacgcagtggcctgagttcttttcttatgcgctgacagagagtgaattttctgctgattgggttagacgctactctataggcacattttattattcttccagtaacgacattgaggccattaacattgataattgtctgactgattacctctcggattcggcggattatttagcaatattagagccgaaggttgacaagttaattagtggttttaatttgcttaacgtctcttttgtcagtatcaattttgaaaacgcaaataaagtactctttgatgcggtttatcagcattcactttatgatattaattttgccaacctgaccttaattctgagtaaggtttacacgcttaatggtgaagatgatattcgtcataagaactatacactggtgatgtcacagcctgattctcccttggctggttatgttaataagcatattagtgactatatggatatggttttatctaattgtgatgattcaatcgcggatgatgaagcaattattttatccgttctcaataatgagggaatatccgatgaacaaaaaggccagtacataaactctctgcaaacttgcgtgacctctctgagtgaggttgaaagcgaatccttatggtcatctttgttggataaagatagagcagtttgctctgaggaaaatattgtctcttattttgaacatgttgatgaactggatgactcacttatcgaatttatcaatagaactgatgtagagctgaattttaaaaaaattaacattgatattgaatttgttcactaa

SEQ ID NO: 206745 - DNA, 699 bp, Klebsiella oxytoca
atgaatgttgccccacttaatttcatacgagataactattcagagcaacttccctattatattcacaagaatataagggcatacgttgaattaatggcagttgataactttattttggacgaagctatatcaatactttcttggcaagttgatgatgatttgaaagttaagctactcgagcttgttaaatcaccgctggctattcatgataagaattactctcaggtcgttagtgactatattttagaaaataattttaaaccagatgaacttctaatcttgacatcatcttataaaacttggggagcctctactcagtcgctcatcttgagtcgagcaatacagaatatatcagtattgatagcaagccctaatgatgtttctgaaccgttactaaaaaacctgtttgtcgcagagggactgaatatgcagaataaaatagcactgctaatcgctttgttgccgggtaaggatttgagtaagacgacttgcaaagagtatcttgatctgcttggtttatcggagttcagtaaaattttggggcgaggtaaacctaaaattgaagttgattcaactaatcaaagtttattaacagcattaagagataaccacttcttctctgattttgaggtggattatgaaaatcccacttattataaaataacaaggcggcgctctatgtttggctcagatacatag

SEQ ID NO: 206746 - DNA, 549 bp, Klebsiella oxytoca
atgaacgaagaggaggcggaagcgctgaccggactatccgatccgctgctggcttccgacaaggcgctggagtgggttgacctggtactgtgcaccgccgggcctgccgggctgtatatggccagttttaccgaggatgaggctaagcgcaaaacgcagcatccgctgctgccgggcgcgattgccgagtttaaccagtatgaattcagccgcgcgatgcgccatcaggattgcgaaaatccgctgcgtatttattcgcatatcgcaccctatatgggcgggccggagaagatcatgaataccaacggcgcgggcgacggcgcgctggcggcgctgctgcacgatatcaccgccaataactatcatcgcaacaacgtgccgaactccagcaagcacaagtgcaagtggctgacctattcctcgctggcgcaggtgtgtaaatacgctaaccgcgtgagctatcaggtgctgaaccagcactcgccgcgtctgacccgcggcctgccggagcgtgaagatagcctggaagaggcttactgggatcgctaa

SEQ ID NO: 206747 - DNA, 1056 bp, Klebsiella oxytoca
atgcgataccggttcgaggggaaagagaaaactctggttattgggccctaccctgaaatatccatcactgaagccagagcgaaacagtcagaagcgaaaatgaagttgctgacaggtgtagatccggcgcagcagaagcaagccataaagaagaaagagaaagaagatctggctgacacattcggggaaattttccgtgagtggcatgctcataaatcaaaggtgtggtcaaaaggatatgccgacgagatgatgagtatgttcaccgacgacatacttccgattatagggcatttacgcatggaagatgttgagccgatgaccctactcaaggtgataaggatttttgaagacaggggcgccatggagcgtgctgataaggcgaggcgtaggtgtggagaggtgtttagttatgcgattgtgaccggcagggctaaatataatccatcaagagaccttgctggcgcgatgagaggatacaggaagaagaactatccattccttccaatgcatcgtatacacgagtttcagagagctttgaacgggtatggtggatggattgtttctaagatagctgcgcaaatccttcactacaccgccatgcggacagttgaattgcgttcgttggtatggacgggaatagattatgaaaacaggctcattagtgttgatcctgaagtcatgaagggcaggaaactgcatgtagttccaatgtcagatcaggttatcgaattattcaaattcctgaaacaagtcactggtcagtatgagctatgttttcccgggagaagcgacaggaagaagccgataagcgaaaacgccgtgcttggggttatacgcaatattggttacgaagggcaaacaagtggccacggattcaggcatcagttcagcacagttctcaatgagaagcactggaatagtgatgcaattgagatgcaactggcgcacgtgagcggaggtaccagatcggtttacaaccatgctgcctatctcgatacgcgacgtgaaatgatgcagtactgggccgattggctagatgaaaaggtgtcataa

SEQ ID NO: 206748 - DNA, 2790 bp, Klebsiella oxytoca
atgactgtatcatctgaagtaaactacatcgagtataacggagatggggtgacaactacatttcctatcccattttactttattctaaattctgatatctccgcgcagatagctgatgcagacgggaatattacagacctgacatatggagttgattactcagtatcaggcgcaggaagctcatcaggtggcagcgctacaatgaacaccgcctatgcatctggatataagatccttttctatcgcgagccgccggccacccaggaaaccgcttactatgagaacggtaaattcccggccaagtcacatgaaaaggcactcgataagctgaccatgctgattcaaagctgcttcactgggcttggcctagcgcttcgtaagccttctattctggctaactattatgatgcgctgaataaccggattcgtaaccttcgtgacccgtcacaagctcaggatgcggcgacgaagaattatgtagatggtcaaatagttgataacaccaatgcctggcaggaaggggacagggctcttgagcaggaaatagatgcaaattttcgcagaaccatcagagttcctgaagatgatgtagatatggttacgggtataccagcaagaaaagactcattatttggctggaataatgcaggtcagcccgtaccaatattttcaatgacagaaaccgccgatctagctttgaaactgtcaaacactgatggtctgcagtatataggccagtgcccaagcatttctatacttcgatcgacggaatttagtgctgtcaatcaacagatattcgttacagaacacacagcaggacaaggtgctggcggtggcattttttattgtcattctttgacgaacccatcttctcttcaggatgataatgggttccagattattaatgattttggacaagttattagacggaaagaccgcacaaccctatctgctgaaatgtttgggtacattcctgatttcgatagcaccactcaaacgggtactgaaaatagtcaggcgcttaaaaatgctattaaatccgcgttgcagttcaagtggcctatcgtacatctccctggagggcctgcgcttattgacgttacttccgggcctattaatttaggtggcgaaggcttttctggctcccgcggcattaaacttgtaggccaaggccagcagaacacttatatttcttttaggggtgggttaggttcgataggattcctcaacctgggcggtagtggaactaactcacagaaatcgatacacggcatgacaatccggccgactaacgactctgcccggttgattcacatgtaccagttgcagggggcgtgcttctcccacaactcggacttgtatatcaacggcggcttgtcaaatgttcgattcttgaatgcgtccgcggcgggcgtttttacggagtttaacacgtttacaaattgccgttttcaaggggggaattcaaatatcttatttgaggtagatggcggtgataatagcttccatggaaactcctttgtaaatgtacaaaatcagattctcgctggttctacgtatggctcaggcgtgcgcgttctagggaccacggcgtcagcatatctatacaaccaaacatgggatatgaagttttatggtggcacaaattgcagggcttttacgcttacgaattgcaatacagacaatatatctggaaatttgacctttgaaggtaatattatatgtgaaacaactgactcttcattctttgaattcaaaggtaatttagctgggattagctccttaagcttcattgttgcaacacctacaagcatcagggcggctaatttcgttttcaataacacactagataactttagttcatttactaacgcatccttgtcttcttactctccaaggttgtttaatccagagttagcggacgcctcagataatggagttacagcctcgttatggagagtaagaaactccacaggagacggcctattatttaatatatttaatggtagtcctggctggattttttcatcaacatctctgaatcagcgagtacaaggcgccactcctaaatacgcgcttggtacagacggaaacagctttacgggctatagcactacagtttattttaatcccagcaactcaacatatggtgtccagttatcatcggataattcgagattcgctccgagaaatgatgctgttatgtcgtgtggttcaggtgggtttagatggactcagttgtttgccgttaacagcacgattggaacttcagataaaagaaagaaaacgaaccctcgggccattaacgacgcagaaacagaggctttttatgaaatagccatgctcgattctgtatggcaatggattgataagtttcaggttgaaggtgataacgctagattacattcagggccaaccgtgcaagatgcaatttctattatggatcggtatggcttggactggtctatatattcttgctttgtccatatgaagttggaagcaacccctgcggtaatcgagtcatgggatgatgagtatataaccatcccagcagaaaaggagatttttgaggatgacggtatcactgtcagacaagaagccaaagaagagcgcagggagttgattagagcggctggtagtcgagtagtaactgacgctcaaccatcagtagatgaatacgctttcaggaaggaggagttactattctggatttcacgtgcaacgatagcgaaacagcaaaatatattagcaaggcttgagcgccttgaagggaatcagtgcgctaaatga

SEQ ID NO: 206749 - DNA, 195 bp, Klebsiella oxytoca
atggctgtattggcagcgattcgcataactagcgaaccaaaaaaagcacaagatagctgggatgacatcggtcgcgctatcctaggccgtagcaaatccgtgtcaagatctagtgtatcttacaaggaagggatgagcccagaggccatcattgccatggctaatgaaaggtcttcgtctcgcaggaaggcataa

SEQ ID NO: 206750 - DNA, 717 bp, Klebsiella oxytoca
atggtcagtaaaaacagcgaagcccagaagtgcgctaacaccctgggcctcttatcgaacaaatcccgcgaaggaaatatcgacatgaacagtgtacagaacaaagagctaagtttccacaatgtcacattggtaccggcccctgttgtagatggcatttggctgacatcggctgatattgccaaggcgctcggatatgcttcaagcaaaagcgtttcgaccatttactcacgcaattcaggtgagtttacaagcagcatgtcaatggtcatcaaaatgaagaccaatggcataaacaatagcttacgtgacaaatcagtccgtgtgttctctcttcgtggttgccatctaatcgcgatgtttgccactaccgataaggcgaaagagttccgccgctgggtgctggatattttggatcgagaagtggcgcattcaccaattgctaagcagttcaccgatgatgagttgcagtctttatgttggctctggaagaactcggtaaggatggtaagccatatcgctgacgttgagcctcttctacgtgtagctgaacatcgactggcccctgcttactattcgatgccgcgggaatactcgcaaaacatgaacgctgtaaggaggctgttagaaagggaaacgatgcacattcacgctgaccgacacacgatagacaattggcgtgtactaaaccaactaagaattccggagcttcactga

SEQ ID NO: 206751 - DNA, 1446 bp, Klebsiella oxytoca
atggccagaatccctgtttaccagagccaggtcggtattcgcgcggcaggtccgtctcccgtgcgctatcaaactgaatcgactgaccagcaaatgttatcacagggagtcaatcagtttgttgatggcgctgtgcgcattcagcgtcagcagcaggctgttcaggatactcaagatctgacggactttgccaatgcgcagaataacctgaatgctgcgttaaatgatgcgagacagcagtcaaaaacgggaattgactacattcctgcagcatctgcgctcgttaagcagcatgagaatgatttctatgctgcccatccttcaatgtcagagcagcagaagggggagtatcaactccgttgggcgcagctgagaggaagcgtagacaatcaggctatcaactgggggcaggggcaggcgaaagctatctccatagccaatctggaagatagtgctgctgcagtagggaatatcattctccaggacccaacgcaggcaaaggctctggctcagtctcacttgcagacgatagaccagagcgaccttgacccggcaacgaaggcgcaactagcaagcaagtcacgtaacatgtgggctcttgccgcggcgcagtacggtattaacgccaatcctcaacatgttattgatcaggaatcgaccttccgtcaggttcaatcggtaggggctggtgatggagatgctactccatccggatcaagtgggactcttgcgacaagaaacaataaccctcttaacattcgtttttctggaaacaataactgggccggtaaaggtagcgataacggctccgggtttgagaacttcgacagtgcagagcatggtctacgtgcagggctgaagctaatccgcaaccatattggcaacggcaaggatacactgcagtcgctaatcagtacgtgggcacccccaagtgagaacgatacaaagcaatactcccaagccgttagcagaaaaacaggcatccctgttgatgctcagttgaatcctaatgaccctcagcaaatgactgcggtagcaaaggcaatggctgagcaggaggggtatggtggaaatcttagcggcggccagttacaacgagcgtgggattcacttaacgatccaaatcaactcgctccaggcattccgtggggacaacttacgccacagcagacgcaaacggtagcctcatcaacagaccaattggtttctttattccagaagacgcgttctggagatgcaaaagccggtgacttctttagattcaccgtggaccatacgcctttcataaacctgttctggtcgcgtccgatactgaattacctgttccttaatcagttgcaggagtcgctatcgccaggctctcttcatcgatacgagcagaacattagaaagaatcagggtaatgacttcttgatccctccttctcagtttatgctagggagataa

SEQ ID NO: 206752 - DNA, 684 bp, Klebsiella oxytoca
atgaaaaacttatcttacattcgccagcaactgatagtggccactgccgatctgagcggagcgacaaaaggtcagctcatggcctggctggagaatgctcagttcgacacgaacacatttccacgcaaaaaacagcgcgtatgggatgaggaaacggaaaagtggatgacgctgaacaaccctccgatccctggaaagcaatcccacgccaaaggctcacatatccctttggtacagccggtggagtacgcaaccgcatcatggcgccgtgcgctactgtcactggatgagcatcaaaaagcctggcttctttggaattacagtgaaaacaccaggtgggaatatcaggagacaatcatccggtgggcatgggagcaatttagtcagcaactggccggagtgcgcattgctaagaaaacggttgatcgcctgcgtcagcttatctggctggcggcgcaggacgtcaaagccgagctggcaggccggaagacttatgaataccaaaagcttgcttccctggtcggcgtgacccctaagaactggtcagaaacgtttacggagcggtgggaggagatgaaaaggaccttgctgcgccttgatagcgattctcttttgcaggttacgcgatcacgttcacaacaaaaggcgacaaatttagactcaagtcttgcaaaactggattaa

SEQ ID NO: 206753 - DNA, 297 bp, Klebsiella oxytoca
atggcgaacctacgtaaagaggcgcgcggccgcgaatgcacggtacggatccctgggtactgcaatggcaatccggaaaccagcgtactggcgcattaccggctggcgggtacgtgcggcacaggatgcaagcctgacgatactcaggcggctattgcctgcaacgggtgccacgacttgatcgacggacggaagaaaacaaccgattacacctatgacgaactgcgcctgatgcatgcagaaggtgtgctcagaacgctggccatatggaaaaaagaagggctggtaaaagcatga

SEQ ID NO: 206754 - DNA, 1026 bp, Klebsiella oxytoca
atgtctagcgaaaaatcacctcagtctctgggcggtaaagcacgtgcgtcaaaactaacccctgatcaacgtaaagaagttgcctcaaaagcagcgacggtaagatggcaaaaagtaaatgatcctttgcctcaaaaagctaagcatgaaggcatcttgaaaataggtgatgcagagcttgatgtagcagttttagctgatggaaaacgaattatttctcaaggttctgtctttagagcatttgggcgaccgactaggggggtaaagtccgctccagatggtgagatcgtcatgcccgcttttatggatgcaattaacctaagaccttttatttctcaagatcttatgggtgtgatcgaaagagttaaatatcaatctcttttaggcaatgttgtcgaaggctatgatgcatctattcttcctttagtatgcgatgtatatctcagagccagggaagaaggggttatcactcgtaccaaccagcttgatactgcccagaaagccgagatattagttcgctcattagcaaaagtagggatcattgctcttgtcgatgaagctacaggatatcaagaggtaaggcccagagatgcactccaagcattcttggataaagtaataagtaaagaactggctgcttgggctaaaaaatttcctgatgaattctatgaaaacatctataaattaaggggatggcattggtcaggaatgagtaagaatcgttttagcgtcgttgcccactacacacgagatctcatctacgaacgattaggtgacagtatccttgaggaactggagagaaaaacaccaaaagatgacaaagggaacagaaaaaataagcttcatcagtggttaaccgatgatgttggaaatccaatgctagcacagcacttacattcggtaattatgattcagcgtctttccatagctaatggatacagttggaacaagtttattaaaatggtagatcaggttatgccgaaaaaaggtggtactttcgagctagcattaactgatccaacctga

SEQ ID NO: 206755 - DNA, 741 bp, Klebsiella oxytoca
atggcgaaacttgattttctattttgtgccgttgtttgggaaacaaccgcgtcagtgagaattatgcacgaacttgcagaacaggccgaacaggctatatcaagagcagtatcacaatcgctcgaacctggcgccgtaaaaataagcgaatatgatgatgttattactgacgagaacggtagagatcattttatcacacgtgattgctatatttatggtccatgtgcagatctctatgaagaagatgttttgcaagaatataattacctcatatctcaactgactagaagatcagcttttttaaccatttttggtttgtttgaatatcatatgaagagatgccttgaacttatgatctccctttcaggctacagcggtaagttaagtgaaggtgttatagagaatgcccacaacgttttaaaaaagaatatctcatatagagaaattcaagatgttaaccatctaatcaaactgagaaacatccttgcacatgagaacgggacagctattgactatcactctgttaagaataaagcaggtaagaaaacttgctcggaaaacaagcttatcaacgcaatttcgaggctggttcgcgaaaactcaggagtctcagtcaatgattttaatggtgtcttgatggacgacagattcttaacctatgcggtaaatgatatcgaccgatatgtaaaatctatggaacaggcgattcaggcttactgggacagaaaaacaaaatcttaa

SEQ ID NO: 206756 - DNA, 783 bp, Klebsiella oxytoca
atgagcgccgcattggtagtagtcattttagtatgtggctatttatatattaatagccacataccttcaaaaattctcttcaaaaaatccacaggttggcaatcctacttccaggttgctttaaagggatcaatttatctgctccttgcttttatgttgcttttgatggtttggctggtaattttcctttccatggtgttactgaacttaccttactttcttgggctagatacgtatcatttcacctatgcatatgatttatggaattttcatatcgctggcatagggctaccattcgtcgcacttgttcttacaacagtaactttaagtttaggcgaatcgaagcaagaagaaaaaaaattgcgtgatccagctgctcggcgggcgctttttgaacaaattgccaaatcaagcccgatagaggcagtgttactggaatctatcgaaagtaatcttcaattattaatatcaataacgctgaaatcacgaaaggtttatatcggaatggtgcatgaagctagacttgaagagcatgatactgatacggtagtaataatccctttcttgagcggatacaggcataaggatactttgtcttttgtagaagaagtaaactatgcagatcattatgaagaatgcggaattacgtttacttcaaaaccattgtctcttacacaataccggcatgtaattccgagagatcagattgagtctatctctttatttaattcgaaaatgtatgccagcttcgaggctaagaaaaaaaatagtgtgcaagagtaa

SEQ ID NO: 206757 - DNA, 234 bp, Klebsiella oxytoca
atgaacaatatgaagcgccttttggcaacactggctactccagatcgcataatggatattttggtcagcaacagatgggatactaaagataatccggcggaaaagactgcaacggactcttacttttttgaccgaagtggtactcttaaaatcaacccgaacaatcgagatgtgcaagacgcacttttttataatataaatgctttgtcttctaagaaaaaaaataaagggtag

SEQ ID NO: 206758 - DNA, 339 bp, Klebsiella oxytoca
atgagcaaatcactgaatgcacgttgcatccgtcgctgggaagttgagttcaaaggacgctgcgattcaaaatttagcactgtctggcgtaagcgcgatctgcgtgggtatatccgcgaagctgcactcaccacggcttactgcatggttgaacgaatggcagaagataacgcccgagctgattttggtattaagggttggtcgtcggatttctcagactggtacgacgaacgtcgggagcactatcgcaaagacgcaaagctcattcttgatgcgtttgcctgcaacgaagctattgatgaagaaattcagaacgagctggaggcctggaatgactga

SEQ ID NO: 206759 - DNA, 1272 bp, Klebsiella oxytoca
atgccgaatgaatacactattgagtttttgcctttccatgaagggcaaaagaagattcatcggtcaaaggctaagaggaaggtaattcgcgctggccgacgttttggtaaaaccaccatgctggaacaggcgggtgggaactgggcggctaagcagatgcgcgtcggctggttcgctccatcgtataaaatcctgctgccgtcctttaaggctatccgtgaccttttaaaaccaatcactaccagctcgagcaagacagactcaattattgagactatcggcggcggattggttgagttctggactctcgataacccagatgcaggtcgttcccgtaaatatcacaaagttatcattgacgaggggagcctcgttaaaaagggtatgcgtgatatctgggagcaggcgatagagccaacgctacttgactatgacggtgatgctgtcatggctggcacgccaaagggtgtggatgatgagaactttttctatcaggcctgtaacgataaggatatgggttgggaggagcatcatgcaccaacggcagccaacccaaccattaaccctgaggcgctggcgagaatcatcgaaggtcgccctccgatggttgtccagcaggaatacaacgccgagttcgtagactggcgcgggcaaaacttcttcaagctcgactggcttctggagaatggcgagccagttgattatccatattcatgcgacactgtttatggggttgtcgactgcgcgcaaaaaggacaactgcataacgatggctcggcatgcatttggtttgccctgatcaacgtaccaactcctcacctcgtgatactcgactgggacatcatccagatagatggatatttcctgaaagatatagttcctcaatggatcggcaaagcaaggcagctaagcgaaatatgcctggcgagaatggggtgcaccggtttgtttatcgaagataaggcaactggcatcacgttacttcaacagggttctaatgagggctggaacgttcacccgattgatggggatctaacgtcccttcctaaagagtcacgagccatcaatatctctggttatgttgcatctggaaaggttcgaatttccaagtatgcatttgaaaaaataaccgaatacaagcagtcaaagaaaaatcaccttttattccaggtcctgaaattcatcattggtgaagaggaccaggatgatgatcttttcgactgtttcaactatggcgttgctatcgggctcggtaacggcgacggattctga

SEQ ID NO: 206760 - DNA, 1080 bp, Klebsiella oxytoca
atggcaaaaccggactggggagcactgcaagaccagttcctcgccgagcatgccaaaacaggtatttcccccaaagactggtgccaggctcagggactgaattacgcatctgcgaaacgctacatcaaagtaacgtcgtatggtgcgaaatcgcagaaagaagctgcgaaaaaaaatgcgaattcgcaaaaggcagatcatgcgaaaaggagtgtaaagccagagcctgaggcgcaaaaaataactgcgtcagagtgctcaacgcctcctccttcagcgccagatgatttcgggctttccgaacagcagatgatatttgcacagcacgtcgttgatgggaaaacacgagtagatgcatatcgtctggctgggtacaaatgcgacggcgagaacgcttactttgctgccagtcagatatacagaaatatacaggttaggcgctatattcacgccatacgaaatgagcgccaaaaacgatacgctgcagaactcgatgatgtgatcggtcagctgactgcaatcatcaacgcggaccctaacgaaatagctcagtatcgacgcgttaactgccggtactgctgggggaacgagcacaaatatcagtggcgggatattgccgagcaacttgccgctgagcgtaaagctgaggctgacggcgcgcatcctccggatacatcgggaggtattgggtttgtcgacaacggcgacccaaacccagaatgcccgcgctgcaacggtgaaggcgtgggagaaccattctttgccgatacacgggatctggaaggggatgctcgctatttgctgcatggcgtcaagctgagcaagtttgggatagagattcttactgccgacaaagatgctgcccgtcgcgaactggctaagttgctaatctcaagggatggatcaggaggaggcaataataatgacctgtcacgcaaacttatcgagcttgaaattcgtaaacgcgcagcggaagcagagcgcatagaacaggaaaatgtctctaagaaagcacctggcaagccgggtgaaaagccaacgatagttatcaaccttgtgaattcaccagatgccgaatga

SEQ ID NO: 206761 - DNA, 519 bp, Klebsiella oxytoca
atgatcaaccgcaacaaactggagcacattctcgaatacgccagacagcagaggcacatcggccagtcctgcaaggttccgccagaagatatggtcgaaatcatggaacgattgctcagcgcttgcaactctccggcaattccggacggttggacaggcaacgataaagcaaacgcagcgctgatgatgcttgatcggattgaaacggtagaccctgttgatgatgaccgtatcgacggcattaagcgcattgttcgtgagcttgctgccgccccgcagtcaccaggcagtgaaccctctaccgtgccgggtaaatggattccggtaagcgagcggatgcctgaagatagtggccgttactggtgctatgtggaagagcaaaatgacttggggaaatcacactatcaatggaactgttcatggaatggcgatcggtggtgggttgaaagcgagggcggcgggattgtcacccactggatgccactgccagccgccccgcaggaggtgaaaggtgaataa

SEQ ID NO: 206762 - DNA, 783 bp, Klebsiella oxytoca
atgacaactgatatcaccaaactggcgcagagcctgaaagctgcggcagagaaagcgactccgggcccatgggagcgtggagacggcaggcatggtggcgaattatttgtctattgcgatgatgcgttaggctctgctgtttgcgaggcaacgagtacgtacaatgcaattccaaaatatcagcgcatacataacctggatttcattgccctggctaaccctgccaacgttctggcgctggtagaggcgctggagaaggctcaggcgcaaatcatcgcgttacagcagaaggccgaaattgatccgcgcactcacgaaattatcgacctgaaggagcgcattatcgaaacgaacgatgtgctttgcagcctgcttcctgattgtcggtatatggacccaccagacggtggcagcgtagcgccactggagcaggtatctcgcatgatttcggattaccgccagcgcatcgccgagctggagtcccgcaccgtcaccgccgccgctgctgatgtattggcagaacgtcagcgccaggttgcggcggagggatggactgctgagcgcgatgatagctatcaaaacagtgagctcgctgatgctgcggcttgttacgcaattcatgcacacaatcagggtttttctactccagcccactggccatggtcgaccacgtggtggaaacaaacaaacccacggcgtgacctggtaaaagctggcgcgttaatactggcggaaattgagcgtctcgaccgcgccactggcatcaagtgggaggctgagtag

SEQ ID NO: 206763 - DNA, 216 bp, Klebsiella oxytoca
atgccagaaatcatcgatcaggccaacgaattggaagaactgcagcgcgaagctgcgatagcaagacatcgcatcaactatgcggctgtatcggccactcactgctgtgattgcggtgacgagataccacagcgtcgccgggaactggtggctggctgccagcgctgcgctgattgtcaggaagagtttgaagaacgtgggaagcatcggaggtga

SEQ ID NO: 206764 - DNA, 501 bp, Klebsiella oxytoca
atgcgttatcgagttgttgctctgaccttatgccttctttctggtagcaaagttgcattatctgcgggatttgattgttccattgaaaatctatcaccgacagaaaaaacgatatgtagcaatgagtatttatcaggacttgacagtgctcttaacaaatttttcaaaaagacttatgacagttctttaagccatggacgtttggctgaacgtcaaaatgaatggctaaaagaaaggaacagttgtcagggtgatttaacctgtattactgacagctatttaattcgtaataaaaaccttgcagccagcaacaacctacaaaatataaatgatattttcaaccgcgaaggcgacaagctggatgaggaactggaagctccaattaagaccaagtccggatttacaatcaccgactcaccatggcttgtgaaaaaatattttcatctgatagctttgaaggcggaattaatctggaaggcatgtatgtatcgtcagtgctaa

SEQ ID NO: 206765 - DNA, 381 bp, Klebsiella oxytoca
atgcagcttatcttcgtcagttcggagtccacgttcacctattttgaagccacccggggatatctggagcgctacggtaagtctctggcattctacagcgacaaagccagcgtcttcaggatcaacaacaagcaggccaccggcggagatggccagactcagtttggtcgtgccatgaacgagctgaatatcactggtatctgtgccaacaccagttcagccaaggggcgtgttgaacgggctcatctgacattacaggaccgcctggtcaaggaactgcggctccgcggtattagcacacctgaggctgcaaacgcctttgctgatgagttcatggaagattacaaccgtcggtttgcaaagccgccacgagtacgataa

SEQ ID NO: 206766 - DNA, 321 bp, Klebsiella oxytoca
atgacggcatacggaacggagtttttctcgatgaacgatgtaaaccgactcaagatcctgcaggacgttatcgaccggcgtcttaccacgcatcttgcagcaacccgacttgagatctctgacaggcactgccgccggctactcgagcgctatcgtgaacacggaccgctatcactggttaaccgccgacgtggtcagcctggtaaccgacagttgatgcctggcctcgctgagcgtgcgctgcgcatcattcgcgaacgttacgccgactttggcccgacattagcctgcgagaagcttgctgagattcatgacctttag

SEQ ID NO: 206767 - DNA, 264 bp, Klebsiella oxytoca
atgaccgaaaaccagaaagtctttctgggggccggagcgccatcttcagtaaaggcttgcggtccatatgatggcatgctggctttaggcgcgactgttctggcacagggcagcgtcctgtggttcaagcatgacgtccagactcgtcttaagaagatgacactcattcctagaggtcaaggagcgcagaaaaaatacgaggcgatgccaagaggacaatggtcggtgatcagcgggtttttacgcgatcgtaatattcaatga

SEQ ID NO: 206768 - DNA, 279 bp, Klebsiella oxytoca
atgcacaatgcaaatgagaaccttggtgaaaaactggcatccaagctacgcgcacgcctttccgatatcgccgtggcggacaacatattagcgttgcccgtcggttcgccggaggtatactttgaggaaggggaagagtgtattacaattacccttttcggtgataaaaaaatgggatttgtttgtgggaatacggttcagcccaaaaatcaggacaatacgattgactggtcccaggtcagccggatacggttagtgttcataggtgatgtgaaatga

SEQ ID NO: 206769 - DNA, 1083 bp, Klebsiella oxytoca
atgatggtaacgcaggacttccagcctgactgggtatctccacccggtgatacgattatagatctgatggatgaacacgggatttctgatgaggagctgagtaagaagataggtttgtcccttgatcggggtcagcaacttcttgaagggaaactccgactgaatccgtccctggccgacaaactcgaagatctgttcagcgtatcgacggatttctggattaggcgcgaagatgcttatcgccagcaaatagaacatatccagaaagtgaacagcgactggctggaatcattgcccgtacgagatatgatggagtttggctggatcccgaaaaccacaacgcgggaaagtaaattccagcactgtctgtcgttcttcggtatacactccgtgagtgagttttttcacaaaatacattctgatgctccactggtcgcctttcgtaaatcactgaatctgacgactgagcctgtcgccgatctggtatggctgacccgggcagaacagctgagtgcaaaacaggtctgcgcagaatggaataaaaaggcgctgcaggcgcttttgccggaacttcggagagcaacaaacgaacctgatatgggtatttttatcccccatattcgccggcttctcgcgactgctggggtttcgctaatcgtgctgccaacgcccaggggatgtcgggccagtggtgccacctgctttttcactccagaccgcgccacgcttgtcatgagtttccgctatctcaccgatgaccatttctggtttacgttgtttcatgagatcgggcatctcattctgcatgaggcagtgcgggtccgtgcggaaggtaaagaaggcctgacgacagaagaggaaaaagaagccgatacgtttgcggtagacgtcctcattccggaagaatacaggcagcaactcaggagctatggtgttcgccactggagggacatcgtccgcacagccaggaaaatgggtgtatcaaaagggattgtactcgggtacttacaacatgagggcaacattcctttttctcaccttaaccggcttaaggtgagattcagtaaagaagatattgtataa

SEQ ID NO: 206770 - DNA, 945 bp, Klebsiella oxytoca
atgaacagacacagtcaggccagccagttggtcgccgctcttcaaaacttcagtcgcgatgaacatcccctgaacggactaagttctccggctcactataatgtattagcctttcagattatcgacagtattcgccgcattcgctatatggcaactctgacatcacgaaccgattatatggatccgctaagaaaagagccaaactcagatttatttgatcctcttcgtgctgcgtgtttgcatctgcgtgacaacaactatgacgaagcctgctggctggttttcctagccacgcattttggccggagtaataaaactggctgggttttgtgccgcgatatttacagtggactgggtacccagacgtggacatgggatgccataacggatgactttgatgcttttgaacattggtttgccagcgtttctgatgagctgactctacacagcagtctcaggcagtatggtaaccaccgcaaatatgaaacgaaaaaatatcattcacgtcgttctatacctatcgtttttcgttcttatctcggattcatcggtgcgacatacagccacgaggcccggtttgcagaagcaaggagtctcgcggctacacctgctactcttttcgaattgctatattcaggcctgaatgcggtggtttcattcggacgaaccgcccgatttgattatctgactatgctaagaaaaaccgggctcatcgaggcagaaccggggcatgcttttttgaagggagctaccggccctctccagggaagtcggctactgttcagtaacagccggagcgccggtgacagactagagactctgaatgataaactggcagagcttgccgaaattatccctgcaccttatctcaggatgcaggtcattgaagacgcgctgtgtaactggcagaagtcacctgatcgctacgtctattttggcggatga

SEQ ID NO: 206771 - DNA, 978 bp, Klebsiella oxytoca
atgactcttctggtgacggctgaatgtgttgacgatctgttaaaagatgtccatcaggcgatcctgactgacggactctggaatactcccactaaaggagcaaatattgagattctgggagcctacctgattctcaccgatcctcgccgcagaataagcaggacagaatcccgcggtaaaattatcagctgtctgggggaattgctgtggtacctctcagcacggaacgatctcgatttcatccagcacttcatacctcgctacgtaaaatacgctgaatccgacggcagaatacatgggggatatggtccgagattatttagtatgcacgggctgtataatcagctggaaaatgtcatcagtctgctgcaggagaaaagaaccactcgacgcgcactgatacaactgtttgatgcctcagatctggttacggataatccagaacagacagaatatgccgatattccgtgcacgatatcgttgcaatttattgtcagacaagacgcactgcatctttttgtctgtatgcgctctaacgatgcctttatgggcttaccccatgatgtgttcgccttcacgatgttacaggaactggtcgcccgcctcaccgggtgcaaactggggcattatcatcacttcgtctcaagcctccatatctataaagaacattttgaacaagtaaaagcgctacagcaagaaggctttatgagtaccttgccggtgatgggtgatatgcctgaaattcaatccttaaaggacattacagtcatccttgaagcagaaaaggctctgcgggagaacaaggaacttgatatcgataccatgcccctaagtgactactggaaggatttgctgcgcgtgataaagacccattttttgttgcgttcacatacgtcggcacacgatgagctggcccgccgggagctgactgcactgaataatcaggaataccgatttatttttgacgggaaaatataa

SEQ ID NO: 206772 - DNA, 1098 bp, Klebsiella oxytoca
atgcttaagcctatccaccgcgtcacgtgttctcctgcgttggtcgcatgccagcggttgatgcaacgttttgcactgtggttgtgtgctcctgccaccacaggacctcacatcagtcagcaagggttacagccacctgtactggctagcaccattgaggcgaattggttgtgggactttctccagcgagttgaagccggtcaatcgctattgaattgtgcacaaacgattgcagccatgccttcggcccagaagacggcgttgagggcttggatacagacagtctctgctcttgcaactcagtttcaacctagaccaactctgtggccaatcaattgtcctgtaaatagcacttctgattggaaggcattcaaaacattgatggaagccttttacgaaaaaggatttcgtagtggcttgccataccagccaaatggcacccccaccgctgttaatggcgttaaatacgctgactatgtggaagctttccgcaatgcgcatcgtctgaacccagttccagatgctcgagaggtttgcgtgctatgcggtggcccgcttggcgacacacctcacgttgaccattggattattaagagcaagtttccgctattgagcgtatgtgctgaaaacctcacgctgatatgcagtacctgcaacgaagctccaaacaaaggggacaaacctgtgcattccaacggcagctttgccgattggtttcacccatacttgcgtccaagcaatggcacggtacgcctagagtacgtgctggctgatctgtctgtgcagtgctcgtccgtcacccctgcagatcagcccaaatcagccaaactcgacgagctgctcaacctgagcactcggtggacgcgggagtttaaagcggaatatgccaagcatcaggatgtacttaggcgtagagaacagcgccggctccaaaatgcacaggcgcggcatagcgtggccgatattcagtcctacgtacagcaatggcaggcagatctggtgcatagcgaacctcatcatgaagtgcatcagactttggctcttgcattgcaggaaccttctcgcctggcagcgtggcacagcgagttgggtctctag

SEQ ID NO: 206773 - DNA, 1764 bp, Klebsiella oxytoca
atgcgtcttcgttacttacgtctgcaaaactacccgcccatctctgacatcaaggtgtgtttcgccagcggttcgccgctggcgcgcgagtgtgccattcgtttcgtcgtcggtgtgaatggcagtggtaagtccaaccttctgcgagctgtcgccgaggttttcttggcattagcagatggacagcgaacccttttccctgtgcaattggtatatgaacttgggagacgcggcgcacctaacgcgcgaacattgatcgtggattggctcggagatcgtcagtccgcgagcctgtggattgccgacaaattttccttcccagacaacctgacggcggatcaattcgagcaaatgcttgcgcatttttcagccgaatccagcgatattccttcggaatttcgacctcttgtgcacaaaggtgaatggcccacaggatcggtgacaccacacagcattgccttaccttccgccgttctggcctacaccaccggagatttgcgcccttggcgttctgtatggaatcgcaatcagcgcgcagaaggtatacttgatagcaatgataatgcccaaagtgacgaacgccccgcaggctggaccgccgctcaggaaaatgcctttcaagcagtgcaacagtcgtgggggaatacccaacggcagccacagaatgcaaaccttggcgagatggatagcttccgccgcccggttttgcttgacgccacattgctgaaatgtgcgctgctggctgtggctttgccacaggccttggttgaaacaaaagaccagtcagggcgagctgataacaaaaattctttgcaaaagctgctggagcggggggggtggcaccacttggtttctatcgcattccgttcgcgtttacaagcgactcaatgggatcagaaactgtgtgaaactgcccatgattggtggttgtgtgccagtgaagttgtcgcagagccgcatcctgcggaacctcgtcgtatcctgtggttcgatttcaaaggccccttcaacgcacaaggcatctcgtttttgtcacccgcccgcgatgagttgcaaacctgcaccagccagggcgaagcgctttgggcgttactcggcggcgccaaggacgtgagcagctttgagcttttcacccgtttgttggagctgaatcaggcaggtatgtttgatgatgtgctgttgcgcttgcgccgaacacccgcacctgacgaaggcaccgactccaattcggttgacattggcatactgcgctacgaggagctttcagacggtgagcaaatggtgttgggtcgcatggcgctgttccacctgctggaaggccagcaggacgccttactactactcgatgagcccgaaacccatttcaatgacaaatggaagcgtgagattgttgacatcatcgacgatgcgattggcaagaccagtaacgatgtattgatttccacccattccgccatcgtgctttcggatgtgttcaacaacgaaatagtgatggtacaaaaaacggcggatggctccaccgtgcgcaacgtggacgaaccgacgttcgctaccgaccccagcgcgttgatgatgactgtgtttggtgctgatgacagcattggcaaacgcgcccaggagtttatcgaagacaagctacagcaagccaccggcacacccgaagacatcgccgatctggagcgtctgatcgcccgtatgggttcgggcttttatcgcagtgaattgcgtaccctgttgaatacctggcggggtcgtaatgcttaa

SEQ ID NO: 206774 - DNA, 1935 bp, Klebsiella oxytoca
atgaattggccgcaagccccactatctccatcgctcgcaaaagttgttaggggtgtaacgttttcccaagccgatgcctccagcgatccatttgacaatggcgtaccagtattgagagctgggaatattcaggagcgactaattactgaagccgacttggtctgggtcaaccgtaaatttgttagcaaagagcagttcttgcaacgcaatgacattgtcgtttgcacctcctcgggtagcgcttcgttagtcggtaagtctgcaattctgaaccatagctttgaaggcacttggggagcttttaatgcggttgttcggtgtaatcccgatgtgttgatgcctgaatacatggcgtattggctttcgtccgcagcgttccgttcttggaaagatcgccaggtgcaaggcgcaaatattcaaaacatcaagcagtcttctcttgaatcaattcgagttccactcccctctctccccgaacaacagcgcatcgtcgatgtactgcaacaggcggaggtagcatacgattgtcaatcgcgacgtcagcaccttgattggatgatcaagtcagctcttgaccacttggtactccctcgcgacaagtcggagtgggtacaacttggatgtctcgtcgaaacccgatatggtacatcaatttcagctgacgccacggctgacacaggcgtggcagttcttcgaatcccaaatgttatgggaggtgaagttgataccgacgacttaaagtatgtcaatctgacgcaagctgagctaaagcgcctgaacttgacgtcttcggatgtattaattgttcgctctaacggcaatcctgactatgttgggagatcggcccccatcaccgcagacgttgccaaatctgatatggtctatgcatcgtacctgattcgcttacgaacagacatgacgcgtttgttgccggaatatctaagtgcatttttaaacagcgcttatggtcgtgcagcgatgcgaaatgctattcgtacaacagctggtcagagtaacctgaacggcgagaatttgacaaaggttcagttgccgataccttccattgaagagcaggtccgtttccgtgatatatggttacaggttcgggagcttcgcagactcatttctaaatcggaaaaaatagcagctgaattgtgtgatgtattgagcattgcagcaatgtctggcgagttgaccgcagattggagacggaatcatgccgatgaaatcgctgaggcatcacacgcgcgcgataccttgcttcgcgagcgaggcactaagatcgcgttaagtaccaatgcagtcgtcacttcctcagtacaaaccgattccaccacccacaccgagcgccaatggttgctcagcgagatcagtgagttccagcgccaagtgttggcggccttcacagattattgccaggagaatggccaacccttgctggtagaagatccggaggtcttttctcgattttgtgatgacgcggctgcgacggaacgtttacaagcctttggccagtcgcacggcaatcgcatccgccgctccttgagccaattggcttcactgggcttgatcgccaaaatcaccttgcccaagcaagacctggaaagcggcgagctagattaccttaaagccttccgccccttacgcccggaagagttcacacgtatggcagatgtgcagactctgcgtaaaacgttgacgtccggtgttgaccagcagcactaccattttgaagtccagctggactacgagacctctgcacacgctggagcaagcggaatgttccaagttttcgccgttgaagatgaagacggacaagacttcactcacttggtggacttgggcaagcattacgcctcgctcgatgagctgaaagaagacatcgccagcgcgctcaaggtagaggcgcggcaagttgatttggagtctgtctaa

SEQ ID NO: 206775 - DNA, 2460 bp, Klebsiella oxytoca
atgcttgcacctcatatcaagaaaaaagttgacgaactttggaaccgcttttgggcagctggcctcaccaaccccttggtggcagttgagcaaatcacctatctgcttttccttaaacgtctggaagacatcgatctcaagcgccagcaacgaggcttttcctccatttatgtgggttacgaatcctgtaagtggagttacatccgtcaagaaaagaccaatcccggccatttgattgacgtggttttcccgtggttacgggagctcgataaacacttcagcagcgccagcgccgacggtacagagctatccagcctcaataaccgcatggctgatgcctacttccagctagaccccaacaaaggcaaggtgctgagcgacgcgattgatgccatcgatcaactcttcgccagagcgggtgaaggctcagccgcccaagacatcatgggcgacacctttgagtacctgcttagcgaagtagccacggcaggtaagaacggccagttccgtacaccgcgacatttgatccgtttcatggttgagctactcgaccctgagccaggccaaagcgtcatagatcccgccgccggtacaggtggttttctgtttagcactcagcagtacttaatgcgtaaattctccgcgcaagacaatctcgtgttggaatgggacggcaccccgcatcgcaccgatggcgccgccgctacaccagagcaatatgacgccatccacaacggcgcctattttgtcggcctcgataacgaccgtaccatggcccgcatcggctggatgaacctagtgctgcatgacgtgatcgacccgcacttgctgcagggcgactcccttagcaaacgtgaaggaaaagccaggcttaaagaactgcttgagcccggcagctaccaattcgtgctggccaacccaccctttaccggaacagtcgacagcggcgatctggagcctgacaccgtactattcccacgcgtgggcggtggcggtaagaaaaaggatgaatcaatcaccaacaagagcgaactgctctttctgtggttgatgctcgacttactcgatattggtgggcgctgtgcggtgatcatccccgagggtgttttgttcggcaataccgatgcccacgtgcgtttacgccgcgagctgctggtcgagcatatggtggaaggggtaatttcccttcccggcggcgtttttcagccctacaccggcgtcaagacctcgatcctgatcttcagaaaagtcactcggcgcgacaacaagcaaagcctgcccagcaatgcagcgccactgaccgaacacgtttggttctatgaggtagaggaagacggttactcaaaagatgccaagcgcaatccacgcccaggccaacaaaacgacctatgggatgcactcatcaaattcaaagcctggatcgagcacggtcgcagtggcgcgcaaagccatgaaaagactttgctgcaacccagttttcacaccgaacgctggcgccaggccctgctgcgtgacactgccgacaaactcacacccgcaggtgaagctttctcgaccttgcccgacaccagtatgtgggacggtcaggtatggggcatacacgagctgtttcccgagcttcctgctgatccaaaagaagcagaagacctggtgcgcaacgaagccagccggacactctacgatttggtgatccagttcttcgcagcccccacccagcctatatggatcaagtggaaagataaggccactgctgccaaacaaatggatagcgacaaggcgctggcggaatggaaaagagccatcaaagtaccgcaacaagaattcaaccgtgccgtacgcgatgtgcaacgcttttttgaagcggaagatgggcccgcgctactgctgtggaaagacatggtcaaggatgcgctcaaagccggcttgtcctaccaccagcaggcagtcatacaagcgcccacggaacagctcagcacctatgagccggtggccgacctgaacgctgctctggaaggcatcgctcgcgaagtagccaagctcgacggctttgacgtaaccctacgtagcctagctattgatcaagctaccgagctcaaagctgccaagcattgggtcgtcccagtgcgggcttgggcgcgtaacgacgagtggcaaagtgcagacggccagctcgtaggttcacacaacgcagatggattagtgcggccttcttatgtggaagcgatgctggccgatgggctctataccgaaaaaggtgtactgaaagatggcttgctagactcggactgcatcgaggctcgggactggaacctctccgctggccagtacaagccattcgacttcacacaacttaagagcgacaaaagcgtggccgaattgattggtgcgcttaaaactaccgagcaagagattatcaaaggcttggacaaattgctggcgatggtggaggggcgggaatga

SEQ ID NO: 206776 - DNA, 2730 bp, Klebsiella oxytoca
atgacttcaaaccgtgacgaagcacagactcgcaccgagattattgattcgcagctctctcgctctggctggtcacgaagtcgacgtacccttatggaggaatttctgctcaaaacggcggagcccgagattaccgataaggactaccaatttgcggattacattttgctcggctcagacggcaaaccaattgctgtagtcgaggctaaacgatcatctcgcgatgaactcgcaggaaagcgccaggctgcagattacgcggatgcgatcaaaacccaatttggcagcgacccgtttattttcctcaccaatggcaaagaaattcaattttgggatcgtgctcgttacgcccctcgcaagatctccggtttttatacccgagatgatttggagcgcctacgacaccagcgtcagttcgccgagcccgtgggcaatgtaactatcaatgctgacatagccggacgcgactatcaaaacgaggctattcgtcgcgtcactgaaggcgtagatgccgccaggcgcaagttcctattggtgatggcgactggtacgggcaaaacgcgaacgaccattgccctagttgataccttgctgcgctccaagcgcgtgcagcgagtgttgttcctggcagaccgacgggaattggtgcgtcaggctatgtcggagttcaaatcatatctgcccaatgaaagcctggctcgcatcgaatctggcgaaacttctggagctcgcatccagttttccacctacccaagcatgatgcaggtgtattcgcgcctgtcagtcggttattacgacctgatcgtagccgatgaaagtcaccgctccatctaccagcgctacaaggctatttttgatcattttgatgcgatacagctcgggctaaccgcaaccccaaccgattacatcgaccataacacatttgaactattcgattgtggcgacggagttcccagctattactacagttacgaacaggccatcgctgatcagaacctagtgaattaccgtgtgcttgacgcacaaaccaactttcagcttcaaggtattcagggggacgcactacccgggcccttgaagcaaatggcacgtgatcaaggcgtagatcttgatgagctcaatttcgatggcagcgacatcgaaaaaggcatcatcaatcaaggaaccaacgatgccatggtgaaagagtttatggacaaaagccgcaaagatgttcgcggcctgccgcacaagtctatcatcttcgccgtcagtcacgctcatgccaaaaggctttacgaaggctttaatcgcctatatccagaactgcaacgcctgggcatggccgaaatcatcgacagccacatggagcgtgctgacgccacgttggacgatttcaaataccgtaccatgccgcgtgtggtcatctcggtggatatgcttgataccggagtggacgttccagctattcaaaatttggtctttgccaagcctgtatttagtaaggtcaagttctggcagatgatcgggcgtggcacacgactacatatcgacaaggcaacaggcgaaatcaagaaggattttctgatcattgatcactggaaaaacttcgcctacttcaagctcaaacccgatggcgaagtggagtatccgagtgagccgctgccagtgcgtctgttccgcctacggttggaaaagtggctgcttctgcactcccagcagcaagatacacaaacaactatcgccgctttgctggccatgctggatgctttacctcggcacagcatcaacgtgcggccgcattgggatgatctcgacacgctggtgcggcaatggccagagccaagccaaagcgcactggagcatctatccaggaccatcgcgccattgatgcgctttgcactgtcggtatgcttggaagaattgcagttccgcatctggtgtgagcgtcttactgtggcctgtcttaagggcgatgctctcgaacaaaccaaagtgcaggaacgcatccaagaggctgtgagcagcttagccgacaacatccccgaagtgcaacgtgtggctgaacaacgagtttgggtgcaatctgctggtttttggcagcacctaaatacggcacgtctgagcacgctgcaatccgtgttctcacctttgatgcgctatcgcacatctataccaagccgcacggtcgaaatcaatctaccggacagcattacgcaacgtagctggataatttatggccctaccggagaaggagcttttgcggaaagctatcgtgagcaagtagaagcgttggtacgccggctggcgggccagctaccagaattagccaaactcaaacaaggagagcatctggatgacgaggaattggaccaagtcagcaaaacattgaaccaagctgatctgttcgttaccgaagacaccttgcgcaaagcttttgaagccccagttgcatctctggctgattttttacgccacatactttgtgaaggtgcgcatctgcctaaccgcgagcagcgcatcaatgccgcttttgaagcattcattgccgctcacggctatttgcgtgccaatcaacttaacttcctacgcgctgtaaaggccgcggtgctgcgccacgggtgcattacccgtacagcactcggcgaaccaccgctctcgcgcgtgggccgagtggaaacgctatttccgccgcaggatatcgacgaacttatcaacctcgccaaccaactgttggacgacgtagcctga

SEQ ID NO: 206777 - DNA, 249 bp, Klebsiella oxytoca
atgattttaaacgactctagtcttttttggaagggtgccactgttatgaccgccgaaccctgggtcaccgccctcgacgttgcccaacacttgggtgttgtcaaagatactgtctaccgctggcgcgaacgccagggactacccgcccataaaattggccggctgtggaagtttcagctgtctgaagtggacgaatgggtgcgggctggtggggcgtgtgagcctgctgagggaggtagcacagaatga

SEQ ID NO: 206778 - DNA, 1023 bp, Klebsiella oxytoca
atgaatttatctaattttatttcttcagcatcacctagcgatattgaaattgaacaaggcattttaggggttggtattcatacatcagtactgagttttaatgaggctttcattcaggatggcaaatgttttcttgatgatttcattgcggaaaattcaaacgttaaaaaatggatgctatcttcagactatgcattctatggtcaaaacaaaaaaaatgatgttgtgacattctctttattcccacaccttgtgaattttaaacggatggtagagtgcattgaattaatggcacctacagatattaaacatgcgagaacagtcagcgacgaatttatttcctttctaaaagaaggccctgtttttaatatttcaattattcttgaacgcgggaggagaatgtatagtgatgaggtgggttatttttcatacagattagagtctatgattctatattttaaaaatctttgcgaactctatcctgagaacaaagagtattatgaaagtaggttgttaaaaataaaacaagcaaagaacactctcaataataaaagcactaacttaaagctgtttagagatattgaaatagtagcaagcttagccgcctatattctcgcggaagtaagatttacagcgaacccagagattataacctggctttcagatcgtgacagtatgttaacttatcgaaataaatctattggggattttatgtttgaatgtgtgaacgatatatacaatatgttctgtctaagtaatatggtagagccttatgggagaactgcatttgttaagccggaggtagagggtgaactattctacgacagtcttgttcgtgtgccagaccatattgcaggggccctctctgattttgattttgaaacacaaaaaacaactcatgctaaatttgaaaaaataagaaatggaacatttcatgaggaaaaaagaaatctttcatatgaacttttttttcacccaaaatttgaagctcaaaggattaaatgggggccagaattggaataa

SEQ ID NO: 206779 - DNA, 192 bp, Klebsiella oxytoca
atgttaaaacagaagaaaatcgaggcggcaattgaagaactgtcacgtctgcaggggcatgagctgaatgccgccgatatgcttgagttacgttgctgggttgcgtgcacgctggcagcaaaagaacggcaccgccggcggatgaccgcccctactttcctgtggaaaaagcccacttcgttgcgcagatga

SEQ ID NO: 206780 - DNA, 351 bp, Klebsiella oxytoca
atgcgtaagataagttcagtcactgataccgctgataataagggggaatttacccaaggtaatgtcgctcaaggtattccaccgacaatccttgttgcagatatttttaatacctggcagcgtgagctggtgggtgtggttgagggctctggccgccagcttgagcctgaaaatgatggtcagttaaaagaggttatcgatgagttgaggatcactgcccttctatctgggcccgtcgtaggtgcccttacttctcagggttactgcatcattcctaccagaacgccatcaggtgaaaagaaaaatattattgttcaaatgggaacagccacaattaatgcgtcatcatga

SEQ ID NO: 206781 - DNA, 465 bp, Klebsiella oxytoca
atgacgttgaataaaaataccagttcaacctttaacgttaaacttctggagaaaataccagaggtattaggtaagtcatcggatcatttcttaattgatcatgttcataccaataaagacggcactaaggaaacccaaaaaacatttgagcttcctgcacgtgaaaccttcctgatggccatgagcatgagttatgaacttcaggcggcaacatatgacttcatgaaagaactcgatcgccaacaaggagggctcctgaggtattccatagaagatttgaataatttagtttcagagaccagacaaaacccagacaagcatttaactaatacgagcgatggcctgaagaattatcaggataccttagccttgctggagcgagctgaatatatggtaggcatgcttaccaggttatggcttggttggttgaaggatgaggcgaaagctaattctccatcaatttga

SEQ ID NO: 206782 - DNA, 300 bp, Klebsiella oxytoca
atgagaaacaaaaataccggacttaatgccgggggcttcactcatcctgagatcctcccgggcgatatttacaaggataaacggggtgaacgtgtaacggttttatctgcgacgccaaaccgaatttgttttattcgtgacggatactcaggggaatgtgcatttcctgcggttcgttttctgagggagtttacggcagtgaagcggcagacaatcgccgaatggtgcgataccaacaacacagcagaaaagataaagaaaattcgcgcgttgattgctgctaagagagtcgagaaatga

SEQ ID NO: 206783 - DNA, 201 bp, Klebsiella oxytoca
atgcgtagtcagatacctatgctcaatgtggatctccacgtctcccccgacttttctggccgcatcatgctttatgtggtcgatgggattgttaaatgcgaaatgcgattacatgaggatgaaattatcggtacgccgtctctgttcaatcacctgctcgagcgtgccggatatcatgtaataaccgccaaaaaggattaa

SEQ ID NO: 206784 - DNA, 240 bp, Klebsiella oxytoca
atgaatagaaaatatctatttattttcatcgttggtgagaagccctcttctacatctcgttgccgcgtggaagtggtttatgcagataacaagcgttatgcatggcgagaagttacgagaaagatcccaaaaggcgtaagtatccgtctgtgcgccaacatacgtttgaaagatgttccttatgagttttaccaggatgggttaactttttcacttagctgggggaaattccatgcgtag

SEQ ID NO: 206785 - DNA, 228 bp, Klebsiella oxytoca
atgaatactgaatattttaatggcctgaaggcgggttttaagggcgtacccctggatgctgaaagcgccatattccatgtggtcgatatgataaatgctgcatcttttttgcttcgaacggcaggacggcatgaaaccggaatgattctgctggagattgcagaggaatatgcgtcgctggtggcggagaacatcaatcgcggagatacggaggcgcatgatgaatag

SEQ ID NO: 206786 - DNA, 1059 bp, Klebsiella oxytoca
atgacacataaaacaaaggcagctttacagagctgccaatgtcactaccaaaaactcaagcaaaataagaataccagggttaatgttggtggtcaaatcctagacagagcacaaaaatacgagttatctcgtaatcaaagagttaaaaagcttatcatatcgaaaaagcaacattcgttacttgatacggtttttcttaataaattcaattcctttgatgagtctttcctcgtttataaaatcagtgcgatttatggaaaaaggcccaatacgttcatcactatttttggagagataaatacaaaaggaaatcggatcaccttcattcgtatttccatcgtcaatcacttcaagtggaaggtaataagctttaataatttcaatcgcttgaacacgggtaatcttaatcattttatcatttactccgttgtagatttttttggcaacttgcgttggcgtcgtttgatctcgcctttgattgaggcgacaacaaaaccggcggtgctttcaccttcctctttaactttttcaagttcatcaatcaagtctaatggtactcgtgagactatttgttgtgatttgttgtttcttgaacctgttgccatgactgtgttttcctttgattggtggcattcagtatatgcaaaaataaaacacaatcaatacttgaaagtggcattcactttgttctatgttaagtgcatgccacctgttatggtgaagcataaatggcaacgccccggagtgcttggaaccactgccgaggcgtctaaccacaaaccgttagttgaggtaacagttatggctggatcacagcatacccaaactcaccccaaatttacatggttgttccttgcgacacccaaaaatcatcctgagtgtttacctgtgctccttcgcttcagttctgacactgaagacggtgcccgccaggcatttccgggctgggaactaatttttgccgcgaaaatccgcactgaatccccctgcaagtttgctttctacgattatgaagtcggaatgggtctggcgttcgactgccgcgaggtgcgctcatga

SEQ ID NO: 206787 - DNA, 207 bp, Klebsiella oxytoca
atgcatttagccaaaatcgacaattcaaaaaaacttactcgcagtgaagctgctgagcacttgggtgtgaacgcacagacgctggcgaactgggctcatacagggcgggtaaaaatcccatttcataaagtcggacgcaaggtcatttacttcaaatctgatcttgatgcttatctggattccacgcgtagaactcaaacggcttga

SEQ ID NO: 206788 - DNA, 684 bp, Klebsiella oxytoca
atgagcctggaaaaatatttggattctgaacgattaaattttgttaatatttttatgaaatttgccaggaattttggagatctacaatttaactataatagggatttcggtaatgaactaaaaaaagatattaaccagacttctcgtgggagtttgaggtttattttacaaaaaatgcgcaaagataagccgtcaaaagatgatgctgagtttgaagataaaacactggctaaagtatttttagtattggagtctcatgatttttcttcattagcggaagatatggctttagttattgaaagaagaaatataagagaacgttctcaagacattatttataaagaaattgcagagggttcagcatttaagcagcgtagtatcgcggcatctggtccacggcatcgtctatatgatgaaattgtggcaattatgaaatctacctggagacataatccggcactctccaaaagaaaaatgatctcaaaattattgatacgttatgaagataaagtggatgaaaaaacgctaaaagattggataacaaaagggaaactggctccaccaagacctataaagaacaaaaattcagatctggttatcccacctgaatatgctagcaaaaaaatatttgaaggagggggaacagtagcttctcacccccataatcacctactcaccttatag

SEQ ID NO: 206789 - DNA, 1437 bp, Klebsiella oxytoca
atgactgaaaaaacgttcagatttaccaaatcgaaaatcgaggggttgcctccggcgctcaaaggttgccgggtggaataccgtgattctgaggtgcaggggcttatcctgcgcgttactgctggtggcgtgaagacgttcagtgtttcgcgtaaaaagcacggcgagcactttcgggtgacgctggggcgattcccggatctaagcgtcgaaaatgccagaacgatggccgtaaggtctctgggtgaaatgagcatgacccggaagaacccaaatgacctgcggaagcaggacgaaaaacgcctgataacgttgcaggatgctttcgaagagcgcctgaaggtgagggggcaccggattagccagaccacagcggatcaataccgagggttactcaccaattattccggtgactggatgaatcagccaatgctgcatatcacccgtgaacgagtcgagaagcgtcacaaagctatttcggaaggaacagtgtggtttggggaggatcgctcaaagtttcgtgctggtgtagggacgggaagcaaatcacaggccgacgcctggggtcgagctatccgggctgtattccgttttgcatgggaccattatcgggacgatgagggccgcagtctgttacctgagccgccgactatggtgctcagcacgaaaggccactggcacgggctggtgcgtaaaacggagcgtgtcaggaataccgatctggggcgctggtttgcagctattgagcaggtacgcctgcaagccgctgaaaatcgtgatgacttcgcacaagccgcctgtgacgctatctatatggcgatgtttacggggctgcgtaagtctgaaatccttcagcttgagtggagtcgggttaatattccggccctttacttttggatcgataagacgaagaacggcgatccgctggaacttccaatcattccttcgttattgaaaatgttccgccgcaggctatcactccgaaaaggtgatgagccgtatgtattccccgggaaggatggcggtgttatcggtgagtctagaaaggttataaatcggattgtggctgcgactgttcctgtccctaatcctgatgctttgccgccagttagtttcaaataccacgatgctcgccgcacgttcggatccgctgcggctcttgctggtttggggcatgacctgattaagcgcctgttgaaccatagaacgctacgtagcgccgatgtaacggaagggtatttgcattttggtgctgatgaattgcaggaacacgctgagaaagtagagcgttatttgttagaaaaggcagggctggttgagagtaaaaaggctattgatgcacagctgctggccgtcatgaaatctatgagtgatgaagaaaagcgcaggatgctttttgatcttctcaattcacataatagtgaggcaaaatcatga

SEQ ID NO: 206790 - DNA, 561 bp, Klebsiella oxytoca
atgaaaaaagcatttatgttaaaaagcgttgttctggcaatggttatggctggcggtatctcttctgcaatggctgcgaccagtgggtcttccaccactgttactggtggcactgtcgaatttaagggtaccgttgttgatgcggcctgttctgtaacgcaaaaaacggcggaccaaactgtctacttggatcaggttcgtaccgaagcctttgccggtaaaggcaccgtcgccaaccagaaacagtcatttgaaattgatttagctaattgtgacacccaggtggcttctcaggcacagattacctttgaaggtaatgctgctgcaggcgaaacttccgtgctggacaacaccgctggtgcgggtaatgcagtaggcgtgggcatccagatttttgacagagacggctctgcgttggacctgggtaaagcttctcaggccttaacgctgattgacggcaccaacgcgatgaaattctccgctgactactaccagactgccgacactcttactccgggtagcgttgacaccaccgcaaccttcaacgtgacttaccagtaa

SEQ ID NO: 206791 - DNA, 345 bp, Klebsiella oxytoca
atgcaaaccgtcatgaaaaatgagtcaaatccaggctatacacctttccaactgaactcccaacaaattctggattttagggctaacggatggatgaagctggaaaacgttatttcggctgaaacagtgcagatgttgctgaatgaggccaggacaaggatgggtgaagtcgcacgcacagtagaccgtaacgacccgggcaaacagattgagaatgcctaccgctggtatgcgcgctgggatgaagtctccagcacttgttcgcagataaaggcgctcagccactctccccggctggccagtattgcctcacaactggtgggggaagatgtgcgtttttattaa

SEQ ID NO: 206792 - DNA, 165 bp, Klebsiella oxytoca
atgagccatcaggagcgcaatagcgttcgggcagcatacatccacaaggcggagcatctggaagcccgcaaggcgatgatgcagtggtggtcagattatctggacagatgcagagaggaattcgtgccatcctatattttgggccatcagcagtccaaagtctga

SEQ ID NO: 206793 - DNA, 930 bp, Klebsiella oxytoca
atgctcgcttatctcattcctcagaatgatgagagagccagcagcacgaaccacttcatggacattgacaggaaaatagcgacatcaatgaatacaaaacactctagcgtggcggagcagcacgctgccaaacgccactggctgaactcccaggagtcgggctaccacaaggcgatgggcaaccgtcaggtgcagatgattgccatcggcggcgcgattggtaccggcctgttcctcggcgcgggcgcgcgcctgcagatggccggaccggccctggcgctggtttatctggtctgcggcctcttctcgttctttatcttacgcgcgctgggcgagctggtgcttcatcgcccctccagcggcagcttcgtctcctatgcccgcgagttcctcggcgaaaaagcggcttacgttgcgggctggatgtactttatcaactgggcgatgaccgggatcgtcgatatcaccgccgtcgcgctgtatatgcactactggggcgcgtttggcgacgttccgcagtgggtcttcgccctcggcgcgctggcgattgtcggcaccatgaacatgatcggcgtgaaatggttcgccgagatggagttctggttcgcgctggtgaaagttctggcgatcgtcgcgtttctggtggtcgggactatttttcttggcagcggaaagcctctggatggcaatgccaccggtttccacctgattaccgataacggcggcctgttcccgcacggcctgctgccggcgctggtgctggtacagggggtggtgttcgccttcgcctctatcgaactggtgggtaccgccgctggcgagtgtaaagacccgcagaccatggtgccgcgcgccattaacagcgttatctggcgtattggtctgttctacgttggctccgtgctgctgctggtgctgctactgccgtga

SEQ ID NO: 206794 - DNA, 2154 bp, Klebsiella oxytoca
atgcgtgctctacagcttgccatgaccctgatggctaaagaccagggctctaaggtgctgcgccagacactggccgacatcttaaagcagaccaatgccaataaaaaagccgaggaagaggctgcacgtgtccgtgaacagtcggcacagagcggcattcgcgcatcccgaaccctgcagcaggagaatcagagggcagcgaatgcccgttctgtgctggggatccgttctgaacgcgacatccagcgcgagataacgcagacgcaggccgcctataatcgcctgctccgaaccggcaccctcaccgctaatgaacagacccgcgcgtttcgtgcgatgacgaaccaggtcgcgcagttgcgtaccgagctcaatggtgccggtcagtcaatgtcccgcatggaacgcgcccgcatgtggggtggtaatgtcacagcatttgccggcggcatcgcagccgcaggggctattgtcgccccctcagttcgtaaccagatgacgtatcagcagcgtctggccatgatggccaacactgcgtttgcagatgataaccttgccggccgtcagacaggtatgcagtctatggatcagttgatccgtcgagctgtttctgttggtgggggtagtaaggaaacggctgcggatacgcttgatacgctcttagcatccggggctgttgattacggctcagtggagcgtctacttcccacgttgcaaaaatattcaacggcaacaggtgctgattctaaagacctggccatgatagcgattcgtctgaagcaaactttcggcctcaatgatggtgatatacctaaagctctcaacatggcgataagtgctggccaggctggctcattcgaactggccgatatggctaagttcttaccggctcagcttgcaaacgcaagtaatgcgggtatgagaggacttaacgattttgcttccctcctgggtttgaatcaggcagctgcgattactgcaggttccagtgatcaggcgggtacaaacgtaactcagttgttggcaaaaataacgagccaagatgcagcaaatgctgctgcccgaatcgtttataacggtaaaggtattgatcttccgggctcaattgttgctgctcaaggtaagggattgaatgctcttgatgcatttagtgggatagtagacaagatcgtcgcgagtaatcctgcttatcagaaacttgagaaacaactagcgggtacgacggatgggtctacccgccaacaaataatggcatctcaggcaaaagtattagagggttcttctgttgggagaattatcgcagaccagcaagcgctgatggcccttgttgcctacagagcgaatcgtaaatatgcctacgatgtccgagatagcgccaaccttcagcgggatttgcctgaaaggcagacagctggtgaacagaactttgaattaataaaagggactaaccttttcaaggtcaaccagcttaacaatacccgggactttgcgcagatggactcgatccagccgctgtcagatgtgctgggtaaactctctggcgagctcaacgattacgccggcgcgtatccgggccttacaaaagcactggctggtgctgagaccgcaatcaaagccatgacggccgcagcatgggcgttcgccggcattaagtttctatcctctgccggcgcggccgcaacagccagcggttcagcaaccagtgcaggtgctggtgctgccagccgtattccaggctgggctggccggctcggcctcatcggcggtcgtgttctggcaccgtttgcactctggcaaggtgctgaagccgcgccactggtgcaggtcagtcgtggtgatgccgaggcacgcgcccggcttgaaaaaggtaattaccccaacgagcaggcccgtatgcttgatgcactgaaatcccgcccggggcttatggatgcatgggatgaagtaaaagcctggtgggcgtcaccatcaaatatcagcatccctcagtcagccaacggttacccggtgccgccgttcgcgcagcagccggcacagcagaccccaatcaacatcaccacccagttgcaggtcgatggccgtgtacttgcagaggtcgttaacgaggcgaacggtcagtcggccgctcgtgggccgcagggaggaccacactga

SEQ ID NO: 206795 - DNA, 543 bp, Klebsiella oxytoca
atgttggaccatgaaagaaatcgctcaaaaagatggcattcaggattaaacggggaaagatggagtgttagcgaaataacctatttaatagaatgtggaaacagtaaaactttaagggaattatctacaacgttagaacgtagttaccattctgtaaaagcaatgcgccacagactatgtttaggcaaacggaaaaactatcggttctgggaaaagaacgaaatagattttctcaaaagcaatgcagggaagatggtatgcagagatatcgcgaaacatttaggtcgtagccagcaatccgtaaagggtaaggctgaatacatgggactcagccttgtatgcatcggagaacacagccctacggccattcacagcgatgaggatgtattgctttgccgtgagctacgtactgccggcatgagtttaaaacttattgctgaaaaaatggaaatgtcgttggggtccgttctgtcgattatttatggcgggcgcatgacacagcaggatcgtgtgatgctcgaatttgacctggggaagaactga

SEQ ID NO: 206796 - DNA, 192 bp, Klebsiella oxytoca
gtggctgaaattgttattacgattaatgaaagcggcgagaacctgaatatatccgcgattatatctgctgagaaacaggactcccgtttagttaaagatgtttcaaatattattgcaccgttaatgctggcgactgccagtgctgaaatcgctaaatttttccaacatttaaatgaggcccatcatggataa

SEQ ID NO: 206797 - DNA, 2502 bp, Klebsiella oxytoca
atggctctggtaattgaattcatatgtgatttgcccaacggcgtgcatgcgcgtccggcaagcctggtagaaaccctgtgcaatactttttcgtcttcggtcgaatggttaaatacccgcacggaaggacgcggaaacgcaaaaagcgcgctggcgattatcggcaccaataccttgaagggggaccgctgccagctggtcgttagcggcgaagatgaacagcaggcgtttgacgcgctgtcggcattcatcagcgaggagttcccgcactgcgatgcgccgctgccgacggcggaatccatggacgttcagccggttcctgaatccctctcgcgcctcaatcccacgctgtttcacgcccagccggtctgcgccggcagcgcgggcggcaggctcacccatcttaagtccctcgacctgtgcgattcaggcgcgctgcctgcagcgggcgcaattgaacaggaacaggcggcgctggacaagggcctgaccctgctggtgaaaaatattgagttccgcctgctggataacgacggtaccgccagcgcgatccttgaggcgcatcgctctctggccaccgacgcctcgctgcgccagcatctgctgggcgggctgctgagcggcctgagctgcgccgaggcggtggtcgcgaccggcgaacacttttgcgcccagttcagcgcttccggcaatagttatttgcaggagcgggtgctggacgtgcgcgatgtctgcttccagcttctgcagcatatctacggtgaggatcgttttccggcaccgggtaagctgacggaagaggccatctgcctcgccgatgaactcacccccagccagttccttgagctggataaaaccctgcttaaaggtttgctgctgcgcagcggcggcaccacgtcacatacggtgatcctcgcgcgttcgttcaatattcccaccctggtgggcgtcgatatggaggcgctgctgccgtgggtcgatcggcgagtgcagattgacggtaacgccgggctggtggtggtgaatcccgatgaagcggtggcgcgctactatcagcaggaggactgggtgcaggcgcagatccgccgccagcagcaggcctggctggataaagcggggcgtacggaagacggtattcgcctggaggtggcggccaacatcgcccattcggtggaggcgacggcggccttcaacaacggcgcgcagtcggtaggcttgttccgcaccgaaatgctctatatggacaggcccagcgcgccgtcggaaaacgagctgtataacctattttgccaggcgctggagccggccaacgggcgcagcattatcatccgcaccatggatatcggcggcgacaagccggtggcctacctcaacattccggcggagaacaacccgttcctcggctaccgggcggtgcgtatttatgaggagtatcaggcgctgttccgcactcagctgcgggcgattctgcgcgcttccgcgcacggcgcgctgaaaatcatgatcccgatgatctcctcgatggaggagattctgtgggtgaaagagcagctggcggatgccaaacagtcgctgcgcggcgaacagattccgtttgatgaaaagatcccgctgggcatcatgctcgaggtgccgtcggtgatgtttatcatcgaccagtgctgcgaagagattgatttctttagtatcggcagcaacgacctgacccagtatctgctggcggtggatcgcgataacgccagggtgacgcgccactacaacagcctcaatccggcttttttgcgcgcgctggattacgcggttcaggcggtgcatcgccagggtaaatggatcggcctgtgcggcgagctgggggccaaaggttccgtgctgccgctgctggtggggctggggctggatgagctgagcatgagcgcgccgtcgatcccggcgaccaaggcgcgtctggcgcagcttgacagccgcgcctgccgtcagctgctgaatcaggcgatgcagtgtcgtacttcgctggaggtcgagcacctgctggcccagttccgtatgacccagcaggacgcgccgctgattacccctcagtgcattacgctgaacagcgactggcgcagtaaagaggaggtgattaagggcatgaccgacaatctgctgctggccgggcgctgccgctatccgcgtaagctggaagcggatctgtgggcccgcgaagcggtgttctccaccgggttagggtttagcttcgccattccgcacagtaaatcggagcatattgagcagtcgaccatcagcgtcgcccgtctggcgcagccggtggcgtggggcgacgacgaggcgcagtttgtgattatgctgacgctcaataagcattcggcgggggatcagcatatgcgtattttctcgcggctggcgcggcgcattatgcatgcggagttccggcaatcgctggtgacggcgcagagcagcgaggcgattgcggcgctgctgcagcgcgagctggagctgtaa

SEQ ID NO: 206798 - DNA, 228 bp, Klebsiella oxytoca
atgaccgatcatgtgataactgaaagtcgtaaaacagataatgataagaaaatcagattaataaccctcgtctcaaccatcggtggactgtgctttggctacgacaccggggttatttccggcgcgctgattttcatgaaaaacgatcttggcctcactcctctgcaggaagggctggtgacatcgtttttattgtcatccctaaaccacctcctagggaggtggtga

SEQ ID NO: 206799 - DNA, 219 bp, Klebsiella oxytoca
atgaattttcaaaataaagtggctgttatcaccggcagcactgcaggtataggcgaggcagtcgcagagcaattacacaaacatggcgcgaaggtcgtcattgtgtcccgctcgtcagaggaggcgaaacaaaaagcgggtaatgactccaacttattgatagtgttttatgttcagataatgcccgatgactttgtcatgcagctccaccgattttga

SEQ ID NO: 206800 - DNA, 396 bp, Klebsiella oxytoca
atggtaccgggggaagacgaagaggttgttaaagccgaactgcaacagctgctcgaccacgcgtacgcgcaggcaaacgtggaagcggaaattatcgcctggcagcccaccaccggcggcgcgacgcaaaccgacagcagcgaagccattgtcgagcaaagccttgccgcctgccgccgtcacggacagagcgagcccggcccgtttggttttcagggcggctgcgacctggtgcatttccgttcgctgggcgcaaagggcgtggtgattggccccggctcgctgtccgtggcccacaagcccgatgaattcgtccccgtcgatgaatttatcgccgcggcagatatctatctcgatattgcgctcgccatgctgccgccggcgtccgatttatga

SEQ ID NO: 206801 - DNA, 507 bp, Klebsiella oxytoca
gtgatctgtaccgccagcgccgtgatcatcatgctggcgccgcgagacggcaacgaagaagcggcaaatggcattcaggccatccagcattcgatgagcaacctcgtcggcgactggggttccagctttgtcgcttttatcgtgctgctgttcgccttcagttcgatcgtcgcaaactatatctatgccgaaaataatctcatttttctccgcatggatagcctgcgtaacatctggctgctgcgtctgcttacgctgtgtatggtcgccaccggcgcgatggtcagcctaccggtggtctggcagatggcggatatcatcatggcgctgatggcgataactaacctgacggctatcctgctgctgtcgccgacggtgcgcatcattgccagcgattatctgcgacagcggaagctgggccagcggccggaatttgacgtcacccgctaccctgaaattcatcagcagctggtaccgggaacatgggacaacctgccgcgcgaatag

SEQ ID NO: 206802 - DNA, 618 bp, Klebsiella oxytoca
atgggaaaaatagtcgatttaactggcaatcaatacgggcggttgactgtggtttctttcgctcggcaggacaaaagcggcggatcaatgtggctctgtaaatgtgaatgcggcactgaaaaagtcatccggtcaaatgcgttaaggtctggaaggtctaaatcttgcgggtgcatgattggggtgacgcacgggaaccggagtgtgaaaaaaacgtccccagcatatatgagttggtcttcaatgcacagccgctgtagtaatgtaaaagacccttattatgataaatatggtggtcgaggtattgctgtttgtgaacgatggaagaaatttgaaatatttttatctgacatgggggcgcgacctcccggccacactttagatcgcattgacgttaataaagggtactcttcagaaaattgcagatgggcaacaccgaaaactcagtctcgaaacaaaagaaataatcatttaattgataccccctcgggaagagtatgtattactcaggcttcagaaatatatggtattaaagtccaaacactcaggcgtcgcctgaatcaaggctggagcattgagcgggctcttttaacaaagccatggcagaaacctgtatga

SEQ ID NO: 206803 - DNA, 237 bp, Klebsiella oxytoca
atgaataaattattgctacccactttaatcatatcggtggtctcgctggtgtcggcatgcagcaacaaagaagataaatatatctatgtccacgattcctgcagctgggtgcggatcatctacctgactgatcacgatatcgacgcgctggacagacaaacgaagcgcgacattctggcgcataacaaagcagtgcaggctaactgtccgcaaccaacagacagggttacgcaatga

SEQ ID NO: 206804 - DNA, 390 bp, Klebsiella oxytoca
atgggtaagttaaaaaaagatttcatcacaatcggtgaagatcgtgtcacgttatatgaattatctgcgctgaacagaattgaatatctggaatatgtgttttcggcaaaaaattctattccggaagatgaggcgcactcagacgataaattaaaaacagcatcgatattaacgattaaagattttgccatgctggtggcgctttcacttagccaggctccttcagagtcacgcgaagcaagtgaattgctgagtgaggttatcagtgatttcggtgttgatgggcttactcgcgccgcacagatggtgcgggaactatcgggaatggtgacagggggcgataatacatctgaagaagatgcagaggcagtatccctggaaaagtcctga

SEQ ID NO: 206805 - DNA, 276 bp, Klebsiella oxytoca
atgctcgcagaaatgtcttcgcgcgaatggatggagtggggggagttttatcaggagcaccattttatggatgaattgatcgacacccattttgccagcctaagccacctcgcgatttgcatgtttaccgatcctgataaacacaatttatccatcactgatttcagcctgctagggatgagaacggacgtggataatgttgtatcggatgaacaattaatgtcgatagccgaaagcatacccggaggagtccgctatgtcccagccagtgggtga

SEQ ID NO: 206806 - DNA, 183 bp, Klebsiella oxytoca; identical to SEQ ID NO: 185335

SEQ ID NO: 206807 - DNA, 1236 bp, Klebsiella oxytoca
atgcacaattcttcgctttcaggcaaacgcctcggacgtcaggcgctgctctttccgctgtgcctggtgttatacgaattcgccacctatatcggcaatgacatgatccagccgggaatgctctcggtggtggaagagtttggcgtgggcaatgagtgggttccgacctcaatgaccgcctatctggccggcggtatgtttttgcagtggctgctggggccgctttcggatcgcatcggccgccgtccggtcatgctgaccggggtggtatggtttatcgtgacctgcctggcgacgctgctggcgcagacgattgagcagttcacgctgctgcgctttttgcagggcatcagcttgtgctttatcggcgcggttggctatgcggcgatacaggagtcttttgaagaggcggtgtgcatcaagatcacggcgctgatggccaacgtcgcgctgattgcgccgctgcttgggccgctggtgggcgcggcctgggttcatctcctgccgtgggagatgatgtttgtcctgtttgccgtgctggccgctatcgccttttttgggctacagaaggcgatgccggaaaccgccacccgcatgggcgagaagctatcggttaaagagctggggcgtgattatcgtgaagtgctgaaaaacctgcgctttgtcgccggcgcgctggccaccggttttgtcagcctgccgctgctggcgtggattgcccaatcgccggtgatcatcattagcggcgagcaggcgaccagctacgagtatggtctgctgcaggtgccgatatttggcgcgctgattgccggtaacctggtgctggcgcgccagacttcccgcaagacggtgcgttcgctgattattctcggcggctggccaattatgatcggcctgctgatctccgtcatcgcgacggtggcgtcaacccacgcgtatctgtggatgaccgccgggctgagcgtttacgccttcggcattgggctcgccaacgccgggctggtgcgcctgacgctgtttgccagcgagatgagcaagggaacggtgtcggcggcgatggggatgctgcaaatgctgatctttaccgtgggtatcgaagtgagcaagcacgcctatgaggctggcggtagcggactcttcagcttgctcaacctgctgagcggggtgctctggctggcgatgacggtctacttcctgaaggataaacgcgtaggcagctccctcgaaccgcagtaa

SEQ ID NO: 206808 - DNA, 816 bp, Klebsiella oxytoca
atgagcatcaaaatgattgcggtagacatggacggcacttttctgagcgatgccaaaacctataaccgtcagcgcttcctcgcccagtatcaacggatgcgcgagcagggcatccgcttcgtcgtcgccagcggcaaccagtattaccagcttatctccttcttcccggaggtagcgcacgagatcgcctttgtcgccgaaaacggcggctgggtggtcagcgccggagaagatgtatttaactgccggatgccgcaggagcatttcaataccgtcatcgatcatctccagacgctgaccaacattgaaattatcgcctgcggtaagcgcagcgcttataccctcaaccagtataatgatgagctgaaagcggtcgcggcaaagtactatcatcgcctcgaactggtcgacgattttaatcatattgctgatgatgcgattctgaagttcggtctcaacgtcccggaccagctgatcccgcagatacagccgaagctgcacgctgcgcttggcgatatggtgaccgcggtcgctaccggctacggcagcattgacctgattattcccggcgtgcataaagccaacggactgcgcatcctgcaggaacgctgggggatcgagaaccatgaagtggtggcgtttggcgatagcggcaacgatattgaaatgctacagcatgccggattcggttacgcgatggccaacgccgccgcgccggtgaaggccgtcgctggctatcgtgcgccgcacaataacgaagaaggcgtactgcatattattgataaagtgcttaatcgcgaagcgccgttcgcctga

SEQ ID NO: 206809 - DNA, 1122 bp, Klebsiella oxytoca
atggcttcatgggcgacccgcacgccggcgattcgcgatctgctcgcgctatcgacggcggaaatggggattgtattatttggactatcaataggttcgatgagcggcatcctctgctcagcgtggctggtcaatcgattcggcacccgtaaagtgattcgcgccaccatgtcctgcgcggtggtcggcatgctggtgctcagcgccgcgctatggtttacctcggcggtgctgtttgctatcggcttagccatcttcggcgccagctttggctccgcggaagtggccattaacgtcgaaggcgccgccgttgaacgtgagatgaataaaaccgtcctgccgatgatgcatggtttttacagcttcggtacgctcgtcggcgccgggattggtatggcggtaaccggcttcggcctgcccgccgcgccgcacatcctgctggcggcgctggtggccgtcgcccccattgctatcgccattcgcgcgatccctgaaggcaccggcaaaaatgcggcggaagcggcgcgccatgaaggcaaaggcctgccgatatggcgcgatgcccagctgctgctgattggcgcgatcgtcctggccatggcctttgctgaaggctccgccaacgactggctgccgctgctgatggttgacggccacggcttcagcccaacctccggctcgctgatttacgcaggcttcaccctcggcatgacccttggccgctttaccggcggctggtttattgaccgctacagccgggtgacggtggttcgcgccagcgcggtaatgggcgccctgggcattggcctgattattttcgtcgataacccgtgggtcgccggtctctccgtactattatggggtctcggcgcgtcgctgggcttcccgctgaccatttctgccgccagcgacaccggccccgatgcgccgaagcgcgtcagcgtggtggcgattaccggctacctcgccttcctcgtcgggccgccgctgctgggctttctcggcgaacacttcggcctgcgcagcgccatgatggtggtgctggcactcgtgctggtcgcggccatcgtcgctcgcgcggtagcgaagccacaatctgaacccgtgatggagaacagttaa

SEQ ID NO: 206810 - DNA, 543 bp, Klebsiella oxytoca
atggcccgtcgaccaaacgacccgcagcggcgggagcggattttgcaggcgacgctggacacgatcgcgatacacggtatccacgcggtcacgcaccggaaaatcgccacctgcgcgggcgtgccgctgggctcgctgacctactatttcagcggcattgaggcgctggtcgaagaggcgttcagcctgtttaccggccagatgtcggcgcagtatcagcagttttttgccgatgtgcatagccgcgaagaggcctgtgacgccattgcggagctgatttttagcgcccaggtgaccaccgcgcgcaatatggagctgatgtatcagctgtatgctttttgcagcagccagccgaatttaaaagcggtcatgcagaactggatgctgcgcagccagcggacccttgagcagtggtttgaaccggccacggcccgcgggcttgacgcctttatcgagggcatgacgctgcacttcgtgaccgacagagcgccgctatcgagagaagcgattcgactgatggtagaccggctggcgggagcgtga

SEQ ID NO: 206811 - DNA, 1686 bp, Klebsiella oxytoca
gtgaatataaacgtcgcagatttgttaaacgggaattacatcctgttattgttcgttgtgcttgcattaggactctgcctcgggaaactgcgtctcgggtcggtacaacttggtaattccattggcgttttagtggtttccctattattagggcaacagcatttcagtattaacactgatgccctcaatctcggctttatgctgtttattttctgcgtcggcgtggaagcggggcccaactttttttctattttttttcgcgacggcaaaaattacctgatgctcgcgctggtgatggtcggcagcgcgatgctgatcgccatggggctgggtaagctcttcggctgggatatcggcctgacggccgggatgctcgccggcgccatgacctccacgcccgtgctggtgggcgccggggatacgctacggcacttcggcatgcccagcgaccagctcgccctctcgctcgatcatctaagcctcggctatgcgctgacctacctgattggcctggtcagcctgatcgtcggcgcccgctatatgccaaagctgcagcatcaggatttgcagaccagcgcccagcagatcgcccgcgagcgcggcctcgataccgactcccggcgcaaggtctatctgccggtgatccgcgcctaccgcgtcggcccggagctggtggcgtgggctgatggtaaaaacctgcgcgaactgggcatttaccgccagaccggctgctacattgagcgcatccgccgcaacggcattctcgcgaacccggacggcgatgcggtgctgcagatgggcgatgatatcgccctggtaggttacccggatgcccatgcccgcctcgacccaagcttccgtaacggcaaagaggtcttcgaccgcgatctgctcgatatgcgcatcgtcaccgaagagatcgtggtcaaaaaccacaatgccgtcggccgtcgcctggcgcagctgaagctgaccgatcacggttgcttcttaaaccgcgttatccgcagccagatcgaaatgcctatcgacgataacgtggtgctcaacaagggcgatgtgctgcaggtcagcggcgacgcgcgtcgcgttaaaaccgtcgcggatcgtatcggctttatctccatccacagccaggtgaccgacctgctcgccttctgcgccttctttatcgttggcctgatgatcggcatgatcaccttccagttcagctcgttcagcttcggcatcggtaacgccgccggtctgctgtttgccggcattatgctcggtttcctgcgcgccaaccatccgacgtttggctacattccgcagggagcgctgaatatggtgaaggagttcggcctgatggtgtttatggcaggcgtggggctcagcgcgggcgccggcataaataacggcctcggcgccgtcggcggtcagatgctggcggcgggccttatcgtcagcctggtgccggtggttatctgtttcctgttcggcgcgtacgtgctgcgcatgaaccgggcgatgctcttcggcgccatgatgggggcccgtacctgcgcgccggcgatggaaatcatcagcgataccgcgcgcagcaatattcctgctctgggatacgcggggacctacgccatcgctaacgtgttgttaaccctggcaggtacgctgattgtcatcatctggccggggctacagtga

SEQ ID NO: 206812 - DNA, 384 bp, Klebsiella oxytoca
gtgaaatctgagcgtgcttgggccggtattatctgtgggttctttctatttatcgtggtttgtttatcactactgttacatatgaaaggcgcctttcgggctaccggtcaccctgagctcgggctgctgttctttttgctccccggtgcggcggcaagctgcctctctcccgggcagcgggtactgcgtccgcttattggcgcgatgctggctgcacctgtctgtctggtggttatgcggcttttctttgtgaccgagcgttctttctggcaggaactggcgtggctgtttagcgcggtgttctggtgcgcgctgggcgcgctgtgctttttgtttatttgcgcctggcttgataccagacgcaggcactcgtcagaggagtga

SEQ ID NO: 206813 - DNA, 264 bp, Klebsiella oxytoca
atgtttacggtaatttttggtcgtccaggctgcccctattgcgttcgcgccaaagagctggcggaaaaactgagcaacgagcgtgatgattttaactatcgctatattgatattcacgcagaaggcatcagcaaagccgacctggaaaaaaccgtgggtaaaccggttgaaaccgtaccgcagatttttgtcgatcagaagcacattggcggctgcactgactttgaagcctgggcgaaagagaatctcggcctgttcgcctga

SEQ ID NO: 206814 - DNA, 291 bp, Klebsiella oxytoca
atgcgatcgcccgctgcattaccaaaaagcattctggtagtcgagattatcggcatggtgctgttgaccctggcctggctctcgctcaaccagtacgtcagcctgcccgcgccgttttccagcccaacggcggcgctgctgatgatcttcgcggggatcctgctgatgcttccggccgccgtggcgttaatgtggcgagtggcgaaagtgattgccccgcagttgacgcaaacgaaaaccccaccttcttcattgcctgacagagaaaaacgagatgacgccgaccattga

SEQ ID NO: 206815 - DNA, 723 bp, Klebsiella oxytoca
atgacgccgaccattgagctgctgcgtagccaccgttctattcgccattttaccgacgcgccgataagcgacgaacagcgcgccgcgattattgccagcgcgcagggcgcttccagctccagttttttacaatgctcctcaattattcgcgttaccgacccggaaatacgccagcagctggtcccgctgagcggcggccagcagcacgtagcgcaggccgctgaattttgggtattctgcgctgatttcaatcgcaatctgcaaatctgcccggacgctcagctgggcctcgccgaacagctgctgctgggctgcgtcgataccgcgattctggcgcagaatgcgctggtggcggcggaatcccttggcctcggcggcgtctatattggtggcctgcgcaacaatatcgatgcggtgaccgagttgctgaagctcccgcagcacgtactgccgctgtttggcctgtgccttggctggccggacgataacccggaggtgaaaccgcgcatgccgtcggcgatgctgatgcatgaaaatcactatcagccggtggacgacgcggtgcttgcggaatatgacgagcagatagcgcagtattatctctctcgcggcagcaatacgcgtcgcgatacctggagcgaccatatccgtcggactattgttaaagagagccgtccgtttattctgcaatatctgcataagcagggatgggctacgcgctga

SEQ ID NO: 206816 - DNA, 903 bp, Klebsiella oxytoca
gtgaaaattgccatattatcccgggatggaacgctttattcatgtcgacgcctgcgcgaagccgcgcaaaaacgcggacaccaggtggaaatcctcgatccgctttcctgttatatgaacgtcagcccggtggcctcgtcgattcactataaaggtcgccagctcccgcatttcgacgccgtgatcccgcgcattggcacggcgatcacctactatggtaccgcggcgctgcgtcagtttgagctgctgggcagctatccgctgaatgaatcggtggcgattacccgcgcccgcgacaagctgcgctcgctccagctgctggcccgtcaggggatcgatctgccgctcaccggtattgcccattcgccagacgataccagcgacctgattgccatggttggcggcgcgccgctggtggtaaagctggtggagggtacccagggcatcggcgtcgtgctggccgaaacgcgccaggcggcagagagcgtcatcgacgcttttcgcggcctgaatgcgcatattctggtgcaggagtatatcgccgaggcgaaggggcgggacgtgcgctgcctcgtggtgggtaatgaagtggtggcggcaattgaacggcgggcgaaggagggggattttcgctctaacctgcatcgcggcggcgtggcgtcggtggcgtatatcagcgagcaggagcgtgaaatggccatcaaggccgcgcaaacgctcgggctggacgtggccggcgttgatatcctgcgcgccgcgcgcggtcctctggtgatggaggtcaatgcttctcctgggctggaaggaattgaaaccaccaccggcgtcgatattgccggcaaaatgatcgcctggatcgaacgacaagccacgcccggattttgtctgaaaatgggcggataa

SEQ ID NO: 206817 - DNA, 480 bp, Klebsiella oxytoca
atggattcactggtcgttccgggtcttgatacgttacgtcaatggctcgacgaattgggcatcagcttttttgagtgtgattcctgccaggcactgcacctgccgcatatgcaaaatttcgaaggcatttttgatgccaaacttgacctggtggataacgtggtgcttttctccgcgctggcagaggtgaaaccctccgcgctgctgccgctctccgccgatctttctgcgattaacgccagttcgttgacggtgaaagctttcctcgatattcaggatgataatctgccgaagctggtggtgtgccaggccttgaccgtaggcgtcggcgtgacgatcgatcagttcgcgtggtttttccgccagagcgaagaacagatatcgatggtcatcctcgaagccagcgccaatcaggtgctgtataagtctgaggaagaagagccggtggctgagaatattcagtaccattttcttcactaa

SEQ ID NO: 206818 - DNA, 1113 bp, Klebsiella oxytoca
atgaccgcctttggtaaaaaatggttaacaggtctggttacgggtgcgctgatggccgtttctgccggttcgctcgcagccgaacaaaaaaccctgcatgtttataactggtctgattatattgcgccggatacggtggcgaattttgaaaaagagaccggtattaaagtggtgtatgacgtctttgactccaacgaagtgctggagggtaagctcatggcgggcagcaccggttttgacctggtggtgccgtcggcgagcttccttgagcgccagctggcggccggggtattccagccgctggataaaagtaagcttcccaactggaaaaatctcgacccggaagtattgaagctggtcgcgaagcacgaccccgacaataaatacgcgatcccgtacctgtgggcgacaaccggcataggctataacatcgataaagtgaaagccgtgctgggcaaagatgcgccgctggacagctgggatctggtgatgaagccggaaaacctggaaaagctgaaaagctgcggcgtctccttcctggatgccccggaagagattttcgccaccgtgctgaactatctcggcaaagatcctaacagtactaaagccgatgactacaccggcccggcgaccgatctgctgctgaagctgcgtccgaatattcgctatttccactcctctcagtacatcaacgacctggcgaacggtgatatctgcgtcgctatcggctgggcgggcgacgtatggcaggcggctaaccgggcgaaagaagcgaaaaacggggtgaatgtttcctactatattccgaaagagggcgcgctggcgttcttcgacgtcttcgccatgccggcggatgcgaaaaacaaagatgaggcttatcagttcctgaactatctgatgcgtccggaggttatcgcccacatcagcgatcatgtctattacgctaacggcaacaaagcctctgttccgctggtcagcgaagcgatccgcaataacccggccatttacccgccggctgacgtcttcgccaagctgttcaccctgaaagtccaggatccgaaaatcgaccgcgtgcgtactcgcgcgtggacgaaggtgaaaagcggtaagtaa

SEQ ID NO: 206819 - DNA, 1179 bp, Klebsiella oxytoca
atggtgcgcctgcaccatgatttgatttctgccggagaacaccccgtgaatgatgtgattcctcgcccgcaggcgaaaacccccaaagcgctgaccccgctgctggaaatccgtaatttaaccaagtccttcgatggccagcacgccgtcgatgacgtcaatctcaccatttataaaggcgaaatttttgccctgctgggcgcatccggctgcggcaagtcaaccctgctgcgcatgctggcgggatttgaacagcctaccgccggacagattgtcctggatggcgtcgatctggcgcgggtaccgccgtatcagcggccgattaatatgatgttccagtcctacgcgctgtttccccatatgacggtggagcagaatatcgcctttggcctcaagcaggacaaattgcccaaggccgaaatcaccagccgggtgcaggagatgctggcgctggtgcatatgcaggagttcgcaaagcgtaaaccgcatcagctctccggcggccagcgtcagcgcgtggccctggcccgcagcctggcgaaaagaccgaaactgctgctgcttgatgagccaatgggggcgctggataagaagctgcgcgacaggatgcagctggaagtggtcgatatccttgagcgcgtcggcgttacctgcgtgatggtgacccacgatcaggaagaggcgatgaccatggcggggcgtatcgccattatgaaccgcggtaagttcgtgcaaatcggcgagccggaggaaatctacgagcacccgaccacccgctacagcgcggagtttatcggctcggtcaacgtctttgaagggctggtgaaagagcgtcaggaagatggcctggtgctggactctccgggcctgacccatccgctgaaggtcgatcccgatgcctcagtcgtcgataacgtgccggtgtgggtggccctgcgcccggaaaaaatcatgctctgcgaagacccgcccgcggatggctataacttcgcggtgggcgaggttatctatattgcctatctcggcgacctgtctatctaccatgtgcgcctgaaaagcgggcagatgctgagcgctcagctgcaaaacgaacaccgttaccgtaaaggggctcccacctggggtgatgaggtgcgtttgtgctgggatgccgatagctgcgtcgtgttgacggtgtaa

SEQ ID NO: 206820 - DNA, 954 bp, Klebsiella oxytoca
atgagtacattagaacccccgtcaggcgtaaaaaaacctggcggttttgcgctgtggctggcgcggctgcagatggcccacgggcgcaagctggtcattgcgctgccctacgtgtggctgatcctgctgtttctgctgccgttcctgatcgtctttaaaatcagccttgcggagatggcgcgggcgatcccaccctataccgacctgctggagtgggccgacggtcagcttacgttaacgctgaatctcgggaatttcctgcagctcaccgacgatccgctctattttgaagcgtatctgcaatcgcttcaggtggcggcgatctcgacgttctgctgcctgctgttggggtatccgctggcgtgggcggtggcgcacagtaagccatcgacgcgaaatatcctgctgctgctggtgatcctaccctcatggacctccttcctgatccgcgtttatgcctggatggggctgctgaaaagcaacggcgtgctgaacaacttcctgctgtggctgggggtcatcgaccagccgctggagatcctgcacaccaacctggcggtctatatcggtattgtttacgcctatctaccgtttatggtgctgccgatctataccgccctcacgcgtatcgattactcgctggtggaggcgtcgctggatctgggggcccggccgctgaagaccttcttccaggtgatcgttcccctcaccaaaggcgggattattgccgggtcgatgctggtgtttattccggcagtcggggagttcgttatcccggaactgctgggcgggccagacagcattatgattggccgcgtgctgtggcaggagtttttcaataaccgcgactggccggtggcgtcggcggtggcgatcgtgatgctgttgctgctgatcgtaccgatcatgtggttccacaagcatcagcaaaaacaggtgggggaacacggatga

SEQ ID NO: 206821 - DNA, 846 bp, Klebsiella oxytoca
atgaataatttaccggtagtccgttcgccgtggcgaattttgattctgctgctcggctttacctttctgtatgccccgatgctgatgctggtgatttactcattcaacagctcaaagctggtgacggtatgggcggggtggtcgacgcgctggtatcgcgagctgtttcatgacgatgcgatgatgagcgcggtaggcttaagtctgaccattgccgcctgcgccgcgacggcggcggtgatcctcggtaccattgccgcagtggtgatggtgcgttttggccgcttccgcggttcaaacggctttgcttttatgatcaccgcgccgctggtgatgcccgatgtgattaccggcctgtcgctgctgctgctgtttgtcgcgctggggcattcaattggctggccgtcggatcgcggcatgctgaccatctggctggcgcacgtcaccttctgtaccgcgtacgtcgcggtggtcatttcatcgcgcctgcgtgagctggaccactctattgaagaggcggcgatggatctgggcgccgcgccgctgaaggtctttttcgtcattacgctgccgatgattatgccggcggtggtctccggttggctgctggcctttacgttgtcgctcgacgacctggttattgccagctttgtttccgggccgggggcgacgacgctgccgatgctggtcttctccagcgtgcgcatgggggtcaacccggagattaacgccctggcgacgttaatcctcggcgtggtcgggattgttggttttatcgcctggtatttgatggcccgcgcggaaaagcagcgggtgcgcgatatccagcgtgcaagaagcggctga

SEQ ID NO: 206822 - DNA, 489 bp, Klebsiella oxytoca
atggaagactttacgttgggattgtttactaaaacgcgttcctctcatgctcgtcttaacgttcctgcgctggtgcaggtggcggccttcgccattattttaatccgcggcctggatttgctgatgatcctcaaccagcttggcgttcagggaatcgcggattttgtccatcgcagcgtgcagacctgggcgctcaccctggtgtttctctcaagtctggtgctggtatttattgaaatctggtgcgcgttttcgctggtaaaagggcgcaactgggcgcgttggctgttcctgttgacgcagattatcgtgattggctacctgtgggccgcttcattgggctacggttatcccgagctgtttagtattgccggggaatcgaagcgcgaaatctttcgctccctggtgctgcaaaaactaccggatctgctggtgctggcgatgctgtttgtgccggccccgtgccgacgctttttccgtttacagtaa

SEQ ID NO: 206823 - DNA, 717 bp, Klebsiella oxytoca
gtggcaaaaaaaatcctgttggttgaagatgatgaagatatcgccgcgctgctgcgcctgaatctgctggatgaaggttatcagattgtccacgtggcggacggagcccaggccctgcgcctgctggaaaaagagctttgggatgcggtgatcctcgacctgatgctgccgggcgtagacggtctggaaatttgtcggcgcattcgtcagcaaacccgctatctgccggtgattattatcagcgctcgcgccagcgaaacccagcgggtacaggggctggagatgggagcggatgattatctggccaaaccattttcgattctcgaactgaccgcccgggtcaaagcggtgttccgtcgtcaggaggcgatggggcagaatctgctgatggatgccggtcgtatcgccagccatggtttaagcattgaccccttgtcgcgcgacgttaagctgcgcggcgagacggtggatctgacgccgcgcgagtttgacctgctctactactttgcccgccatccgggggaggttttttcccgccttgagctgcttgatcgggtgtggggctatcagcacgacggctatgagcatacggtcaatacccatatcaaccgcctgcgcaccaaaattgagcgcgacccggcggagccggacatcattctgaccgtctggggaaaaggctataaatttgccgtggagcgcaaagaggcgcagccatga

SEQ ID NO: 206824 - DNA, 1473 bp, Klebsiella oxytoca
atgatccgccgtctcagcctcagccagcgcctggcgctggtgtttacctcactgctgctgctctgtgccgtagccgtttgtctgatccagctgtacagcagcgcgcagtacggcaatgtcatggtccagcgtctctccgccgggctggcgcagcagatcgccgcccgcgagccgctgctggacgctcaggggcaggttgatcgccggatgctgaagccgctttttgatcggctgatgaccttcaatcccagcgtagagctgtatctgctttcgcccgacggcgagctgctggccgacgccgcgccgccggggcatattaagcgccagcgcatcgatctggcgccggtgcaaacgtttctttccggcggcgcctggccggtgtacggcgacgatccgcgcagccttgataagcaaaaggtgtttagcgtggcgccgctgcgccaggacggccagctgcgcggctatctctacattatcctgcagggcgaaacctttaatgaactggcggcaagcgcctggcagaaaaccttgtggagcctgctgctgtggactctgctgctggtggccggtctcggcgggctggctggctggcttgcctggttctgggtaacgcgcccggtgcgtcagctcaccgcgctggtggcaaccgacagccaggacagtattcatgcgatcaaggcgctggcggcgcaaactccggaggcgaacccggggaatgaagtggccgtgctgcataatcgctttattgaactggcccgccagattgccgggcagtgggaccgtctggccgacagcgatcgccagcggcgagaatttgtcgccaatatctcccacgatttacgcacgccgctcacctctttgctgggatatctggaaacgttaagcctgaaggccgatcgcttgacgatggaggagaacaagcagtatctgaatatcgccctgcgccaggggaacaaggtccgccatctttctcagcagctgtttgagctggctcgcctggagcacggagggattaagccgcagccggaaaccttcgtgctggctgagctggtgcaggatgtcgcgcaaaaattcgacctggcaatcgcgacgcgcaatatcggtctacggctggatctggccgccgggctaccgccgataacggcggatctctcgatgattgaacgggtgctgactaatctgctcgataacgccattcgccatacgccggaaggtgggcttatccgcctgacggcgcgtcgctcagggccggaatttatcgtcgaggtggccgatagcggaccgggcgttgccggtgagctgcgggcaaccttgttcgaacggccttcggtgcttgaacctggcgcgcaaagcgcatcacgaggagggctggggttgatgattgtgcgacggatgctgcagcttcacggcggcgatattcgcctgcttgaagcgccggcaggggcctgtttccagtttaccctgccggtgtaa

SEQ ID NO: 206825 - DNA, 249 bp, Klebsiella oxytoca
atgacgagggttagtacggtaggggaaatcttcaggtctgacatggagcattctggagcgctcagaaagcgatactggcaatcatcatctcttccgtttcgtgaaaagcgtaagcacaggccgcaaccttgccgtttcagacgagatagggtgcttcaaaaaatcatgcgcagggaaatggaagctatggccaaccgccttagtcaaatcgatgcgtcaacgattctggaggagtttgtcgatgcctaa

SEQ ID NO: 206826 - DNA, 579 bp, Klebsiella oxytoca
atgggtacttggcggattatcaaatcacacgatgactatgaagttgcaatggcaaggcttctggcccttgctgacacggaccttaaggaaggtactgatgattttgatgaattcgaactgctgagccttcttattggtcactatgaagattctcactatcaaatagataagcccactccagttgacgctatcaagtttcgcatggatcaaatgggattaacttatgctgatatgaggcagtatcttggttccccctcaaaagtctcagaggtactaagtgggaagagaaaacttagcctaagcatgattaggcggcttcataatggtcttggcatccctgctgatattttgatccagaattctgatgaagttgaatggtctgccgtttcatttggcgtcgaaaccttagctatagctttcagcgatgcatgtaaacagccttccgaagtcactggtttcggtggtataggctcgctgggtgtagtgcttcaagtgacgactcaacagcacgtaacggatacctttagcagcatcaaagttaatcccgcacaccctattgcacctgtagaatgttactaa

SEQ ID NO: 206827 - DNA, 423 bp, Klebsiella oxytoca
atgaaaatcacaccaataggaagcaaagtacacaaagtgatacttacccccaaggagcagactgaaagccccaagaaagggaaaaaggatactaaaaataccaacgctactcttaaattagataatgaattatacctgaacaaaaataactcaaaacttttcagggccaggtataagattcacgttgaaatcgaagatagcgccgaaattgatgttatctatgattttgattttaaatcagatactgatgtagatcagtctcttgtatcatccatggtgattagatctcaagtcccgacacttgtttacccctacatcaaaacttacctagagcaatttttattgatgtctggatatgggagcattcctctaccatatgttgattttgttcagaacccgattccaggcaaagcaacggattag

SEQ ID NO: 206828 - DNA, 219 bp, Klebsiella oxytoca
atggaaaggacagacttggtagtgattaacggtaagttatgcaacaaagacgttgccctgctgattattgacaaggttttacctaccgttcttgcggtggtggcggaaaaggtaaatgaagggcggcataaggatgaagtgaaagaagcagccacaaccgtagttgaggccgctatctcggcaattagtttgaagagcctagttgctcccaagtcttga

SEQ ID NO: 206829 - DNA, 231 bp, Klebsiella oxytoca
atgctggagttctcacacaaccagcaaaggcaaatcatgaataaggaagataaggcttggcttttggccgctatttacgagtcaactcaacccaagggaatcaccccagaagagtttctttccgaagtcgatcgctctaatgctacttttctctatctgcttacaaagcgtgaggaagaggaaagtgcgcaagcgatcaagacttgggagcaactaggctcttcaaactaa

SEQ ID NO: 206830 - DNA, 1254 bp, Klebsiella oxytoca
atgaaagggtacagcaggcgtgatgccatagacatggcggttaaattcggaataggtgccgctttaatggcctcaatcccaaggatggcggtcgctgcaggctcattgaagttaagtgtcgctgattttggggcgaagggtgacggggtaactgatgactcttttgcttttcagaaggcctttctaaaggcaaatgaggccggtggcggtactgtgtactttccaccacctcaaaaggaatacctgcttaagtttccagtatttatctttaacaatactgaagcttacggggatggaaaggatactcgcattgttttcgagaatccggttttcagtaagggccgcggaggattcgttatcggttcaagcctggaggcaaacagagagctggcgttaacccggttcaataaccgctccctgtccactacgataaacaataacttcagaaatcccgttcagcggcattatatacgcgatacaccagagcttgctcaggcgaatggtagcagcttgcatgatatttacctggaagccagattcactgctggctctgagagtaactggggaggatatggaatcaacttcgtaaacgccattaactgccatgccagtaatatctggggtaaaggatggacccaacttatcggaatgggttctgatacccctcctgaaacaccatcaaaccataattgcagcgcaaaaaatttgtatgttctcgagcctgatatggtcaggacatattactctataggatttatggcaaactcaagcaattgcaccattcagaatgctaaacaactaaagcccatgactgaaggaagtaagaacggtagtggcgtggctctgaatttttgcgaagattgcattgtttcagatattgatattcctgatttgggaagaactcaaacatcagaaggggttcttataaacaattcatcaggttgtttaattcagaatataaatattggaaacgcaaaaaaagcagtttccacattttttaaattcaaggatacacaaaaagaattcaagccaaacctcattaagaatgtcaaaggttcaaattgcgaaattgtattatctatctattcaaagtttaacattataaaaaacatacaagggaaaaactcaggaagagtaatcgccttgatgaacaccaatgcaacacgcaatgtgatcagcgctcctgaggcggatatttccaccccaggaaaatcaccaatcaatacattgatgaagcttaataaaatagaatag

SEQ ID NO: 206831 - DNA, 435 bp, Klebsiella oxytoca; identical to SEQ ID NO: 177477

SEQ ID NO: 206832 - DNA, 285 bp, Klebsiella oxytoca
atgtcgctggccaccggtacctcctggggaaccttcgccatcatgattccaattggcgtccagctcggcgtgtccttaggcatcgatccgcactttatgatcggcgcggcgatttccggctcaatctttggtgatatgacttcgcctatctccagtgatgccatcgtggcatcgatggcgaccaactgtgaccatattgaacatattcgcacccagctgccttatgcgctggtgacgggcgggctggcgctcattgtttatttaattgtcggcttcactctttaa

SEQ ID NO: 206833 - DNA, 486 bp, Klebsiella oxytoca
atgagcttcgatctgattcagttcgttaaggagcaggagccgctgtttgtcggcgcccttaccgaccagtctctgacatgggcaaaggaatgccagttcgctatccagttattccagcgtaatcaaaaactggcagaaacggcgattgccaaccccaccagcgcccagaacgcgattatcaacgttgcagctgtcggcattagcctgaaccctgcaagcaaactggcttatctggttccgcgcgacggtatggtctgcctcgatatcagctacatgggccttctgcacatcgcccagtcggctggcgtcatcaagtggggtcagtgcaagctcgttcatgcaagcgacgactacgagacgctgggtctcgataaagcgccagcccacaaatacaacccatttgctacacctgacgctcgcggcgccgttatcggtggtactgcacagttaaaaccgctgatggcgactatctcactgaagagatga

SEQ ID NO: 206834 - DNA, 246 bp, Klebsiella oxytoca
atggtcgaaatcaccgacgcccagcagattcgcctgaacctgctatccaccctgaactatgacactgccgccgcaaaagtcgctgtagagtttgttcaggatagtccgcttaagtaccagttattcatccagcaatacagccgcgtcacgacagaaaccgaagtggtagcaaagacgatgaaagcagtacaggaagcaactgaagcgctgccgctcttcgatacgagcgctgaacagtcgagctag

SEQ ID NO: 206835 - DNA, 837 bp, Klebsiella oxytoca
atgaacgctgcaaaccgtcaatacacccgctggctcacgctgctcggcactatcattacgcaatttgcgctgggatcggtttatacatggagtttgttcaatagttccctttccgccaagctgaacgaaccggtaagccaggtggcattctcatttggcctgctaagccttggtctggcgctctcctcatccgtggcgggtaaattacaggaacgttttggcgtcaaacgcgtcaccatggcgtcaggcgttctgctgggcctcggtttcttccttaccgctcattcaaacagcctgatgatgctgtggctgagcgcgggcctgctggtggggctggcggatggcgccggctatctgctcacgctgtcaaactgcgtcaaatggttcccggaacgtaaggggctgatctccgccttttccatcggttcttatgggcttggcagcctgggctttaaatttattgattcccatctgctggcgacggtcggccttgagaaaacctttattatctggggcgctatcgtgctggtgatgattgtgttcggcgcgacgctgatgaaagacgcaccgaaccataccgctaccgccaacaacggcgtcgtcgaaaacgacttcacccttgccgaatcgatgcgtaaaccacagtactggatgctggcggtaatgttcctgaccgcctgtatgagcggcctgtacgtgattggcgtggcgaaagatattgcccaggggatggtgcaccttgatgtggcgacggcagctaacgcggtcacggtgatctctatcgctaaccttagcggtcgcctggtgattagaagtgagataaatgaacagggataa

SEQ ID NO: 206836 - DNA, 408 bp, Klebsiella oxytoca
atggataaaaccaccgctgttattgactcaccagaggcgctgggcgctgccctgtgccgccatgtacccgatatggccaacggtttcaccatcaccactcgggacagccagctgcagctgactgtaaccgccgaagataccaggcctttcattgcggcgatggaacggctgctgaagggcaaaatccgccagatccagcgtgggcatcaggaacgcgttctggatgaaaaagaggccatttttgatgccaataacaagattattgctgaacagcaggctgagtatgcgcggctcctccgggatgggaatcctccatttaccactgacgaactggaccgcatcgccgctatctacagagcggccatgtcgcgcaaaaaagcggactcacatactgacactggtatctga

SEQ ID NO: 206837 - DNA, 450 bp, Klebsiella oxytoca
ttgatttatctcgcgcattacacttcatttatcgcgctcggcatcagcctggtgctggggatcctgtctgataaaatgtcccgtattcgagtgattaccatcgggcaggttgtttcgcttatcggtatggcggcgctgctgttcgctccgctgaacgccaccactttcttcgccgccattgcctgcgtggcctttaacttcggcggtacgattaccgtcttcccgtcgctggtcagcgaattctttggtctcaataacctggcgaaaaactacggcgtgatttatctcggctttggtatcggcagcatttgcggttccctgattgcgtccctgttcggcggtttctacgtgaccttctgcgtcatctttgcgctgctgattctctccctggcgctatcgaccaccatccgccagccgaaaagtgagatttatcacgaagcgcatgcctga

SEQ ID NO: 206838 - DNA, 900 bp, Klebsiella oxytoca; identical to SEQ ID NO: 174953

SEQ ID NO: 206839 - DNA, 576 bp, Klebsiella oxytoca; identical to SEQ ID NO: 202562

SEQ ID NO: 206840 - DNA, 513 bp, Klebsiella oxytoca
gtgtctggaaatataggggccaatccagagtcagagtcgctgtccgaatccgagtcactatcagaatcggaatcgctgtcagagtcagaatcactgtcagaatccgagtcactgtcggaatccgaatcactatcggagtccgaatcactgtcagagtccgaatcgctgtctgaatcggaatcgctgtcggaatccgagtcgctgtcggaatccgaatcgctgtcggaatccgaatcgctgtcagagtcagagtcgctgtccgaatcggaatcgctgtccgaatccgagtcgctgtcagaatccgagtcgctgtcagaatccgagtcactatcagaatccgagtcactatcagaatcggaatcgctgtcagagtccgagtcactgtctgaatcggaatcgctgtcggaatcagaatcgctgtcgctatccgagtcgctgtcagcatccgagtcactatcggagtccgaatcactgtccgcatctgagtcagtttctgaaatcgaagagtggtga

SEQ ID NO: 206841 - DNA, 717 bp, Klebsiella oxytoca
atgatgcctttacgccctgaattactggagctcacgccgcaggcgctcaccgcgctgagcaacgccgggtttgtgaaacgcgctcaaaaagagctggataacggcaatatccccgcgctggagcaggatgaggccggtacgctgaccgccgtttttcgcgatggtacccgtacccggctggaaaaagatcgggccctcaaagagtccagctgtacctgcggcgctagcggcatgtgccgccatcgcgtgatgcttatcctgagctatcagcgcgccaacgccggtcacgcggctcctgaaggggagccaaacgctgacgagcgctggcatcccggcctgtggcaggaggagctggccaccctgcccgagtcgattctcaagcgggcgcagcagctggcggataaagggctgacggtggaattgttctgccgacccaacgaaacgccgtcggcaaagctgccgatgagcgatgtgcgtttttattcccgcagcagtatccgctttgcccgctgcgactgcatcgaaggctccctgtgcgagcatatcgcgctggcggtgcaggcctttaccgacgccgaagcccaacagccgggctttacgcatctggtctggcaaacccgcagccgcagggtcgccgcccgcggcggaccttttgctacgcccgagggcgaagcctgtcgacaaagcctccatcagctaagccaactgctgtggtaa

SEQ ID NO: 206842 - DNA, 909 bp, Klebsiella oxytoca
atgaggggcactcaatttcgttactgctgggcaatgtggggcgcgctgccgctgttagccggtttgatgctgctcagcgttgccaaagggagcgtaccgttatcgctggcccaggttcttggagccttgcggctgctggatgtgccggtatcggagatgatcgggcgtattgtcattgatttacgcgtgccgagaacgctgctctcggtgctggcgggcgccgtgttggcgatcgtgggcggccttttacagaccaccacgcgcaacgatctggccgatccttttttatttggtctctcctccggcgcatcggcgggcgcggggctggtgattacccgatttggcggcgccgaacacttagtgatttgcgggttggcgatctcctttttattcggcgcgctgaccagctatctgattttctccggcgatcagcgggccgccagttcggtactgttctggtcgttgggagggcttggtctggcgcgctgggataatttaccgtatgccgtattcagtctgctgtttctcggcgcgttcgtactgttacgctggcgctcgctggatggcttactggccggcgagcagaccgcgcagtcgctgggtattaacgttggccgcctgagaatggaggtttttttctgctgcgcgctggccacctcgctgctggtggctttaaccggagtgattggctttatcggcctgatggtgccgcatatgtgccgctacttttccggcgtcaaacatctgttgctgcttcctttatgcggcctgtggggggccgtgctcctgtgcggcggcgacattgtcagcaggacgctgttggccccgcaggagctgccgattgggatcattacggccggaatcggcggattgtttatcattatcctgcttgccagaaaccgggcgtaa

SEQ ID NO: 206843 - DNA, 132 bp, Klebsiella oxytoca
atgagtgaggattgccataaggggaaaattaaccttgccttcattactgtgtatttatacagtttgtggcggcggcacgacgagaatatcgatcgcgacagcgaagggcttggcggatgccgcgacggctaa

SEQ ID NO: 206844 - DNA, 711 bp, Klebsiella oxytoca
atgaaattaacccatgttgtcgaccggcacctgacaacgcagatggccgcgcagcgcctgggtatcttcgctcgtcagtgccgacatcttctgtcgcgttaccgcgaatctggcccgcctggtatggctgaccgccgtcgagggaaccccagcaataaccaactgcctgatggtcttgcacattacatccgagatcgccataccgactttgtgccgacgcttacatgcgtgaaactcgcagaactgcacgatgttcacctgtcccaagaaactgtccgttcactcattgtcaaagccggtctctgtatccctcgcaaacaacgtgcgccgaaaattaagcagccacgctatcgtcttgcctgttgtggcgagttgatccagattggtggctgcgaccatcactggttcgagaaccgtgcacccgcctgtatcgcactggtctacgtcgacaacgcgacgagccacctgatgcagcttcgatttgtaaaatcggaatcgacattcacctattttgaggccatccggggctacctggaaaagcagtatcacattatacgatggcgtaaagattccacagattggttaagggaagttattatgcttcccttaatgcacactttaagcaatttgcaaactactcataaaaatatatatgaattttattcaataggtaaattgtgcagttttaagaaagatagcttatcccaatag

SEQ ID NO: 206845 - DNA, 1509 bp, Klebsiella oxytoca
atgactattgttaaaacattttctttgaaaagcaatccttttgaacactacacagcagagaatgaaccagatataagtctctatgcagtaaggccgccttatctttcagccataactgacagagctagaaacctaaactcgtttatcctttttgggcagcgaggcgcagggaaaagtgcaactcggttgacagtgtttaaagaggattactcaaaagaagagagacaaccatttttggttaacttgaccgattttactgaattacttgataaacataggaaaggtaaactaacagaaagagatattatatatcttgtcgcattcaatactatagagcaaatgttagggtggatatccctactcgatgatgctgagagaaaaagagtaatttcacaattagacactaaacaacgggagttgatttttgctttgttgaagggtttttatctttctaaaagtgaaggtgagcgggaattaactactgaaagtactttaaaactattagatagcgcatggttcaaaaaaggtcaattgtggacaagtcaaagatgggactctttaagtaaagttatagcagcagcagttaacgtactatctaaaaaaactctagaagatgattcaattgatatagctaagccagcagaggaattacttaaaagccttactggcgagtcagctaatgtgccgcgtatactcatcagtcgcttagtcgattttagtcaggcgtttggtttctctggtgtatgtattttaattgataaactcgatgagactagcgttactaccaactcttctgaggcaactgcacaattaatatttcctttactatcaaacatacaattgttggaggttagtaatttttcatggatcacatttgtatgggatgcagtgcaagatcattttaacggcaagtacagaataagacttgataaaatagctcatgcaaatatatcatgggattatgctgaactcaaagaaatgttagacaaaagaatgtcatatttttcagatgggaaggtgatgtttggagatatattaaatattagtggtgacaaaaatgaagccgtcgaaaaacttatttccatttctgtaaaatctccacgtgaactcataaagttatgcgatattatatttagagaacacgatgcgaatgatttcgagggtggcattaacgatctgtcttttaattctggtatcgataagtattgcttagatacaattgggacatggtatgacagcgatgtgctacagcaaatttatagattaggtaaggaaagttttgtcaataaggatgtgcaaggcttatttaaaataagcgatcagggagcacgcaataaaattagaggctgggaagatatgagggtcgttaagaaaaaaggtactgctccaagtgatgctggaggtaaacctgtgactctctatgaagtggccgatccacgcatagtgagaataattaataaagaactcgatccagccgttggtttaactgatttaagtgaagaggattga

SEQ ID NO: 206846 - DNA, 420 bp, Klebsiella oxytoca
atgaccacattcactgtggaaattcatgaagatatctttacctggcttaaaaaaggtactcgccctaagatagtcctggatctgccatcagtgccggccccaggcgataggctatggctgaagagcatgcgaggtacgcatattgtcgaaacagaaaaatgcatgatcgtggaatcgtgccgtgtctcgcgactacgccctactatacgccttgtattggtatttggtattgcaacaaatcatgggcacgatgaatcccgcgaacaggacgtcgtccgagaaaggcgtaagcatctgcaactatcggagagcattcgtagttttcgaacggaacagtatcagaaaaaacagtcgcaggtccgcgatcgtttactccgtaaatcagcgctactggctaaggtaaatactgtaacttcttag

SEQ ID NO: 206847 - DNA, 519 bp, Klebsiella oxytoca
gtgaatttcgccctatgtctttcaggtgtggtgatcaatgatataacttcagtttcaccaacaaacttccctcactctttgatatttattgcggcttcgatgattcctttgatcgtgcctctttgtatgatcttactgttcgcggttattttggtgtcagtacctatatggtgctggttttttttgtatgacgataagcttaagaaatttttaatgccaggatatgaacctaatcagcagaggtttttgcataaaagcactttaataatccaagttatatctttaataatttattgtgcttttatttttcaattttcacgactcataggcaatgattatatatcatatatcaataataaatctcaagggatgatttacacactcgagatgtttgataaaagtccatgtgccaacattaagaatgctaaggtttcatttttaggtgatggcaatgttctggttgcgtctaggaataatgataaatactccttcaaagtcatgaagtgtgagataaaatag

SEQ ID NO: 206848 - DNA, 441 bp, Klebsiella oxytoca; identical to SEQ ID NO: 166899

SEQ ID NO: 206849 - DNA, 960 bp, Klebsiella oxytoca
gtgtcgtatcgcgaccatctgtaccgtgtgatagcgaagcacgccagtgaatggtattacggcaaggatgactcgctctggaagacatacctggatactttaaccacggacgcaccgttatggaaaacgtacctggaagcgtttctggataagatgacatggatgaaagcagtatccgaaaagggcgtagtgctggggcccgaaccgtggcatatgcatccgattgtatttttaaatgctataaggaaagggaagccaaaaattacgcgagaaatgctcaggaggatttggaatagcccaggcaatgtttctgacgctgttcttgatattgttgctgaagagttttcgaataaatttgaagcgtgtaatattaataccaaaaatagactttatcatttttttgcgcaaatttttcaagaggtagggcctgcgtttaatttaaatgagggttttaactatagaccacaagtgcttatagataaatttgcatactatgctaatcatcctcaagacgcgcaaaccgatggttatatcccaagaagacaagccgcaaataaacaaaatattgccaacagggcctatggtggacgagagggaaataatgatattgcaagtggagatggatggagatatcatggaaggggaatgaaacagttaacattcagaaataactataaatcttttacaaactatcatgaaaaagtttggggagaacgtgttgattttgaattgaatccagaccttttacttgatacggtttatgcggcaagatctgctttatatttctgggaccagaataatctatacagaagagctgacaatggaatcagcagggttgtatctgactcaataacgagaattgttaatctttatgataatcactatgaagatagacataataatttaattagattcctgcaagatatcatatgcaatagatttcaaattatcattatctga

SEQ ID NO: 206850 - DNA, 231 bp, Klebsiella oxytoca
atgagtgaattattggaaaaagaatatcttgatgaagacggctgtagatactttagagttactaactcatcttttgtgagatacagggaaaaatataaaagcgaaaataaaaccgaagattttttcgtatactcgacggtgaaaaaaatccctgcaaacattattattcatttgaataagatagatatggaggaatatatttactggaaagaggaaagtgttaatgcatag

SEQ ID NO: 206851 - DNA, 606 bp, Klebsiella oxytoca
  misc_feature (450)..(459): n is a, c, g, or t
atgaaatctttactctctttgctcggccgttacgcgctgacgttaatcgcagtggcggtggcggctttcgtggcgtttattttctggaaacagtatgcgcagacgccctggacgcgcgatggccgcgttcgggcagatgtggtgcagattgcgccggacgtttccgggccggtaaccagcgtagcggtgcgggataatcagtgggttaaccgtggcgatgtactttacgccatcgacccgcgctggctaaagctggcggtgctcagcgcgcaggccgacgtcgaggcaaagcgtcatgagatggtgatgcgccaggatgcggccaggcgacgcgcccttatcaaaggggtcatttccagcgaggacatccagcaaacaggcagcgcagcgcgcgtcgcggcggccaattaccagggggcgctggcggcgctggaactggcgcagctgaannnnnnnnnngctgaatttatcccatgcgacggtgcgcgcaccggctgccggctacgtcacgcatcttcggcttcgccccggcgattacgccacggcgggagagacaaaagtcgccgtggtcgatgcgcacagtttctgggtggtgggctattttga

SEQ ID NO: 206852 - DNA, 126 bp, Klebsiella oxytoca
atgtcgacccatcgcatcacgcaagctgagccgcgccgctgggccatgttcgtcattttgctggtcggcgcgtttttgccgccgctcgatttttttatcgtcaatgttgcgctgcctgccatctag

SEQ ID NO: 206853 - DNA, 480 bp, Klebsiella oxytoca
gtgcatcacggtacggatggcgatcccggcgattgcgccggtcgcggcgaagcggaacaggcgtacgaagcgcgagctgacgcccagaaagatgccgatgccggggaggtcgaaggtctgcaccaacaggcctgccgaggcgttgatctggcttacggttactttaccctgctgaacgagctcggagaccacgccgaagtaggccgtaccgccggccacgcatttgaccagcgccggcagcacgaagttaaccgggatattcagccacagcagcagcggcatcagcaggcgctggagcatctcaatcaggcccgccgcctgcataaaaccgacgatagccagcgacaggatcagcatgggcaccgcgccgagggccaggcgaatggcgtcggcgccggcgctgttgataacggcgattatgccctggctattttgttcggcctcaggcagcgcttcggcccgcgcgttttcaaccattga

SEQ ID NO: 206854 - DNA, 189 bp, Klebsiella oxytoca
atggagatcatcgaaggcggcggcaatgcgctggtgattatggaaacccggctggatatcccgacggaagccgggataacacaggtcacgcggcgcgcaacctatgtctttcgtcagcagggcgaacgctggctctgcaccgtggataactcctacggtaccgacctgctcgacgcgcccgaggtttaa

SEQ ID NO: 206855 - DNA, 342 bp, Klebsiella oxytoca
atgggcgtcagccaccacccgctgcggggtaaaagcgtaaatctcctgcatcagacgcagcgcctgtcgccactgctcttcgacgccctcgtcgtcgagatcgccaaaatgctggctgagcaccgcttcatcgccgcgcagcaggcagaaggtatttttcatctccgcgccgagggccagcagcggcggcgcgtcgcaaaagcccggcggcagcaccagcgcgtccggcacgtagccgcgggcgcggcgcagcatctcgccgctttgccgcaccaccgaatcatccatccgctgcacaatctcgcggttatgcagcagaaaaccgtcggcaatcgcggctaa

SEQ ID NO: 206856 - DNA, 819 bp, Klebsiella oxytoca
atgaacatgcgaaccctgtcactcgccgcgcttaccctacttgatgtcccaccaccggaacaggtacgcattgcggcccaggccggcttcactcacgtaggcctgcgcctgcttcccgcaaccccgtcggatccggattacgctatgctcggcgatacccccgccgttcgcgataccctggcggcgctgatggcaaccggcgttcgcgtctcggacgttgagattgtccgcctgacgccggattttgcactgaacgcccgattgcggctgttccttgataccgccgcgcgccttggcgcgaagcaggttttagtcgccggcaatgatgataaccgggcccgcagcgcggaaaatctcgctcggctggccgaagccggccaggagtatggtttaaccatgaacctggagcctatgccatggacccacctgcgcaccatcgcagaagcccaggcgctgatcgccgccagcggccgcagcgatatcggtatattaattgatgccattcacttctggcgagcaggcgaatccctttcgaccctcgccacgctcccgcaaaattacctcaactatatgcagctttgcgacgcttcgccgcaagcccccgctgacgagcaggagctgatttaccaggcccgcgccgcgcgccaggtgcccggcgaaggcggactcgacctgcacggcctgatggcggcgcttccggccacgctgccggtctctgtcgaggttccgctcagcggcgcccggggcgctctgcctgcgctcgctcgcgctcagctgctgtttaacgccgcgcagtcctacctgcgcccttgcgcataa

SEQ ID NO: 206857 - DNA, 3156 bp, Klebsiella oxytoca
atggcagaacaagaatcacggctagcgatacgcctggacagctccggggcagagaagcaggctgacagccttattgttgcgcttgataagatgactcagtctggtgataaggctgtaaccagcatattcaaagtgacaaaagcgactgacgaagaaaaagatgctctcaataaattacgagcagccattgatccggttggtgctgcaattgatacagtcggtcgccgctatagtgagctaaaaaaatacttcgataagggtctaattgacgaggaagagtttcgttcgctgtctaagatgctgaatgacaccactgaggaactaagtggtgttgcccaagctcaacgaaaagcagaaaaggccagcaaactggctgctgtgcagcaggaggcgcaggctgatgcattccaaagaatgctcgataaaatcgaccctctggcagctgctcttcgcaatcttgaacaacaacaaagtgaactgaatactgcctttaaatcgggcgcaattaatacttcccaatatgatgcatacagcaaaaaactgcaggagactcgtcgggaagtaaccggcgaagcacaagccgagcgcgaggctgtaaaagcacatgatgagcaggtaaatgcactgcgtcgtcttgaggcccaaatagatcccgtaggtgaagcattccgtcgccttaacgagcagcagcgccagctggatacagctaaaacatccgggatgctgtcgcccctggcttacgatcgcctcaacagcaaacttgcagaatcccgcgatgccctggagaaaacccaggcgcaattgggtaaaacaagccaatctgcagctcagactgccaacgctatgcgcatgatccctgctcagatgaccgatatcgttgtcggtctttctaccgggcagtcaccgtttatggttctcatgcagcagggcggtcagctcaaagatatgttcggcggcattgggcccgcgatcaagggcgttggcacatatgtcatgggtctggttaatccctacagcgtggcagcagcttcagttgggttgctaacgtatgctgtctatcagaaccgacaggaaattgatgctgcgacaaaaatagccacaacgtctcttggcgctaacggagatgctgcagaacggctggcgcttaatatggttgccatatctgacaagaccggtcaggcgattgatgaagtcggcaacatgtttatcactacgaatgacggcgctagtgaggcaataaataaattaatcgatgtcggttatagttacgacgaggcgcggcagaaagttgctcaatataaggactcggccaatttcacggcgctgaatactgatatcgtgcagcatcgccgggagatcctgaaaataggcgacttgtggacagcggcggcgattaaggtcaaaaactattacaccgcagcagataagggcaggcaaaacgtagcgcttggcggggctattgaccccaccatgcaattcatcggccaggctatcgatctgcaaaatacaatgaacgccctgaccgtgcagggcaataaagctgttgctgagtctgtggactggatcaataaagaatatctggctgcggacagagttgctggcgcggaggaacgcttaaaggaagccagaacgcaggccagaaaaattgccttttcaggcaacaaagaggccattgagcaagccaacgctttgattgctgttcgtgaaaaggagcttgatcaagccaagaagggacagcaaccaaaaacgcccaaggggaaagcctacacagaagatgcctccacccgactactcgaccagatcaatcagcaaactgccgctatgcagtctcaactggacgcaagcgataagctcaacagcgcgacacaggctcgcgttaagtttgaacagcagattgccgatctcaagtctaaaacccagcttaccgccgaccagaagtcgattcttgttcgttctgaagcaatcttgcaggcctacaagcagcaggaggcgttacagaactccgttaagactttggacgactaccgcaaaatgcaggaagagatagcgccgaaggagctacggcaaaatgaggcgctgcaaaaacgcctcgaaatcctgcaaaagatggttgaactcaaaaaactatcaccagaggacgccgggaaacaggcaaccgacctgattagtaaatcaattctgccggattccgtcatatcaggtgttaacaaggctggtggaacgctcacttcaagtgcgactaacagcgacctggcagggcaaggcctgaacatgataggcctgcaaatcgatccgcagcttgaaattattgataagttgaaacaggcccagactgattatgcagactggctgaatcagcaacagcaggcgataacgcagagcactgtatggaatgagcagcagaagcagcaacagctactggccttgcagcaacagggccagcagaatcaggaggcgttaagtgctgctgtctacgttgcgcagatgcagtccgctcaaaactccttctccggcatcaccgattcgatgggaaagatgtttggtgagcaatccgcgatgtataaagccgcttttgtaacgcagaaggcattcgctatctctcaggcagccctgcagcttcctatggcgatggggcaggcgatggctggcttgcctttcccggctaaccttgcagctgtcgctcaggttatcgggctcatggcctccattacttccagcatcaccagtgccgctgctgttggcttcgcctctggcggctataccggccccggcggtaagtatcaacccgcgggtattgttcacaaaggtgaatacgtcttcgatcaggcatcaacgaaccggatcggggtgtctcagcttgaggcgcttcggaatggtaaaccgctcgatgccacgctcagcaaaccgggttttgggaccggggtgcagaacgtgaatagtgataacagcaggaaaaccaccattcacgcaccgatagcacagcatttccattcacctgctggtgtaacccctgaccagatggctatctccatggcacaaacgcagaagcgggcgacaacggaagccctggatcaggttgctgcgcaattgttgagaggggatgggaaagttggtaaggcaatgcgcagtaaatatccaggcagagggttagagtga

SEQ ID NO: 206858 - DNA, 330 bp, Klebsiella oxytoca
atggctggattaaccaaagagcagcgagctcaacgagcggcggaaaaatttgctgccgagctggctgagccgaacaattctcagcaggagcaggagcaggagcaggagcaggagcaggagcaggagcatgagcaggagcaggagcaggagcaggagcaggagcaggagcaggagcaggagcaggagcaggagcaggagcaggagcaggagcagcacttggtagtaatggtcacggattatcctacattccccggcgcaccgataaccgcagatgtccaccctgaagaggttgaaaactggaaggcgcacggctggaaagaaatggagtga

SEQ ID NO: 206859 - DNA, 465 bp, Klebsiella oxytoca
atgattagtgatttggttttaactcttgtcaaaatagccgcagttggcgctgtggatttcagttcaccatcaccaaaaggtcagataattcataatgggcctcctcctttagaaaatagtgaaattacagctgatgcccttcatgcctatgccaaagttgagcaagaattagcaattgctcggcgtaccttaatttctgaaacagttgaaatagaagaatattacggcaattcttttaagggtgatgctggtgcgaaggttagtacaactgatttaggtataggcattcgcgccgaaaatgggaaagtcacaaaacgcgtcataaagttctcaggtttcaacgcagaaactgaatcaattttaaatgcaatggaagcatctctgcttacgaagttgaaggcggaactctctccaaagcaggatgggtatataactgatcaaaaaataccaacccataatccttag

SEQ ID NO: 206860 - DNA, 558 bp, Klebsiella oxytoca
atgagtactgaggttgtttctgttataaaccaatttccttgggccgcgctaatcacggccttgtctggtttaaccggtgcgcttggtggtgcttttttggcaaataaatttgctgataatcgatggcataagcaagtttcttttgaaaaagagaaggaacgtatatcgatgctaagggggaaaggggaagaattacatattcttgtctcaaaatgggggaaagcaacagtgaattatcagctctgccagctacgtgcgattaaaggaatcatatctgaggagcaaatgcacactttgacagcggagcttttaccaggaggcgatgttcacgacagaatggatgcacttttatatctttacttcccatcactggataagtttatgaaggaaattcgagagagtttaacggtagggaatacgatatatcatgaagtaattaatggccaccgggataggaaaactggctacgatctctttgatgaagctgccagcaacttagatggtgctgtagagagaatgaaagcgggaataaggaatattcttggggcgttggattag

SEQ ID NO: 206861 - DNA, 336 bp, Klebsiella oxytoca
atgaatattgaagtgttacagtacctcgaaagagacggtcgcgaacacgtagaagatctggttagcagaactaagtatgacagtgaggcaacatttgctgttatgagaatcctgattgctgaagatggcaatgaagaggtgctaacagacaagcaaaaatatcatcttcaaacttttatcgaaccattaatctaccgtgtcccttgctctggcatctatggcgaagattcctgcacaggtgatggctttgttgacgatgaatctctgttgataagctatcaagaagatgactttaagtgtcagcattgccgttatgacagtgaaaggcaccattga

SEQ ID NO: 206862 - DNA, 378 bp, Klebsiella oxytoca
atgcatgattacattcactcgagggatgggactcatacgtgctatgaaaatgatggagataaaatttttataaaagcactggttggagaggggctccagtatgagattgttaactacatgttgcattctacggcgaaaaagacacaacgcctgcagttttttatagatgattgcgcggcatcaagccgcgtaatttttcctgacgctgaagaaatcagcactcgatcaaattttcattttatttttgagtttgttgacatcttcgccaggccttatgagacgtgggccgggctattattacgcttccgcaacctcaatttaacgtcaaaatcaactcttgtactcaaaagaatccttactagaatactcaccatatag

SEQ ID NO: 206863 - DNA, 192 bp, Klebsiella oxytoca
gtgaaaaaaatcctgctagcactcttctttgtcggatgtttcgctgtaagctctacaatgtattactatctctatattcaaattaaagagagcgatgagctaccggagaggcaaggtgtagtggatgagaaagtggataacagcgattattttttttatgtgctttctgtcagggatggctatttactatga

SEQ ID NO: 206864 - DNA, 249 bp, Klebsiella oxytoca
atgaatgagaagaaaaataactctcatatggccatggcaaatattgtatttgatgagcatcagaatctatatgtttccaccctcatgatgcatgatgtcagaaccagaagtgaggcttcccgaattctcaatagaattactgacatttataaaagatatagggaatcggaaattagcaaccaggaagcccatgacgagattatgcatattatgatgacagagccactgtttggaatgtgtaaaaaatag

SEQ ID NO: 206865 - DNA, 639 bp, Klebsiella oxytoca
atgcctataagtaatcagttgaggccacaccctcccattaacttgactaaccctgaattcccgccccagttcataactatcatcccggccaatgaggtttatagctgggttagcgacaacattctgatggagagcgggcatctctataaccctgatcattttcaccttcactccgctgatatcgccttcatgtgggcatcgaatacctttcataagcgaagtcgcgccgtatttggacagtgcgaagaggtgatgctccgcgccggtggttggcagaaagcccgaatggagcagcagatgcatgaatggttcggtcgcataccgaagttcatcattacgctggctgccgactactgcgagcaatgcaacgatctggagttctgcgcactggtggagcatgagctttaccacatcgcccaagctaccgatgactacggtgcgccgaagttcaacaaagagaccggtatgccggtgctcaatcttcgcggccatgacgtcgaggaattcgttggagtggtccggcgttacggcgccagcaaagacgtgcaggaaatggtggatgcggcgaacaggccggcggaggttgctcatatcgatgttgccagggcgtgcgggacgtgcatgctgaaactggcttaa

SEQ ID NO: 206866 - DNA, 204 bp, Klebsiella oxytoca
atgcagtataaagtgctatttcacgcctttattgaaggcaaaaaacaaactcttgatgctgtttttgaatcatctaacgagccgaagctcaatgataaggaagttattaaagccgtgatgcatgctctctctgacgtcgtaagcgtggaaacttcaacttttacgattgagttccatattgatgctgtcgtaccgatagtttaa

SEQ ID NO: 206867 - DNA, 246 bp, Klebsiella oxytoca
atggatgaaataaaaaggcatgctggacctagtgaggaatacagcatgggtattgatattggtaaaacaacaatattccgatacaacaggctggtaaagtttaggcttgaactgactaacggcacgatcgtggaaggagtcattccggccaattcggaatttaaggttacgcctcaggatggggatatcaaaaagttcgatgtcatcatcgaagatattcctaagacgccacaagttgtcgaatag

SEQ ID NO: 206868 - DNA, 165 bp, Klebsiella oxytoca
atgcagacggcaggaacggcggtatttaatctatataccgacccgcaggaaagcgatgccatcggcgttcgtcatatcccgatgggcgtgccgctacagactgaaattcatgattacatggaaattttgaaaaaatatccgccaaaagtgcaaatcaagctgtaa

SEQ ID NO: 206869 - DNA, 696 bp, Klebsiella oxytoca
  misc_feature (609)..(618): n is a, c, g, or t
atgagtcgcgccgtcaacgctgttgaaatggccctgagcgccgatgacatccgcgagcgcgttcgcgcggcgggcgtggtcggcgcggggggcgcgggatttcccgcccacgtgaagctacaggcgcaggtagaaattttcctggtcaacgccgccgagtgcgaaccgatgctcaaggtcgaccagcagctgatgtggcagcaggcttcgcgccttgtccgcggcgtgcagtacgcaatgacggcaaccggcgcgcgcgaaggggtgatcgccctgaaagagaagtaccgccgggctatcgacgccctcaccccgctgctgcctgccggtatccgcctgcatattctgccggatgtctatccggcgggcgatgaggtgctgactatctggctagcgaccggccgccgggtcgcgcccgccgcgctgccggccagcgttggcgtggtggtcaataacgtacaaacggtccttaacattgcccgcgcggtcgaacagcagtttccggtcacccgccgaacgctgaccgttaacggcgcagtcgccaggccgctgaccgtcaccgttcctatcggcatgccgctgcgcgaagtgctggcattggcgggcggnnnnnnnnnngcttcaggcccagccagacggcattggcgggcggcgcgacggtcgacgaccccggttttattaacggcggcccgatga

SEQ ID NO: 206870 - DNA, 1230 bp, Klebsiella oxytoca
atgatcagaaataaagataatatcagcgatggtattaatatttttttagacatgcataaaacagattttttaagacctccttttacaatcaaaaaagatataattactgaatatagagatatttgcgataggtatttaaaatttttagaatctcatatttctgaaatgaataatggtttcgcgagaaaattatcaagaagattggaaaaaacaaaaattatatcaattggtataactgagtgcttacaacattttttatcaggggatataaagactgcatatgatagtttcgactcaatatttaatgatactacaatatcaaaatacatacaaaatatatcaattccattaaatgaaatttgcaacaaaatgaccccactttttcgagttagaaaatcagactcacctctcattacacgtgaagaaatgtttcatatcccatttaaactacggcaccttgtaaatgctcaacgatactcggttgccggattgccctgcctttacttgggttcttcattatatatatgctggcaagaaatggacaaacctgattttaataaattatatttatcatcattttcttcaaacgatgataatgcaaaagttctgaactttgcatctgatatactttttgggaaacttagagcattacatataccgaagcatttgcagtactctgaaattagtatcattacacagttatcttacttgacgttgtatccattgataatagcttgtagctttataaaaaaagcaaaaaacgcatcattcaaccaagaatacataataccaaatttgcttatgcaatggattagtcgaagaaacagatctaatgtaatgggtatagcatatcggtcaacaaaaattaaaagaacaacacaaaacaaaagatcgataaatgttgtattacctcccaaaataacctattcacaaactttgtctcatgatttttgccccaaattatcgtcaatgtttgaattaacccaacctatttcctggcaagttttaaaaacccttgattatgatgtaattgacaatgaagattcggcaagacaacaagccatacataaattaaaacggagagaacatttttatggaatagaaaattttgatgaggaactttttgattctttctatcccttaactgattttttcaagctcgagaactcaattgacaaattatttgaatactccttcctagatggcgacagaatggcggcagaggactga

SEQ ID NO: 206871 - DNA, 633 bp, Klebsiella oxytoca
atggcgagtatttcaatgggtgccgattcagggggtagagaagctatcgagcgactgcaaaaggcttatggacttaagacaaagcaggctctaagcgagcagcttgacgtttcaaaaagtaccatgtcaaacaggctattacgtgatagctttcctgctgactgggtaattcagtgcgcgctcgaaacaggggtttccttgctatggctggctacaggccacggtgagatgtacgctcaaaacgaggccataaaaaaacctcataatgagacaccacctacaattcgaccacttgcaaaacttgtcgcgccatcaatcaagcaagtaacgttagaaaatggcggcttaatcgataatgatgatattcacctcgatcacagcattctccctaacgaacctgttcactgtttattcgttaacaatgctcatgagagttatgtagtcgatcaatctctgaaacagattacaaatggactatggctcgttgatattgatggggttaaaagcatcgtgaaattaacgcggcttccaggaaacaaattagccgtccatcaggatgaatcatcttttgaatgctcagtagatgatattgaagctatcggacgcgctgtaaaagtgatcaagagcatctaa

SEQ ID NO: 206872 - DNA, 276 bp, Klebsiella oxytoca
atgaaaaataacgaacaacaaaatgaagcgcttaaacagttaactaccgttcttaccgaggcaggcaatcaaacacgggttgatgtgctcgcccattcagttctgttgcaggctatttttgctgttctttccgaagaacaaaaaaagcaaatttttaaaacccttcaaacagcaactgttaatcagcacgctgcgactgcaggcgttgaagcagaagtaaaaatgtctctcgctcagcttttaagcggttttttaactcctcagaagctgaattaa

SEQ ID NO: 206873 - DNA, 189 bp, Klebsiella oxytoca
atgcaggactattttctggagtcgttgaagctccagcgcattgatttttttatcaagcttgtagcggcgagtgagtgtgatgatgaagaaaagcagctggctatccagtgggtttcagagttaacggatgagctgatggcgaagattcgtgctcacgaatacacccgttcaatggctcttcccggttag

SEQ ID NO: 206874 - DNA, 1161 bp, Klebsiella oxytoca
atggatctggctaaagttgaagaacgcgtccgaagagtcataggaacaatggagtctgctgagcttgatgaatatttttggggtaagcgctcgggtttggcagactcattacctccgtattatctcgtttattttctcttggtagatttactgaaatttaaaaatcgtgggattgatgagaagatttctttttctatcccagtccggattgatgggattgtcgtaattatagagcatcgtaaacttggtttagatataattatcaaaaatgatgatgatatagagaaggctaaaactgttttgagacatatttgtgcaggggttaaagctgctacggaattttttgactcgcttgcagacaatgcagcaaagacttcaaatctaaatgttaataacaatgctaattctctatatgataggttttgctattttttagagctatataaactgaagcttgatgaagctgctgctggccaagagcctaaactggaagttgatagcgagtttaattctgataattttttcagcctgttacaatcctcttttgaacaatcaaataaggtaattgaacttcgaagagaggctatgtggttagcaacgtctgcaattgagtcatttttcaattggaccgaacatgtttttattcttattgcaatcttaaagggtgagataaaaaatggggatgatgtggctgataaagttggaaaagaatggggggagaaattcaaattagccattgatattaactcttccagtctgaaatcattctatgatcgtttacttatactcagaaaacaggtgcgtaattttgtagcccatggcgccttcggtaaggatgggcaagcattggaatttcactcaagtgtgggggctgtgccactattgctgcctcatcgagaaaataaagaacgtttcaagtttggaaatggtgtgcattttttggcacctgaagctatgcaattaatcaacgattttcttgagaatttgtggcagggtgagctatccccagcaaaaatttatattgaatctggatgtcctttaatactatcttacgtaattaatggggcctatgcggaggcgatgaaatcagaaaaggatatggatttatttgttaattatttaactcgcgaattggataatgccgcaaacatggattggtaa

SEQ ID NO: 206875 - DNA, 1131 bp, Klebsiella oxytoca
atgtataacgtagtgctagatactaacattttacatgaggaagggcttaactcagctggtatgggggttgttaatcgcttggtaaacaaccagattattaatcttcatgttccagagttagtaattaaagagtttaccactaaaaaaatcgatgggattattgattctctttcaaaagcatccggcgtgttaaaaggcatggatagagatataagagctacggaaacaaatttatttcatgaagtagatgggattaaagtgagcattgatgagctatcatctagcattaaaggcagagttgatggcatcatgcaaaaatggattaatgaaaatagagtaagcgttcttcctctgaaaaatgagtatgccatccctgtttttgaaaattattttgtcggtggaggtgtttttagagcgaagaaggaaagaggagacatacctgatgcttttataaatctgagcatcaatgaattacatgattcactgggacgattggtaattattataaaagatggtgtttttaaaaaatcattattgcgaaataaaaatttcattgtactggatagtctgcaggatttatttgagttacctgatatcaaatcctctatcgagaacttagatgtaacatcttttgtttcatcttcagcctactctcaagcaatggtgcggttgttgcaaactaagcctggttattttgaaagtatttacgtcgagccattagaaggtcgagaactaatagctgattggatctgtcatgttgacgctgaagttgatgatttcagtcaagttgaaaatatcactatcgatcgtgtgcataaaatttctgagcagcattttgcagcgaaaatttcattccaaatggattcaggtatttcatatatcacagactatggtgaggttttgaaaattgagagagataagaaaagaaccgctgactgttggagtatgaatggtgatggaatgtgtgatgtgactgagcgtgcacggttacatttttatggcgatttgaatatattctttgaggtgccaatagattcactagcgcaaggggacatcgattcctatttcgaaagtgatgctatcaaaatgactattgatattaatgatgcggatattataaagctactttaa

SEQ ID NO: 206876 - DNA, 603 bp, Klebsiella oxytoca
atgagtagcagcttgttaccgccgggatcgtctgcgctggagcgcaggctggcgcaggcatgttctggcatcaccgatttaaacgtgccgctgcgcgacctgtggaacccgtggaaatgcccggcaaagttcctgccctatctggcctgggctttttctgtggaccgctgggaggaaacctggacggaaaccgcaaagcggcaggctgtcagtgatgcgttctggatacatcagcgcaagggaaccgtggcagcagttaagcgtgtgatcgaagggctgggctactcaatgaccattgaggagtggtgggaagtcgccgaccctgcaggcacattccgtcttgaggttgatctcaatgatattggcattactgagccaatggtcgcagaacttgagcggattattggcgatgcaaagccagtaagcagacatatttctagcttgaccctgtcagccagtacgcgcgggcctgtcagtaccgggcttgctctttttgagggggatatcatcagtgtttatcctccgggatatcagcctgatgacagcattcactacgatgcacagcactatttctttggtgatgtgactttttcaggaaagtaa

SEQ ID NO: 206877 - DNA, 2124 bp, Klebsiella oxytoca
atgaatatttcagaagcaattacctgggctgactttatctatcaaatcgcccgttcggataaggtggaagggggtaccggtggtgtagccaatattcaggcaaaacaactggctgaccgcacgcagtttctgaaaatgctcattgagagtatgtcagattaccgtgagtacacgtttattaaaacagaggctgacccggacggtacaatcgccggtctcgccagtacgccagacgggaagatgtttcgcgtagctcagagtggagcggatatcctcagttttcgttactacctcaataattccggggtggctgaagaggtcaccgggttgctggggcgaggctctgtcacgaataacatacgtatatttgattccccctcacttgcggaagaggatttatctgtcggtaatatattgcccggcgcgcgggtttatattcgcagtgacgacaatgcagccattgcgtatgagcatattaataatgctggtacgcttgagaaaaccggtgaatatattccgtcaaaagagggtgtcgttaaaccgaccgacgaatattctgacggggctgattatatctgggggaaaataactgagagcggtcatttactgccgggaaccctgcaggggcgggacgggttgcctgcgcctgaaaacgtcgccgcatatgcaaaaaaaggcgtctccgttttctctgatgccggggataatcccgccggacatgccattgtaaaagacggtttcgttttggcgtcatgggaccagagcggaaaggtttcgtatctgccgccacttacccggcaggctcaggcgtcagtaatgacctgtcccgtgatgattccgacgcagttacctgaatctgtacgcgctgccatcgaaccgtgtgcgaaactggcgtgcaggtacacgcttactcaacagctaccttcatgggttccactggctggcggagcaggattcccggttagtggttcaacgatgtcccttcttgaatcgtattacgtgacgcttgccgccgcagcatcgtggatagcatgggtggatggtggttatgctgaatgggatgaggccggtatcggggtcagttattcagatgccatagcctggactgcgcagggggttgaatccgtcgccgctggtcatatcgcaaatggcgggtggtggggaggcccgatgccaccgtggagcgatgatacggaaagcgtggccttaacatttgcatcgcaggcggcggaggcggcgcggaatgtctctaactatgctgacttaatctggcatcacctgtcggataccgccagggaaaaagtgaaactcatggtaacgcatgaggctaatcgcttcgtaagttatgcccccaaatatatgtattcactccctaatcagttcggggcagtcgtcaacaactaccccggcgattctaaatcagaagagctggcgtggaatctggggattctggcccgtgcgctgcttcttgacccgggcaacgaaaacgcagagcgctgggcagagcgaatggtgacgatgcagattgccgcgctgggcgaccgaaatgacctctctgacgcgatgccactcaatgggctggctccccgcgatactctgcgcggaactaacgttaaccctacgcgtcttgttgaaaaccataatgttgctgatggtcaggatatttcacgctggtattcaatggcggcgctgtccggcagtgaatggataatcagaacgtttttccgggcgaatctgcctgttcccgccgtcgcgctgtggcatctgagagacaccatgcgggcggtgacgtatatgcccgatggctctttatgggatatggactggcgcgagccggttggcgaactctcgtatgcaccgcttatcgcttacatgtttgcggaccctgacgagaattatgtgacgcaattcctccaccgcgcatccattttcgccggacaacaggacccgatgaccggcgcgctgcctgatggcgcatttaactggcctgtctacggttcgtcccagccgggtgaatttttacaaatgattatgctgtcggcgcgaatgaatgacccactgaccgcgccgcattcgacaaatgcgcactattcacatcttgccgctatctacaggagcatgtaa

SEQ ID NO: 206878 - DNA, 774 bp, Klebsiella oxytoca
atgacgctggaaattgttcccggtaccctgcaaaacccggacccgatggttaaaagttttgctccctattctccggctatcggagtgacgggttataccgaccgctggcgccctgcgcttgatttcgctgatgcatctgccggatatcaggttctgtcatacccaagcccgctcgaccctgtgaatgttctggtcagtgatacagtcgcgccacctgaaatcattgatgacagtggggtaaggctacttaactgcgccacccagggcgacacgtcggccctcacggactcaaaccggaaatttaacacggatgccgcgtttctggtggtctggaaagaaaccgcaggcggaagtgtgccacacggtattttgactgccgccggtctccgctttggtcgagcttccgctggctggagcatgagtaaattatccgggacgccaggcgcgacactgaccatatcacacgatattgcggcaggcggcgtcactattggggcgaaaatgtatgctgcgattgttttaattcccgcagatggtacgcaggacgtttcactcacgcttatcggtgccgggcagtcacccgtgactaaaaaagcggtcgttgcccgtggtggctcactcgaagaaaaccgccgttttcgtatcgggaaagattcaggaaataacgcagataacggccctctctatgctgagctggtcgtctgggaccgtctgttgacggcagatgaaatccccgttattgccagttatgccgccagtacctacaacctctag

SEQ ID NO: 206879 - DNA, 354 bp, Klebsiella oxytoca
atgggcggcggccagccgcgggtgcccggcacggtgaatctggcctttgagtttattgaaggtgaagccattctgctgctgttaaaccaggccgggatcgccgcctccagcggcagcgcctgcacctcaggctcgctggaaccctcccacgtgatgcgggcgatgaatatcccctacaccgccgcccacggcaccatccgcttttctctctcgcgctacacccgggagaaagagatcgattacgtcgtcgccacgctgccgccgattatcgaccggctgcgcgcgctgtcgccctactggcagaacggcaagccgcgcccggcggacgccgtattcacgccggtttacggctaa

SEQ ID NO: 206880 - DNA, 252 bp, Klebsiella oxytoca
atgcccctgcggcgggcgagggacgttcagcggcccgcgcacgcggaagaactcgcccgcgaaatcaagatgatgcaccttactggaatcggcaaacagcccgctggctttgtcatagcgcaccgcgccgtcttcccacgagtcccacagctgagtgaccacatcaataaactcaccggcgcgctggtagcgcctgccgtgctgcggcaggtggtcaaggccgaagttggccgcttcctcctccagccatga

SEQ ID NO: 206881 - DNA, 966 bp, Klebsiella oxytoca
atgagtaactttctgttagaagccggacgccagaccctaatgctggagcttcaggaggcgagccgcctgcctgaacgcctgggcgacgacttcatccgcgcggcggaaaccatcatccactgcgagggcaaactggtggtctccggtatcggcaaatcgggccatattggtaaaaagctggccgccaccttcgccagtaccggcaccccggcatttttcgtccacccggcggaagcgctgcacggcgatctcgggatgctcgacagccgcgacgtgatgctgtttatctcctactccggcagcgccaaagagctggatcttatcgtcccgcgcctggaggaaaagtcgattccgctgctggcgatgaccggtaaatccacgtcgccgctggcgctggcggcgaaagcggtgctcgatatcgcggtggaacgcgaagcctgcccgatgcacctcgccccaacctccagcaccgtcaataccctgatgctcggcgacgcgctggcgatggcggtgatgcaggcccgcggctttaacgaagaagattttgcccgttcgcacccggctggggcgctgggcgcgcggctgctgaacaaggttcaccatctgatgcgccgtgacggcgacgtgccgcgcgtagacgtcgacaccagcgtgatggacgcgatgctcgaactcagccgcaccggcctggggctggtggcggtctgcgatgagcgcaatcacgtgcagggcgtgtttaccgacggcgacctgcgccgctggctggtgggcggcggcagcctgcaggatatcgtcagccaggcgatgacccgcaacggcgtcaccctgcaggcggaaagccgcgcgatagaagccaaagagcgcctgatgaagcacaaaatcagcgccgctccggtggtggatgaaaacggccagctggtcggcgcgattaacctgcagaacttttatcaggccgggatcctttaa

SEQ ID NO: 206882 - DNA, 912 bp, Klebsiella oxytoca
atggccggccagcgtttcccgccgctcctgaccctcgtcgccgcgaataacctccagcgcggcgctcagcgccaccgcctgcgccgggggcatggcggtgctgtaaatcagatggcgggcaaactgcagcagataatccgccagcgcctcgctgcacagcaccgccgcgccgctgacgccaaacgctttcccgaaggtgacgataagcagatccgggcgtacctgctgcgtatggcaactgccgcgcccctcttcgccgagcacgccgataccgtgcgcgtcgtcaaccagcagaagcgcgcccgcggcccgcgccgcctggcacacctccgccagcggcgcgctatcgccgtccatgctaaaaatgccttcggtcaccaccagctgctggccggtaagcggtttcgccagcaactcgtcaagatggcggcagtcattgtgctgaaagcgccgcagctgcgccggactcaggctggcggcttccagcagcgacgcgtggctgagacggtcggcgacaatccgatcctctttgcccgccagcgcggcaatcaccgcctggttcgcggcaaagccggaaataaacagcagcgcgcgcggatagcccagccagtcggccagctgctcctccagcgcgcggtgcgcctcgctatagccgctgacgtggccggagccgccgctgccgacgccgtagcgctccgcgccctgctgccaggctttgacaatagccggatgctggctgaggccaagataatcgttgctggaaaaattgagccagcgccgtccttcgcggctgagccagcgtcctgcgcccagcgtcaccggcaggcgactgcgcaaggcatccgccgcccgccgctcctccagcgccagctcgatgcggtgctgccagctcatagcgccgccgcgttgtaa

SEQ ID NO: 206883 - DNA, 321 bp, Klebsiella oxytoca
atggtgtatccactgctgacccgtcagtgtctgaccgtaaggctgtctgcggtgaacgggatgccgaagatgtccggcgctgtctgtatgccgggcattgaaaaggacgatatcagcctgtgcttcgcgtgctgtgcgcagcctttcctgcagaaaatctgccgcaacccggtcatctgcatccaggaacaccacccattcgccacggtgaatcgccagtgcagcattacgggcagcatacactccctgattttcctgccgaatgaggatcagtcgttcatctgtaatagcgctgagtaccgtccatgtttcgtcggttga

SEQ ID NO: 206884 - DNA, 453 bp, Klebsiella oxytoca
atggcgtatccactgctgacccgtcagcgtctggccgtaaggctgtctgcggtgaacgggatgccgcagatgtccgacgctgtctgtatgccgggcattgaaaaggacgacatcggcctgtgcttcgcgtgctgtgcgcagccgctcctgcagaaaatctgccgcaacccggtcatccgcatccaggaacaccacccattcgccacggtaaatcgccagtgcagcattacgggcagcatacacaccctgattttcctgacgaatgagaataagccgttcatctgtaatggcgctgagtaccgtccatgtttcgtcggtggagccatcatccacaacaatgatttcagtactgagtgttgtttcgccaagcagtgtatggaccagaaccccgatgctgtcagccgcattgaaggcaggaatgatgacgctgatatcgatgttgattttcattga

SEQ ID NO: 206885 - DNA, 507 bp, Klebsiella oxytoca
gtgcaaatcggtcacggtgataaatccacgccggtcgcagcggctgacgtcttcatccagctcgtcgtcccaccacaggccgacgcgctgatggctgaccaacatctggttgacggttttcaccgccgcgcggaagtcgaccattcgggcattaagctggaacgccagggtatccagcgccgccatctcgttgacgtcggtggcggtggtgatcaccggatcggcgccgagcatcccggccagatagcggctcagggcatttgcgccccccgcgtggccggaaagcaggctaataacgtgctggccgcgctcgtcaatcaccaccaccgccgggtcgctgaacttgtcattcaccagcggggccagcacgcgtaccgcgatcccggtggcgccgatgaagatcagcgccgaatagctgctgaaggcctcgcgcgcggcgctggcaaaaccgttttcaaagggaagaaacccctcctccagcagcttctcgctggtaaaacaggttaa

SEQ ID NO: 206886 - DNA, 1017 bp, Klebsiella oxytoca
atggaacaggctttccaccttagccagcgggaacttcttgatctcttccgccagatagcggtcctccagccccagctcacgggcaatgatcatcgtcaccatatcgcctgctccggcgaggtgggtggcgatgatttcgcctttagggttgatgatggaggcatcggtggagcccgcgccgaggtcgaggatcgccagcggtcgggtggtgcccggcgtggtcagcgcgcccaggatggcggcttcggcctcggcgccgccgatctgcacgtcgatattgagcttctgctcaatctcgcgggcgatcatcgccatctgcaggcgatccgatttcaccatcgaggcgatgccgacggcctgctccagcgagaactccccagccagtccgccggtgacgctcaccggtaccgaggtatcgacggccagcagatcctgaatgaaaatctcgctgctcggcttgttggtcagctcggccatggtctggcgcacgtgctccagcatgccgccgatattggtgccggactcaccggtgacgttatcgagcctgccgcagccgtcgaccgctttcatgatggcctcggcgccggcggcgacatccacgcgcacgctgcgcccctgggccagcagcgccaggttaccggcggggatcgcccgcgctttaacgtcgccggatggcgttttgaccaccacggcggaacgattgccaatcagcgcccgggccatcgggacgatgtttttggtctcctcggcgttgaggttgaatacggtggcgataccgtaagggttggagagggtttcgataaccttccccgggacggcgacctcaatcgccgccagcattcccagcggaatgcggtcgatgtacagcacttcgtcaacgatcggcagcggtttttccagccggttgctgaccagcacgccatcgtcgcgttgcaaaatgacgccggtaatctgatacccggcgcgcagggaggcgttgataacgttcgcgatatcggcaaaatcgaaggccgatga

SEQ ID NO: 206887 - DNA, 165 bp, Klebsiella oxytoca
atgctcatgctcgcgcagcgcatcagcggtaaaggtttcaaacggcacgcggcagcaggaggccagctgaatcagcccctgctcgtgcttcttcagcgtgacgctgccgatggctttcagcgccagcggatcgaggcgctgcgcctcaagctggcgcgccagtag

SEQ ID NO: 206888 - DNA, 840 bp, Klebsiella oxytoca
gtgactcggattcggacagcgattcggattccgacagcgattcagactctgacagtgactccgattcggacagcgactccgactccgacagtgactcggattcggacagcgattccgattctgacagcgattctgatagcgacagcgactctgactccgacagcgactccgactcggacagtgattcggactctgacagcgattcggattcagacagcgattcggattcagacagcgattcggattcagacagcgactccgattccgacagtgactccgattctgacagcgactcggactctgacagcgactcggactctgacagcgactctgactccgacagcgattcagactctgacagtgattcggactctgacagcgactccgattcggacagcgactcggattctgacagcgactccgattctgacagtgactcggattcagacagcgactcggatagcgacagtgattccgactctgacagcgattcggattcggacagcgactcggatagcgacagcgattcggattcggacagcgactcggattccgacagcgattcggattccgacagtgactctgactccgacagcgactcggattctgacagcgactcggactccgacagcgattcggattccgacagcgattcggatgctgacagtgactccgattcggacagcgactcggattcagacagcgattcggattcagacagcgactccgattccgacagcgactcggactctgacagcgattctgactcggacagcgactcggactctgacagcgactcggatattccgcaggccaacgcggataccaatactgcgctga

SEQ ID NO: 206889 - DNA, 1125 bp, Klebsiella oxytoca
atgctggccgcagtagttcactggataagctggtgtgatgccggttacgctgcctgggatgaaacgtttattggcgtcagttatgacgctgccgtttcctggattgtgcaagggctggatttagtggtgagtgcgcatctggcaaacggtggttggtggggaggcccgccgccgccgtggagcgaagcctctgaagatgtggcggtaactttcggctcacaggcggcagagctggcgcgtaatgtggccagccactgcgacctgatgggcgcacacctgacggcagcccagaaaacaaaagtcaccgcaatggtggtgcatgaggctaaccgctttgtgaagtacacgcccaaataccgctggacgcgcccggatatccgggggcaggtgacggataactacccgacaggcgattccaaatcagaagaaatcgcctggaacctggctatcctcgcccgtgcactgattttagccccggataatgccaatgctgagcgctgggccgagcggctgattacgatgcagattgcggcgctgggtgacagaaacgacctgtccgagacgatgacgattaacgggctggctccctgcgatgtgatgaacgggacaaacgttaacccgacccgcctcgttgaaaaccacggggttgctgatgggcaggacgtgtcccgctggtacacgatggcgtcattgtcaggtagcgagtggatgtttcgcaccttcctgctggccgggaagccagtgccatcggcagccctctggcatatggccgacaccatgcgggcgctggcctacaacccggatggttcggtgtggagcatggactggagggagcctgtcggcgaactgtcctatgcaccggcgattgcctacatgtttgccgagccgcgtcaggactatatcgatacgctgttgcaccgcctggcgatttttgccgggcagcaggacgacactaccggggcgctgcccgccggggcgtttaactggccagtctatggttcttcccagcccggcgaattcctgagttacatccgtatgtctgaccgcatgcaaaacccgctgacctgtccgcgtgccaccaatgcacattacaccagccttgccgctatttaccggagcgtttaa

SEQ ID NO: 206890 - DNA, 237 bp, Klebsiella oxytoca
atggagccgctgcctttggagaattgtccctcaccggtgatatatagcactaccggcaccataagtacggtggaaaggattggaataaagaagttgagcaatgagttgcaggccggatggtcaatcaccgggtccgcttcctcttcgccatgctcttgttctatttccgtctggaccgtttcaaacttaacctccgcctttttcatcggcccccagctacagccggagaggatataa

SEQ ID NO: 206891 - DNA, 360 bp, Klebsiella oxytoca
atgtcagcatgtatggctgtagttcttaacggtaataccgaaattaaatatttcccgttccacaattgtgctagcgctgaagtagcaaccgatatggcagacgagtggcgttatgccgccatcgaggcgataggttgggatgaagcgcatcgcttccatcttcgcgccgtccgtccgatagtcgtcttgcagctaccgtctggcgcagtagtggaatgtgacctggatgacgttgatattgatgcggtgaccggttcggatattgactgccgcctttccgcgttcgggtttgacagagagaaacgctattccggttattgggacttagacggcgctgaaattatcgaatacatcgcataa

SEQ ID NO: 206892 - DNA, 570 bp, Klebsiella oxytoca
ttgctatcggggttggcctcaatatcgctgtcagagtccgagtcgctgtcagagtcggaatcgctgtcggaatccgagtcgctgtcagagtccgagtcgctgtcggagtcggaatcgctgtcggagtcggaatcgctgtcggaatccgaatcgctgtcagagtccgagtcgctgtcggagtcagaatcgctgtcagagtccgagtcactgtctgaatccgaatcgctgtcagaatccgagtcgctgtcggaatcggagtcgctgtcggaatcggagtcgctgtcggagtcggagtcactgtcggaatccgaatcactgtcagaatccgagtcgctgtcagaatccgagtcgctgtcagagtcgctgtcagaatcggaatcgctgtcagagtccgagtcgctgtcggaatccgagtcgctgtcggaatccgaatcgctgtcagagtccgagtcactgtccgaatccgagtcgctgtcagagtcagaatcgctgtccgagtccgagtcgctgtcggagtccgagtcactgtcggaatcggagtcgctgtcagagtctagactggccccatga

SEQ ID NO: 206893 - DNA, 468 bp, Klebsiella oxytoca
gtgagcgcaaaacaagaattaaccgggcgaatattcaatattcagaaatattcgatctatgacggcgatgggatccgcacgctggtttttttcaaaggctgcaatattcgctgcccgtggtgcgctaacccggaagggctgaatagccagtttcaggtgatgttctcccaggataaatgcattaactgcggcgactgcgtcaacgtctgcccggcgggaattcattatcgggcggaggaaaacggcgaaatgaagcacttcgtcaaccgcaataaagactgtatcggctgccgcaagtgcgaagagatctgcacgcagaacgcgctggatattatgggtaaagatgtcaccgtcagcgaactgatggagatcatcatgcaggactacgacttttatatctcctccggcggcggcgtcaccattggtggcggagaaatgagcctgcaggtaatgactccaacttattga

SEQ ID NO: 206894 - DNA, 378 bp, Klebsiella oxytoca
ttgctggcttttggtcaacgtgcggttgtagtcatcgacgtcctcgcgcaccagcgcgatatcaaatttacccgcgcccactttccagttttcaagaccaatgcctgctgcggcatcggttctctgcgttttccagtccagcatctggatttcaattttcggcgcgccgtgcttacccacccagaaatccgcctccggtgcgaatggcaggaaacctttggtatttacgtacatatcagagaactgcatatagttctcgccgccagcgttatcgccaaaccagccggaggaatactgctgcccgacgttaccgtcaagcatcacaatggcatcaacccgcttattgtcttcctgatagacccgctgcttaagctgtaa

SEQ ID NO: 206895 - DNA, 2193 bp, Klebsiella oxytoca
atgtctgattataatgaaaaaagtgcgatctccgcacttctcgcaggtcattgttccgatccattttccgtgcttggcatgcactcaaccgatgcgggtctggaagtgcgcgcattattacccgatgccaccgatgtatgggtgattgaaccgaaaaccgggcgcaaagtcggtaaactcgaatgcctcgacacacgcgggttctttagcggcgttctgccgcgccggaaaaatccttttcgttaccagctggccgtcacctggcacggtcagcaaaacctgattgacgacccctatcgctttggcccgctgctgcaggagcttgatgcctggctgctcgctgaagggactcatctgcggccctacgagacgctgggagcccatgccgacaccatggacggcgtcaccgggacgcgtttttccgtctgggcgccgaacgcccgtcgtgtgtcggtggtcggacagttcaactactgggacggccgccgccacccgatgcgtctgcgcaaagagtccggcatctgggagctgtttgtccccggcgcgcataacggccagctgtataagttcgagctgattgacgcccacggccacctgcgggtgaaatccgacccgtatgcctttgaggcacagatgcgcccggaaagcgcgtcgcttatctgcggcatgccggaaaaggtcgaacagccacagtcccgtcagcaggccaaccagtttgatgcaccgatttcgatttatgaagtgcaccttggctcgtggcgccgccacgccgataaccatttctggctcagctaccgcgagctggcggaccagctggtgccttacgcgaagtggatgggcttcacccatctggagctgctgccggtaaacgaacatccgttcgacggcagctggggctatcagcccaccgggctgtacgcgccgacccgccgttttggtacccgtgaagacttccgctacttcctgaatgctgcccatgccgcgggtctgaacgtgatcctcgactgggtgccgggccacttcccgtcggatgactttgcgctggcatcgttcgacggcaccgcgttgtatgaacacagcgacccgcgagaaggttatcaccaggactggaatacgctgatctacaactacggtcgccgtgaagtcagcaactttctggtcgggaacgcgctgtactggattgaacgcttcgggatcgacgccctgcgcgtggatgcggttgcgtcaatgatctaccgcgactacagccgcaaagagggggagtgggtgcccaatgagtacggcggccgggaaaacctcgaagcgattgaatttctgcgcaataccaaccgtgtgctcggtgagcagacgccgggagcggtcacgatggcggaggagtccaccgacttcgccggggttacacgaccgtcttctacgggcggtcttggcttctggttcaaatggaacctcggctggatgcatgacaccctcgactatatgcagctcgatcccatctatcgtcgttatcatcacgacaagatgaccttcgggatgctctacaactacaccgaaaacttcgtgttgccgctgtcacacgatgaagtggttcacggcaaaaaatcgattcttgaccggatgcctggcgatgcctggcagaagttcgccaacctgcgcgcctactacggctggctgtttgccttccccggtaaaaagctgctgtttatgggcaacgagtttgcccaggggcgggagtggaaccacgacgccagcctcgactggcatctgctggaagggggcgacaactggcatcacggggtgcagcgtctggtgcgcgatctgaaccatacctatcgccaccataaggcactgcacgaactggattttgacccctacggctttgaatggcttgttgtggatgaccacgaacggtcggtgtttatctttgtccgtcgcgataaagccgggaacgagataatcgtggcgagcaacttcacgccagtaccgcgtcacggctatcgcttcgggattaaccagccggggcgctggcgtgaagagctgaacaccgactcgatgcactaccacgggagcaacaccggcaacggcggctgcgtggcaagcgaggcgatcgccagccacggtcgggagcattcgctgtcggtgactctgccgccgctggcgacaatctggctggtacgggaatctgcagggcaataa

SEQ ID NO: 206896 - DNA, 252 bp, Klebsiella oxytoca
atgggcgggatcagtatctggcagctggcaattattgccgtcattgtggtgctgctttttggcactaaaaaactgggctctctcggcgccgatctcggggcatcgttcaggggcttcaagaaggcgatggatgaagaggacagcgcaccggcacaacctcagaaggcgcaggcacaaccgacacagttgaatactgaagcgctgtcacatgccggacaggacgctaaaaaccgcgatacctttcagggctga

SEQ ID NO: 206897 - DNA, 786 bp, Klebsiella oxytoca; identical to SEQ ID NO: 102977

SEQ ID NO: 206898 - DNA, 771 bp, Klebsiella oxytoca
atgaacaatgagcaaattaaaatttgttatttctgtggtgaacttgcgacatcaaaagaacacgtgcctccacagggattatttccaaagaaagatatttacagaaacaatctgattactgtcccctcatgtactctccacaacaattctaaatcaacattggataataaaatgttggtttttttatctggagtaaacaagagtgtatttcatgaaaaagacttcaaagaggtaagagaccggacgataagagccatagtaagagactcaactatttttaatgatttaaccgatgaagcaagagtttttaaaagaaaagataaaagaaaggaattaataataccatcaactgagaacatagaggccaagattgattttagacatcacagcaagtatcaagaaagcattatcaaagcaatatattttcatataaacaacattccattacttgacgagttagtcatcataccaacatcattaatttcacttgaaagtaaagacaaccaaacagtggaaaattttaatgctgcattcggatttgatacatttgagatagaagtaaagaagaacttaagaactttaagcaaaaacaaggtatttcaatttaaaaatgaatcaattggcgatttaagtataatatcagtatgtctttatggggaatattttttctatggtatttatggaggaaatgaaaaaatgaaggcaatacgcaagatattttcacctagtgataatttcgaagagttcttcattcctgcatataagcgatag

SEQ ID NO: 206899 - DNA, 126 bp, Klebsiella oxytoca
atgttcatcgttatcatgcacatacagtgcattggtgttttatttttctttccctcttttatcgatacgtgctactgtatttttatacagtatctcgtgatggaggttatgtggatagagagttga

SEQ ID NO: 206900 - DNA, 441 bp, Klebsiella oxytoca
gtggatagagagttgaacgagcacgtcatgattgagcgggtcgaaatgattgcgcgtctgacggcggaaggtacttgtcaggaaagagaccgcgaaatcgcgctaaatttgattgcggagatcgcaagaggcaacctaatgaaaaataataatttttctgttgttttctccgcgccgcctgttgatgagctttttacaaggggagggaaagttagagttaacataacgttagataaagagcagcaaataggtcagccagttattgacgccttccagtgcgaattatcccggcggatacggtctgtttttccctcaacatgcgtcacagtcaaaaagggttctatgacttgcgtcgagctgatggggttcgatgaagactctgaccgtgaagcgctggatagtatccttcaagaagtttgggacgacgacagctggcggtga

SEQ ID NO: 206901 - DNA, 1116 bp, Klebsiella oxytoca
atggatatcaaaaacttaaagccaaaaatgattgagaaggtatcccctgatctactatcgttagatcctcgaaaccctcgtttgtacaatggtaaaaatttcacagaaaatgctgaaacgcatgaattagttaaagaattggcgaactcagctgatttggaggaattgatacaatcaatttccgaaaacggttatctatcaatcgaaccgttaataatcatgccgcgtaaagataagttcattgttctggagggcaatcgacgtttagctgcaattaagcttcttaaagatcaagagcttgcgagaaagtgtcgagtggttgtaccaaaaaaattgtcacaagaagttctggacagtttaaaagaagtcgcggtgtaccttgttaatgatgaggccgatgctaggtcatttattggttttaaacatgtcaacgggcctcataaatgggattcttttgcaaaagctcaatttgcttacaagtggtttattagcgaacgtaaaacaggattaactatagatgatatcaccaataaattaggtgatagtaataatacagttcgttctattgtaagtgcaatgtttgttcttgagcaagccaagaaccaggagatttacgatattcatactgataaaatgtctcctaagttttcattttctcatctatatactgcattaaatcgtagtgaatatagagagtttttggggttggctagggattggaatataactttagaagagaatccagtcccaaatgaaaacttagggaaattaaaggatgttttatcaggtctttatggttataaaaaggatagtaaaccagcactgatatcctctcaaaatcctgatttgaaacattttggagaggttcttgcgaatgaagcatcttatgatgcatacaaatctggtgttgataatctttctgaactttataagcaagcaggagatcctctgcagcatataaaagatgcgtttttagaaattaataagcaattagatactatatcttccgttcttgatagaacaactcagttagatgagtctactttaaattatatagagcagtttaagaaaaaaactaacaaagtggtttttcaaatttctgaaatcaaggactga

SEQ ID NO: 206902 - DNA, 1020 bp, Klebsiella oxytoca
atggagcttcttccttatccagaaagtcattttatccaagtaaaattagattgggttgagttatcatgcttagctaatccattttttacttttcgaattgctgagttaagaaatgcaattgaaaaccttgaagggtttagtaccggtgatattgcagaagaagatgcaaaagtagaaaatgaaattcaaaaattgcttagccaatttgaactgaggtctcgcgtattaggtgaaacatatccttttagatatgatgctgataaccaatattttgaactttgtcaaagttcactagatgaaatagaaatttatcatcatgcatacatatattgcttatatttttctcacatctcgaagtctagattattcagtgggttaggtgagacgactggtgctcacagagatttattacaaattgcggcgactatatcattagctggatatgtcagaggcaatagcatttcctttggctggccaagacctgattcatcacagttttatgaggctctttgcagagtgattggtttaataaaagaaggtagggttaaaccatttgcagatataaatcgttatttacaaacaagaccacataaagatgcaggcatcgatgttattgcttggcgtgatgataatcccgaagatgatgatccgggaaataaacatattttctttgcacaagtagcaagtggacaaaattggagaagtaagccagtcaaggaagatattaacgctatacaaaaacattggttggctcaaggtttatttagaattactgatgcaattgtcattccatttgattttgaacaagatgatgatgcaattaagaaggatgagatatcattgattgcagatgagtttggtgctgttatccatcgaatgcggttgcctcggtactttaaagcagggatttctttacttgctgagaatccagagttattaatcgaacgaagtaatgaaatacaagcaatcggggagtatgttgtaagtctcacacatactttacaaggagaagcggcctaa

SEQ ID NO: 206903 - DNA, 1008 bp, Klebsiella oxytoca
atggaccagagaatcctcgaacatgaggcaattaaacagcttagcaagaaatcggtacgcaagttgtttggggttcatgatattccaagagccacctcgccttttcgctatccaggaggtaaagataaacttacctcatttttagctattttccttatgcacaataagttaaaaggcgcacgttttattgaaccattctgtggcggtgcaggtgcatctctttcattgttattaggtggttatgtcaaagagatacatctaaatgacaaaaactacgctcttttttgcttctgggaacaattgcttaataatactgataatttattagacatggtcttccagaatgttccaaatattaatgattggcataggcaaaaggaaatttaccagacaagtataatcgatccaaatagatactcgaaacttgagtttggctttagtgtattttatctaaatagagcaaacaggtccggcgtgctcagcgctggtcctattgggggcctcgaccaatctggaaaatataagattgattgtcgatacactgtcaacacccttatcaagaagcttgaaaaaatagcgagcatgcgtgattcaatatacgtatataatgagcactgcattgactttctaaaaaaattcgataataaaaataattttgatagtgactttgtttatcttgaccctccatatgttaaagaaggtcggaatatatattctaaaaacttttgtttcgatgatgctcagcaccgtgaattaaaagattatatagcaggatattccaaccgctggttgatttcttatgatgaccatcctctagtgcatgatttatactcaaaacatggtacgagagctgtcgagataagctacgttatgaatcaagcaaaaattggaaaagaactgatgattgccgattctcgactaagaatgccagaatcactattctctattaacacattagactctaactcaatgattgcaattgataagtcgcaaattaaaacggcctaa

SEQ ID NO: 206904 - DNA, 582 bp, Klebsiella oxytoca
atggcgaccgggtcgtctgtgctggagcagcgagccgccacagcgtgtgccgtcatcagcgacttatctgtcccgctgcgtgatttgtggaatccgtggaaatgccctgcaacatttcttccatatctggcatgggccttttccgttgatagctgggatgagaactggagtgaacaagataaacgtgcagttatcagcgaatcattctggttacatcaacgtaaaggaacaataggcgcacttcgtcgagtggttgaaaaaatgggttattccatgtcgattgaagagtggtggaaatttgctgatcctgctggaacttttcgacttgaggttgatgtgaatgatatcaaccttacgtcaaaaatgcttgatgagcttattcggctggtcaatatctccaagccagtcagcaggcatatggcgcagttcaatatcgcagccagggtaaaaggtgatatttacgtcggcacttcgctttgttgcggggaaataatcagcgtatatccaccggactatgaccttgccgaaaatattttttataacgggattattttccatgacggaaactataacttcggatga

SEQ ID NO: 206905 - DNA, 1947 bp, Klebsiella oxytoca
atgacggaaactataacttcggatgacaccgctatgaccaatattacagaatctccgtcgtgggaagaaagcatcagcctgatagccagaaacgaacgcgtgacaggtggtcaggatggtgtggcaaacagaccattgaagggcctggctaacaggacacgctaccttaagaaaaagtatgatgaggtagcggaggatgtttccggcaaagttgaagccgtgaaaacatttgcagaaggagcaacactcctctcaccgcgtgatgaaattgtgtatggaaattatcgccttgtctggacgggggaatttcctaaaaatgtcccggctgacagcactcctgccagttcaggtggtatcagcgctggagcctgggcttatacgtcagacgggccattgcgccgggatattactgcacagactggcgcatccatgattggcgggttgagttttctgaccgtcgaaatgtattcgtatctcgccgaagggagagactggcggaaggcgattcaggcagctattgacaaggctcaccagaattatcttgcagggagtggtccgacaaacattctcattggtggcgagctcactgttactctcaatccggattcaacattaatccccggtgaggttgctgcgggccgtggtgcgctgtgtatgcgcagtggtgtaaccctgatgggcggcggaacaataactcttgatggcagttttaccggctcatccagcggtgcaatcatcactaactgggaaggcgctgccgataactgcaagattcagggggttacgcttaacggtagccgtggtaccgctgccggaacgggaatcacctgtattaatatcgtggactcggacaacgtcaccgttgataacgttaaggcgtttgacagtacatcgggcggcatttatctgcggcgtgcaaataatgcagtttacgggtgttctaattctcggatattaaactgttatgtgcataacgtagggtatataggcattcagtgtgagcgccccaatgggatgaccattacgggatgtaccgtaacctcctgcggtgataacggcattgatatctttggtaatgtaaccgacgaaaccggtcagggtatcgcggaaaatgttgttatagctaattgcacggtaggtgatatttccgttggaatctttatcgaatcctgcggaaacgccactatctccgcatgtgtcatctttgggtttccgaactctggaattttctttaaccggataaatacagcggcgtataactgttcggttacggggtgcacgattacggggaaagatatcactaccagccagggcatccgctggaaaaacgcagtaggttatacgcgcgtatataacaatacgttaaaaaactgcattgattcctttgtgacaaccggaggcatgatttacgttgatatcggggtaaataatcacgaaaacatcggtcgctgtttcttgtatgtacctaaaacctcaaacggctgtgtatatacccgaatggcgcagcaggtctacaacggggttcagacagacggtataccctacaacaccacacctcgcggctggccatcagcgaacaatacccggtactaccgttgctcattcactgcaccttacatgatgtactccgcgaccacaggcgaggataacttcattcgggctactggcaaccttccgtctaacagtggttgggggccagcttattcgctctataactccatcgtggcaggtgagactgttattgctatgagtagtgcgcttttagctgcgggtgagttcatgctgataaatggaagttactactctgttcacagcgtaacatcatcttatgcagtcgtcaggaaatgggatattaacagtcaaaactacatagcaggcgattacacatcctacctgaatagcgcttatacctattcaattttcagaacagcatggggagcaatatga

SEQ ID NO: 206906 - DNA, 255 bp, Klebsiella oxytoca
atgatttatatgacgggtgattattcatctgccgacgagcggtacggtgaatcatgtaagaattgctttgcatttattgaggaaacccataaggacggagatatttatatcagtacgattgccgtgtattcaggtaaagataaagagactgaaatattcaggtttaatgtgggaacaatttcgggcgatgagaatgaagtattctcagccgcacttcagacatatctcggttcattctcattgataacagaataa

SEQ ID NO: 206907 - DNA, 2283 bp, Klebsiella oxytoca
atgccaaattatgatttcacgcaactttcaccccatgattttgaactgttgtcacgtgatttaatacagaaactagaaggattttttcttgaatcattcactatcggacgtgacagtggtattgattttcgttgtttgcaaccagaaggcaaagtagttgttcagtgcaaacattattccaatacaccatataccggattaaaagcaaatctaaaaaaagaagccattaaggttgccacattaaagcccgctcgctacatccttaccacatcagccaaactgacgccagacagaaagaaggaaattcaagaaatatttggagaaattctaagtgttaatgacattcatggtgctgatgatcttaataattttattagtcaatatccagaggttgaacaacagcattataaattatggctaacaagtactgaagtacttaatcgaataatacacaatgcctcagttatccaaagtgaatttgaaatttctcgcattcgcagggatatctgccgttatgtacaaaacgatactttttctcatgcccggaccatgctgaatgaacggcatgttgtaattatctctggttctccaggagtaggaaaaactacacttgccagaatgctaatctgtatctctctggaggatggatatgaacttgttcctatcatggctgattttcatgaggggagaaaacgctatcaaccgggtaaaaaacaaattttttatttcgatgacttcctgggtgcaacttttctcggagaacaatcatcgagtctttctcgtaatgaagatcgcgccattctggattttattgaaatggtacaacactcacctctatctcgtcttgtcctgaccactcgggggcacattcttcagcaagctatcagtctctctgaaaaactcaaacactcctgtattattgacacgcgctgtgtactagaaataaatgattatacagaaaggcagcgagcacaaatattatacaatcacatatatttcagcgaattgccaactaattatcgaaatgaactgttagcaaatcatttttacaaagagattattcgacatccaaaattcaatccacgggtcattgactggctctccgactttcatcgggtcaaaaaaaagccagtaaatgagtataaggctttcgtgcgtaacttgatttcaaatccatctgaaatatggagttatgcttacgagcatcaaattagcaatgcggcacagagcgttttacttgcactatattcttttaaagggaaatgtggtctcatgttattggaacagtccttcctgaaattacataaatttcgtgctcagcggtatggctttgatacccgcccctctgactggcgactcgcttttaacgaactagatggaacatttatacgtcccggaaacctagttgaagtacttgacccttctgttctagacatgctcaatactaccatcgttcaagatcctgctaatgcccttgatatccttgaaggagccttacggttccagcaaggacgccatatctggtctttcgttgcaaccacaaaaaaccaaaaaatattaaaccattttcttgctgaaccagatcggattactaatgcccttgaacatttgttacaaaggccacaaaaagttccagtaggtaatggcgtagctttcattgatgacagtctggcggctcgtatcagcactctaattcatatcgcagaaaaactcttgctgaatggactatcaaatcttacacattctgctctacatttatttctaacaaatccagaagcagaatggttcgatattaatgatagcctatcattaataagtagcgtgaaaaaagctgattttgtgtttggttcagagcgtgataatttgtgtataaagattatacacaaacttataaatgaagatttatcaggatgtactgctgctgaactttatgaaatattaatggctgtaaaatcagaaaatatgttatttgaatacacaggacaaatccgaaacatcattgaagaatacattgaattttcttttaacgatgatatcaaccagtgtcaatcaatagccgattttgatgaattgctagagaatctctccagcatttcagaatctattaatctcaacatgacagacactattaacttcattaaggatgctagaaatacatttgaagaatctcaatcagaatatgaaaatcaggcttatgaagaaaagaaagagcgtcattattattccgaaaataaagatattgacctggatgcgttattctactccttacattctcaggattaa

SEQ ID NO: 206908 - DNA, 159 bp, Klebsiella oxytoca
atgaccatccgcatctccggcggcgtcagccgcagtccggtagtagaccatctgttctggcaccgggacggccagcagttattccttccttatgacaaaacgcagtggcctgctgaacagtatgtcggctggcaccgtaaacagattttcaaagcctga

SEQ ID NO: 206909 - DNA, 876 bp, Klebsiella oxytoca
atggcgcagaataaacaagagcgatatacgttctgtactccatcgttggatacaattctggcgagccggattgtctttatcggtgaatcaattcacggcattgcagaattcagtcagtttaaaaaagaatttataaaacacattaatgggcgaaactggattgtgttgttcgaagcggatgcgctgggaatgaagctatcgcaactacgcggggatactgaggaacaatttcttgataattttccccgcattatgcagacgttcgagataagagaattgattgcactggctcagaaacagggttttccctgcttgggcattgatgttattcctcgccgtagtgatgatgattttccacaggactggaaagccgacagatcgtcgtttatccatcacttcattacggcgcgtgagtctgataattggctatcgtggcggtcggcaaaaatggcgcaaaatatcagagatatagcctgtcacaatccttcctcacagctactggttttcctgcataatatgcatattaaacgtgatggccgaagtgagcggtcagaactgaggctgatgtctgcacgggagcaccttgataaggattttgcaggccagatgtacagtattgcgcagtttgcccgtgctggcagggcatgccataacgatctaacagccttcgatttcgaaattaacgatccgcagtctattgaaacgctaattgatcagcaaagtagcggctggcgactgtttaaatgcgaaaagttggttcagatgaaagtggcttaccatcatgcgtttgagcgggaagccactgatatcagacggcaatatgagtatgcggtgctgtatggccgggtaactcctcctgagtttataaaaaagtga

SEQ ID NO: 206910 - DNA, 267 bp, Klebsiella oxytoca
atgaacgtaacctcacccaaaactctggctcaggaagtcaggaatgcacgcaagcaacgtaagctgacccaacgtgaaactgcagaaactatgggcatgaaacaatcaacggtttcagagtttgagaaccatcctgaggggacccgcctaggtacgctctttaagatgcttgccgctctggatcttaagcttcaggtcgtaagccggagggcgaaaacaaatcgtctgatagctgggacctggagtggtgatctgtggaaccaataa

SEQ ID NO: 206911 - DNA, 831 bp, Klebsiella oxytoca
atgaataatgtattcgctaaagtcaaaaaactacgtaaaaacccttattttaaattgctgtcagattgtattctctattcgcccgtggtggttgcaaatggaaactgtgtaaattatgattctgatcataatttagatgaagaggcttggtttaagattgatgactttagtgagaaaaactattgcttggatatactaaaggctgattttgactcaaaagagtttctcagtttaacaaaaagtcagttttccagtattgcttacattatgtctgtccaggatggtgatttttattttcaaaaggtaactccatcgcaaatgataagaaaaaaaaccatttcttttggtgatgctgtagttgttgaaaataataaaaaccgtctagtaataaatgaatttcctgatgcggtatattttaaaaagattgacaggctaatttttagagatctggctacgataagtagtatattcaaaggcattgatatactgtttagagaagctactcaagaagaggtggttcagtttctttccgagtccttcattagcctttctcaggaatatgatgtgaacaaagtatctaagccgaacaggaagagagttgctcttgcaatggttacgctggatgctttgtctccagcagaaaagactgagatgcttgtatatattaatgattactgtcaagaaaaggtagcttttgattcagattctgaaactttctcaataaatagtgatgatgaattaaaatatttgctttatggtattgaacaacgtttttatacaaccccatttgggaaagaaaagcgacttgctaattcagttcaacccatttga

SEQ ID NO: 206912 - DNA, 591 bp, Klebsiella oxytoca
atgaaatttattctcgctcacaggaggtgcgtcatagttaacatactcttcaggctactgcttactttcaatgctacttcattgttagttatagttttttttgttcagaagaagtttaccctaggatatttcctgcaattttatccacaggttagctttttaagggacttgcatccatttatatcatattttctgtacttcatgattcctgtgctactcacagctttaagcatcttcctcagtcgtggtctaagttcggacgattttaaagaaggtgatgtagtgagcattgaacatgccaataatagtttcttacctagttatttggggtatttttttgtagcgctaagtatttctagctggagtgctttattttttgtttatggtattttgtttattttcacctttttgtcacaggctctctacttcaacccactttttttgattttccgttacgaattttataacatacagactaaaggtggcgcctccatcttccttatcagcaaatataaatataaaactcctaagcagattgttatttctagggcattcagaatcaatgattacacatttattgaaaggaagtaa

SEQ ID NO: 206913 - DNA, 591 bp, Klebsiella oxytoca
atgaagaaagtactgataatgtatcattttgacttcgcctctaaggggaagtttgagcgcaaacttactcggatattttccaagtcaaatgattataaaatattttattttgaagatcatcataatctaatcaaacagtttttcactgctgatattttgacgaaacttgcgccagaattacttgctgacctattttctattggtctaactcatgcagttatttttgattcagctactaagccagaattccttgaatcccgagatattttgtccaataaaattactgtgcgatatgttacggataaaatcaccttcgttgcaaataaagatagaggtgaacacttcgatacttattgcggaagaggaactctttggggaaatccttatgcgataggtgtagatggtgatcgagatgaagtgataaggaaattcaagtatgattttgatcgtgattatctgaagggtgggaatgattttaaagaaaagctcaaaaagctgagaggacacacattgggatgccattgtaagccctatgcgtgccatggtgatgtcctcgcgcaatatcttaatgaattagatgatggtgagtga

SEQ ID NO: 206914 - DNA, 441 bp, Klebsiella oxytoca
atgaaagtgttttcaattggctttactgaaaaaactgctgagaaatttttttcacttattaaatcacagccagctattaaaagcttagttgatgttcgtttaaacaatatgtctcaactttctggattcgccaagaagaatgacctgaagtactttcttaaggaattatgcaatgtaaactatttacatattccagatcttgctccaacaaaagagatgttaaatccatataaaaaaggggatgtttcatgggaggtttatgaagataacttcctgaatttaatggcgaaaagaaatatcgagcgcattgataaatcgttgattgaagatagctgtttactttgtagtgaacataaaccccatcactgtcatcgccggcttgtgatagagtacttaaacaaccattggaatactgattttgaggttaagcacctgatatga

SEQ ID NO: 206915 - DNA, 684 bp, Klebsiella oxytoca
atgatcaaacgtttggtacttttagcttgttcttatcgccccggtgggcgctgtgtcgcaggcattgaattgattgataatgtgtgtagcggctgggtacgacctgtatgctctagcggtgaaggccaagtacacgatgttgatcgtatttgcgataatggaaaatcggctatcaaactttctgttgttgaaattgatgttggtgaaaaccaaaatcatccaatgcagcaggagaatgtctacttcaatcatggtgttaggtggaagtacatctcaccatatcgtaaatcacatgaattcttagctcccttccttgaaacacctccatccttgtgggaaaacggcatacatagtacgaatggtttaaacgacaaagtccctgttggcatagttaaaaggccaaggcaatcattattcttcataagaccaactaggcttttcattcatattgctactgaagggggggagttcggcactcctcaccgaaaagtaagggcaagattcttttataacagtgtggaatatattttctcattaatggatgcaggcattcttgacgagtttaaaacacgcgaaaatggtgagtacgagatttttaattcatatatgactgtaagtttagctggagaatatttacagcattattggaaaattgcggcgtctattataagggttgaaccatga

SEQ ID NO: 206916 - DNA, 570 bp, Klebsiella oxytoca
gtgaccatctcattaaatattatgtctgacaactccaccttttcttcggttctgacgagccgggaacgtaccgctgtacctgcaaaatccctcagtttcatcgaaggcgtgtcgatgatcgtcggcaccaatatcggtgctggggtgctatccatcgcctatgcctccagcaaagcgggctttctgccgctgctgttttggctcgttgttgtcggtagcctgacgactattaccatgctctatgtcgcagagtcgacgctgcgtacccgcaagcatttacagctcagcggcctgtcgcagcgttatgttggccgcttcggggcattgatgatgttcctctccgtttgcgtcaacagcgtcggcgcgctgacggcttatatgaccggcagcggtaaactcctgcattcgttattcggcatctcgcctgccctgggcagcgcactgttttttattccggcggccggggtgctttatcttggcctgaaggcgattggccggggtgagaaatttatcagtatcggcatggtcgttatgataaccattttggttgccgcgacgttgctgaaataa

SEQ ID NO: 206917 - DNA, 201 bp, Klebsiella oxytoca
gtggccctgagcgggatggttatcaagccgctgacccatgtgccggccgctatcccgttacgtcttgagaaccagtatttctcgctggatctgagtagtgaggcggcgagggcgatgctggaagcgggaagctgcaccttctataccccgcgctcactgggggatgtgaaacttgaactctttgcggtgctgcgcacatga

SEQ ID NO: 206918 - DNA, 186 bp, Klebsiella oxytoca
atgtttgtaaaacctaaagatgggctcagcgtgcgctgtcctgtccggggcgaagcattgcccaaagaaggcgctgacgtgccggataatacattctggcgccgccgactgaaggatggcgacgtaatcccggttcaggaaaaaggtgtaaagagcaccgttcaaaaagagggcgacagtaaatga

SEQ ID NO: 206919 - DNA, 510 bp, Klebsiella oxytoca
atgatgaaaaaagttagttttattaatgcggccctggctgccgttttgctcacatctttttctgcaagcgctcaatggcttactaaagtagatgatgacctgttcacaggcgggaaaaaggctgtgatgctaggcagcttgtcatcctcaaactctgggctgattttcgattgcaccaagaataaattaacagttgcgtacgtagaaactgacaaaacaagtgactccattcccacggtagaaatggatttaatcatcaagattgatgacaatccaatcaataagcttgaggcgtctctgtcacgtagaaacgcccagtcaatcgaggttgaagctgttgatgcagagaaaataaccgtagtgcttaagcaattacaaagcgctaaatctaaagttcttgttggtgtgcaaacaccagatggcggtaaccaatcctcgttctcaggtaatgcatctggttcgaccactgcaactaatagctttataaaagcatgtgagatatctctgtaa

SEQ ID NO: 206920 - DNA, 213 bp, Klebsiella oxytoca
gtgaaattacctgtatgccctgattgcgggcttcccccggagtttcactggaagaattacacgttcggttcttgctccggatccctgaagtgcccgaatgaacattatcgcgcccagtacagctactgggctggtggaaagaacaaagccaagcacattctggaagaacaatgggtagcggcggtgaataacagcgaggttaaaaatggctaa

SEQ ID NO: 206921 - DNA, 1299 bp, Klebsiella oxytoca
atgccaatcaaaagaccaccggcacttattccattttcccaactcaccggagcggatctggaaactcaccaacactacagccgagtgaccgacgataaaggtcgctatcttccgtttgacgaattctaccgccgcacatccagcggggaaaatgtctctatcgcctggacgcttacgcggcgcgcgcgtgactcagccatgcaacggatccattatcgcaacgaagcaggcgatcaggctggctttgtccttacacctgacatcatgtcagtgtgtgaactggtggacaagcacgccacaaggctggcgctcaaagaacttaccgccagactcagaggagcaggtaaagagttaacagcactaagcatggaagaacccatcacctcatcacagctggaaggtgcgaatacaactactcttgtcgcgcgagacatgctggaaagtggcagagctccccgtaccgaagatgaacacatgatcgcaggtaatgcgcggttgatggccgaaataccggaacttatccaggagccattaacaccagatttaatccgccgtttccatgccattggcatgggtggaattaataacgaaaaataccgtcctggagaattccgcgataccgatgatgtagtgattgccgattatgacggtaacattgttcatcaaccgccagccgccaccgacctgcaggcacgtctgcaaatggtgtgtgacttcataaacaacacagaatcctacgttcaccccttggtaaaagcctgtgttcttcacttcatgatctctcacgagcatcctttcagagacggtaacggacgtacaagccgtgggctgttttactggtacatgctgaaatcagagtatgacgtgtttaaatatgtctctatcagccagttattgcatgccgccccggccaaatatgcccacagttaccagtacactgaaaccgatggtatggatctgacgtactaccttgaatatcaggccagtattatccatcgagctatgacaaggcttttacagcatgtggacgctctggtcgcccgcgcagcccgaattgaccattttttgtataaatcaggaagcttatcgcggctgagcggacgacaagtcacgctactcaatatcattctggcggaacctggcaagaaatattccgcagcaggcgtagcggaggcgcttggcgtatcggataacactgcgcgtaatgacctccgtaccttagcgcgtgaaaatctcttaaccgagatatcagaaaacgaccagaaaacggtttataaggtatctcgggaactgaactaa

SEQ ID NO: 206922 - DNA, 2592 bp, Klebsiella oxytoca
gtgaataaacaacagcttgcggcgaaaatctgggaatctgccaaccagatgcggtctaaaattgaagccaacgaatacaaagactacatactcggctttatcttctacaagtatctaagcgatcagttggtgcagtttgtcaccagacaggggatgacacccgaagacatcaaagccctcaatgaagaagatgctgacatcgttgaatacgtgcaaagcaacctgggctactttattgcctatgataatctgttttctacatggattgatccaacgtccgaatttaacgaatctaacgtgcgtgatgcgctttcggcctttagccgtttgatttcgccaacttacaaaaaactgtttgacggtatctttaccaccttagaaacaggtttaagcaaactgggtgaaagtgcgggtaaacgtaccaaagctatcagcgacttactacacctgattaaaagcatccccatgaatggcaatctagggtatgacgtactgggctatatttacgaatacctgattgaaaaatttgccgccaatgctggtaaaaaagcgggtgaattttatacgcctcatgaagtttctgtattgatatcgaacatcatcgcccatgagttaaaacacaaagataccatcaaaatttacgaccctacttccggctctggttcgttactgatcaatatcggtgaggcgttcgagaaatacgcgaaaaataaagactgcatcacctattacgctcaggagttaaaagctaacacctataacctaacccgtatgaacctcatcatgcgcggaattaaagccagcaacattaaaacccgtaatggcgacaccctggaagaggattggccgtatttcgatgacagtgatcctcaaggctcatactacgccttacatgtcgacgccgtggtatccaaccctccatactcacaaaactgggaccccagctttaaagacagcgatccacgctattcacggtttggtctggcacctaaaaccaaagcagattttgcttttttactgcacgacctctatcacctaaagcccgatggcattatggctatcgtgctacctcatggtgtcttgttccgcggtggtgaagaaggtgaaattcgcaagcaactcattgaacagaatcatattgatgccattattggtttaccggccaatatattttttggcaccagcattcctacggtgattttaatactcaagcaaaaacgccaaaacaccgatgtattggtggtcgatgcctccaaacactttatgaaagaaggcaaaagcaacaaactgcaagccagtgatatcaagcgcattactgatgcggtgattagccgagagagtatcgacaagtttgctcaactggtgagcaaagaaacactgcgcaataacggttacaatctcaacataccgcgctatgtggattcctctgcggcggcagaaagctgggatttacatgctaccatgctcggcggtattcccaacagcgaaattgccgagctactcaatttttggcaagcgtttccgcaattgcacagtactctatttacgccaaaatccgccacttacagtgaactggccattgccaaacaagatgtcaacgtcagcattagcgggcatccgcaagtgttagagtttatcagcgcctacaaccaggcttttaatggctttgatgaccagctaaacgcccaattaatacaaaattggcaaagcgtaaagcgcaaccaacaagaggcggtattaagtgccgagctatttgctcgcttagcccccattgccttaatcgacaaatatcaggcttaccaatatctaaacaaccagtggcaaatcatcagcgctgatttagaaatgatgcaaaccgaaggctttgccgccactaaacaagttgaccccaatattgttataaagaaaaaaaacggccatgacatcgaagtacaagaaggctggaaaggccacatactgccctttgatttagtgcagaaaacttacttaagtgatgacttaaaagccctagcagataaagaaatacgcctgacggaaatcgccagcacgctggaagaaattttagaatccctgaccgaagaagaaaaagaacaagatacagtcaaagaaaacaaagacggctttgccaatgccgaattaagcaaggcagccaaggccttcttgaaagaacaaaaagacagcaaagttaaattcgcggaagaaagctatgaagccaaaatcattcgcgcgaacaatttaattgatgaagaaaaaacactgaaaaagacggtcaaagatgccgccactgccctgcacataaaaaccaaaacaaccatcgaagcattaactgaggaacaggtggacagcctgctgcaccttaaatggattatgccattgagcacagaactcgccgccatgccaaacgccgtgcttagccaacttactagccaagtgcaagctcttgctgataaatacgccgtcacctattcgcaagtctcccatgcgataaaaaccactgagcaagaactggcggaaatgatgggtgaactcacaggcaatgagtttgatctgcagggtttggctgagctcaccggcttattgaagggtgaataa

SEQ ID NO: 206923 - DNA, 1212 bp, Klebsiella oxytoca
atgagtatggatagcaaggtaccagaaattcggtttaaggggtttagtggggcgtggcgccaatttttactaggcgatcttggggtcgttgcaacaaataaacgcatatttatgcatcaagcatctctaatcggtgatgttcctttttataaaattggaacatttggaaaagagccaaaactatttatatcccaggagctctttgatgattacaaaaaacgctttccctttccccaaaaaggcgatcttctattttctgttatcggtagcatcggtaaagtcgtcgaatacaccggtgaaaacgaatacttccaagattccaatattgtatggcttaagcatgatggggctattgtaaatgcatttctcaaacagttttattcaattgttgagtggtctggtatagaagggagtacaattaagcatctgtataacagaaacattcttgagacaaaaatccaattgccctctgagaaagaacagactgccatcggcaactacctccaaaaatttgacacactaatcaaccaacaccaacaaaagcatgataagctcagcaacattaaaaaatccatgctggaaaaaatgttccccaaaccaagcgaaaccattccagaaatccgttttaaagggtttagtggggagtgggaggtaaagtctctaaatagaattgccgaaaaagtcactgaaaaaaatacatctatgctgtattgcgaaacttttacaaattcggctgagtttgggatcattagccagcgtgattactttgataaagatatttcaaactctaataatatcagtggatactacatagttcagcctgacaattttgtctataacccaagaatatcaacgcttgcaccgtgcggccctatcaataggaatacactcgatagagttggtataatgtcgccactttatacgatattcaaaacaaaaggagttaacacaatttttattgaatattttttccagactaaactttggcacactttcatgtttcttaatggcgatactggagcaagagctgacagattttcaattaaagattcagtgttttttgaattaccattactaatacctacggttgatgaacaaactaaaataggaaattacttccagaaactagacgcattaatcaaccgacaccaacaacaaattaccaaacttaaaaacatcaagcaggcctgcttaagtaaaatgtttgtctaa

SEQ ID NO: 206924 - DNA, 3228 bp, Klebsiella oxytoca
atgtccacctttacaaccgaagcacaatttgagcaggcctttattgaggtactcaccaacaaaggttgggagccggagatactcaaaaacaaaaccgaagccgatttgctacaaaactgggcgtccattttgtttgaaaataatcgccagcgagatcgcttaaacgatgtcccgcttaccgcgactgaaatgcagcaaattattgagcaaattaaggaacttaaaacaccgctcaagctcaacggcttaattaatggcaaaaccgtagccattaagcgagataacccagccgataccttgcatatgggcaaagaagtcagcttaaaaatatacgatcgccaggaaatcgccgcaggacaaagccgttatcaaattgtacaacagcctaaatttgaacgcggcagccctttgcgtaacgacagacgaggtgacgtgttgctactgattaacggtatgccggtgatccatgtagagttaaagcgtagcgggatcccggttagccaggccgtaaaccaaattgaaaagtacagtacagaaggcttatttaacggcctgttttcgctcatccaggtatttgtggccatggagccaaacgagaccaaatattttgccaaccccggactagacagcaagtttaaccccgattatcagtttaactgggccgattttaataacgaacccatgaactactggaaagacatcgcctctaccttactttctatccctatggcgcatcagttgattggtttttataccgtcgccgacgataccgacggcgtgcttaaggtaatgcgcagttatcagtattacgccgccaatgcgatatcagacaaagtagccaaaaccaactggcaacagctgggtagcgctaataaccctgatcgtctcgggggttatgtgtggcatactaccggttcgggaaaaaccatgaccagtttcaaatcggcacagttaattgcacaatcgaaagatgccgataaagtgatttttttaatggacaggattgagctgggtacccaatctctgacggaatatcgcaattttgctagcgatggtgaaaccgttcaagctacagagaatactcatgtactcattaccaaattaaaaagcagtgcaacttccgatacgttaattgttagctccattcaaaaaatgagtaatatttttgaagaagctgatgatgagggaacagcaacaaattcagctgatatagaaaacatccgtgctaagcgcttggtatttattattgatgaagcacatcgctcaacgatgagcggaggcaaagaaaataaactaggcatgctggtaagcattaaaaaaacattccctaaggcactcttttttggttttaccggcacgccaattcatgatgaaaataaaatcaatagcaatactaccgctgatgtgtttggtaacgaattgcatcgctacagcatagcagatggtatacgtgatggtaacgttttgggttttgatccttacaaagtacctacttttagagatagtgacctgaggaaagaggttgcattagaacaagctaaggctgattcggtttctgatgcaatggcggatcccgctaaaaagaaaaagtttaatcactttttaaatgatgtaccgatggctggctataaagatgccacaggaaaataccacaaaggcattgaagactatgtacctaaaagccaatatttaacggctacccaccaggaaaaagtcgtcagtgatattttagataaatgggatgtactcagccaaggcaataaattccacgcgattttagccacaaatagcatcgctgaagcgattgactattaccggcgtttaaaagcggccaaacctgagctaaaaatctcagccttgtttgacccaaatattgataacgacggtagtggtgaccgaggcccaacctttaaaggcgatgggctggatgaaattatgagtgactacaataagcgttatggtcacgatcttgattttgcccgccacgccgcttttaaaaaagatttagcggcacgccttgctcataaaaaaccttacgaacgcattcataccgagccttcaaaacaattagatttattgattgtagtggatcaaatgctcactggttttgattctaaatggcttaatactttgtatttagacaaggtaataaaataccaaaatataattcaagcgttctcacgcaccaatcgcttgtttggtcccgacaaaccccacggcatcatccgttattaccgctacccacatacaatggagcagcacattaatgctgcggtaaaactctattccggcgataaacctatcggcttgtttgttgacaagttagaaagcaatcttaaagccataaatgaattagtagctgacattaccgagctgtttgttaccgctggcgtggagaattttgaaaaactgccagacgatatagaagcctgtgcccaatttgccaagttgtttaatacctttagccagcacctggaagcggctaaagtacaaggcttccattgggaacagtcggtctattcctttactgaaaataatgcagaacatgaagtaacgctagctatagacgaacaaacttacctgagtctggtcctgcgctataaagaattaacagccaaaggtgagcacgatggtgcaggtggtggcgatgtgccttttgatatcagtggttatttaactgaaatagataccggcaaaatcgatgccgactatatgaatagccgattcgataaatatttaaaagagctgaacaaacaccaagaccctgcaagcattgaatccacattaaatgaactgcacaagtcgtttgcaacgctcacccaaattgagcagaaatacgccaaactcttcttgcacgacttgcagcgaggcgatgctcagctcgttgaagaccatactttcagagactacatcaacatctacaaagataacgctgaaaatgcgcaaataaatggtgttgttaatgctcttggtttagataaagagctgctcctagcattaatggttgatagcgttaatgcgaaaaatctaaacgattttggtcgcttcgacgcattaaaagaatcggtagataaggcaaaagcaaaaacctattttgaaaaacaagatggcgtaagcatacctttatttaagttgaatatacgcattgaacaatttttaaaacagtttatttttgcacaaaaaaatgattttttaagtgacacagatgttgttggtgatgtgatttga

SEQ ID NO: 206925 - DNA, 666 bp, Klebsiella oxytoca
atggatgcaggcgcgccagcagggactggcggaatgagcgagcagccaacgcctccgtcacgcccaccacagggaccaattggctggctgctgtcgctgaccgggcggctcatcgggctggttattggtgcgctggtgctgcggattgtattggaactggcggggctgtatttctggtggcctcaggaagggagcaggcatgtttttatggtgatgaagcaggagcaggctgaactggttattgcgttgcagccgcatccgctgaggaatgaaatggtgatgttgctggagaacgggacaactcacgggcttttggctaacaggttcctgcagaaaccgttcaccggcctggcctatacgctggtgagttttatgcagcgcctggtatggctcgtctccattctccccctggtctgtctatgcgtattaatcggactgacagacggactggtcctgcgggatttgaggcggtttggctccgggctagaatcggtttttttccaccgctacgtcatcaggtccggcagttcagtcgccaccacgctgtgggtggtttatctggctcagccactgtttctgcctgcgatactgcttttattacctgccgccttatggtccgggataacggtatggatggccgccgggagttttaagcgttggttataa

SEQ ID NO: 206926 - DNA, 1212 bp, Klebsiella oxytoca
atgtcaaaaattgcgcttaacctaagaataaaaggtgattatatagattcctttatttattctggggttttatatctccttgatactaacttccactttacctcatattcttggaatgatatttgcaatttcattttaaaaagaaatggatttaaaaaaattgatgccaatgcagtattgaattatgccaaagataatagaaaatttaataatagcattgataatatagacactgatataaatgaaattgaattatcaacattaaaaaaagattcaattaatattgaatactggccttcagatataaatttattctccaataaattatattattcaggtgatgatggagtttactacatccaaacagatcatctaactgcgcaatttgataaatcaaataagataaataaaatttttggagtgaagagtttctccatctctccaaattctcatatgcgtgtagctctagctgctgggaatgaaggtgtatttacatcatgttcttatttcactcccaaaaacccaagggaacaacaaatttcaagaagtagttgcattgatattgactggatgaatgatttgttatttatcaattctcaggaatttgtaattaagaaatttcaaaacgttattagtcaaaatgatataaactcagacaaacaacatgaagccctaaaaattaacctatttaacaacttcgacgaagacaataaagatcaagatagtatttcaaagtcaatctataggaaatacattactcaaattctaaatgaaaagccaacatctttaaacttagagaatacatataaatatggctggtcgagtggtgattgtgactttctgattaaaggtgataatcatttattaatccacaacaagatatcaggcaataaaaaagaattaaatttcgacatagatgctctcactttattaaaagtcagaacatctggttgtggaacaattatggaaataaatgatggctctttgtactttttaactgaaaatggaagcaataaaatatctaatgattttgtatcatggcgggtatatccacgagcaaaaaatcatgcgaatcacttgcatataattaatgatgacaatattaacattcaggtctataacaacgacacagagacctctggacttaatacattctattcaaaaagtaagaatgatcagtacaaatacagactcgaagatttattaaggtaa

SEQ ID NO: 206927 - DNA, 225 bp, Klebsiella oxytoca; identical to SEQ ID NO: 159849

SEQ ID NO: 206928 - DNA, 225 bp, Klebsiella oxytoca
atggtcgggatgcccttctgcggatacaggccgcagcgcagggacccggcgcagttaatcaccacgcacaggatgtcgttatccggcggaatgtcagagaagccgttgacgatttccgattcggtgagcgcgccaatttctatcgcaaccggatggatttcgcgcccggtcagcgacagcacctttttgccactgcccacgggcagccacagccctttaccgtag

SEQ ID NO: 206929 - DNA, 285 bp, Klebsiella oxytoca
atgtctgagcttcgttattctgtttgtgcggttttatttttgttttctttctcagtgttttctacagagcttttagacgagtattcaaataaatacccatggttaaaggattatttgtcagattatgaattaaaaggctatcaattaaatataagtggtgtgtggaaagatgattttccgaaagaggctgaaaaacagagggtggagtgtaataagtcttttaaggactctgattgcgaaatacttatgaaagcatttaggattggatactttgggaagaaataa

SEQ ID NO: 206930 - DNA, 279 bp, Klebsiella oxytoca
atgaccagaccaactactgcgcaactaaacgctgcctatgaccagtttaatttttggtacgacaaagccaaaaagttggatgaagaattagcgaaagcagaagagcgcatcgccgagctggagtcccgcaccgtcaccgtgaagatgccgaagctaaaaatactcgaagactatctcgcagaggttgctgttgaagagcggaaagcgattctgctcggcgtgcggatggagtttcatcgtgcgcttaatgccgagggcatcaagtgggaggctgagtag

SEQ ID NO: 206931 - DNA, 2712 bp, Klebsiella oxytoca
atggaaaatatatttaaaatgacagggggtgtccttaatcgctataaactagatattccttcctgcccttatccattggatgtggaacgttttgatggtttagaacaaatgagtgctctctatcattacaccattcgttttaccagttcacatccggatcttacggctgaaatgatgttaagtaaaaccgctacgctgagcataggggtgggagaactatttaattctactgtcggtaaaattgttcatggcgtggtgacaaatttccgacgcctgatcggttcacgcgatcaggttacgtatgaaattattctggaaccctttatatccttactggataagcagtttcgtactcaccgtttcttcgtcaacaaatcagtgccggaagtggtagcgcaaattcttggcgagcatggtttgaaagggtgggaatatgaattcaagcttaaacaaacctacccaaaacgggaacagataaaccagtaccaggaaagtgaccttgagtttattgaacgcctgctggcagaggtggggattttttacttcttcaccctgcagcctgacactcagaccgaagtggtgcacttcgcggacaagcagagtgcctggacgtttggtaagaaactgccgctgaacagcccgtcaggggcgaatgacaatgcggccgactcggtgtggggcgtacaagtctggcataacgtggtggagcgttcggtcaccgccagtgactacaaccaccgcgaagcccagaacgtcctgatgtccgtaccggctgacatgacccgcggcgacggggaggggaacacctacggtgatgtgtaccattatcgcccgcgtcaccttgaacgtggcgacaaaattacaccgacggcagaaaccggtaacttctgggcgcgtctggagcatgaacgcttcctgtccacccagaccacggtgaccggcagcagcaccgaccacacccttggaccggcgcaggtactgactattaccgaaatggctatcccgccaacactgccccgtgaaacggagaacggtgttgttattatccgcactggctactacgccagccgtaagaatgccctaaaagtggcatgggtagcgataccctactacgaaaaccgttgctggcgccctgtggctaaaaagcgcccggtggtcagcggtaccctgacggcacgagtgaccagcgccaaagataacgacatctacgcctggcaggatgcatccggcatgtaccgggtaaaattcgatgctgaccgtgacgataaacgccaaggtatggaaagtatgccggtgcgttttgccaaaccttacggcggagacaaatacggcttccacttcccgctgatacagggtactgaagtggcgatagcgttccatgagggcgatccggatcgcccgtatatagctcacgccctgcatgactcccgacacgtcgatcacgtcactgaagccaacagcacgcgcaatgtcatccgtaccgctggcctgaacaagctgcggatggaagacaagcgtggcgaagagcacatcaagctcagtacggagtacgggggcaagacgcagcttaatttaggacacaacgtcaatgcttccagggttcttcgtggcgaaggcgcagaactgcgaactaatgactgggtcagcgttcgtggaggtaagggggttttgcttactgcagatgctcagcctgacgtcggcagtaaaatgcttgaaatggacagggctgtagaacaactggagcaggcactcacgctggcaagaagccttcaggcagccgtgaaaggggctcaggcaacggtatctgatatcgacagccaaaagacgcttaacagctcactgaaatatctgaaaatgccaggaatactggccagtgcaccggctggaataggcattctgagtcctgaggctgtccggcttgcttcaggcggggcaagtattggcctgatatcaggtaaaaacacggatatcagcaccgggcaatcattcactgtagcggcaagcgaggctgtaagtttgtttgcacaggcggcaggaattaaaatgtatgcaggggcagggaaggttgatattcaggcgcaggcggatgccatgaatgtctcagcattacaggacatcactgtcgccagtggtcaggggagcgtgaaggtaaatgccagcaaggaactgattttaagttgcggtggtgcttatataaagctcagcggcgggaatattgaactgggatgcccgggcaatatattgctgaaagcggcgaatgttaatcagactggccctgccagtttagatacaccacctgtgacttttcctaaagggtattcgggctccttcactatcaaagatacggagacaggcgaagttaagcctttcactaaatataaagttacctcgccagagggcgatatttttgaagggttatcggattcatcaggaaagacctctccactttattcatcaacacccggtaaaatgaaaattgagtttcctgatacgttgagtgatgaacaattcagggtaatcgataaggctacaggaatgcctgtatccggttatgcatactttattattgcagaaagtggtgaatcagtatctggctatactgataataatggtgaaacccaacgagttgaaacgaaagatgagtcttctgttgaggttttctggggcgaagatgcgcttgaaagaatgagcaggagtcaaaacaatgcctaa

SEQ ID NO: 206932 - DNA, 624 bp, Klebsiella oxytoca
atgcctaacgacaaaacgatagctaaaacgaataatacgtctaactcacaaaaaaacgtgccattaacagttattgcatttgatgaattatgggcggcttatccctccagtacgatcgaacatattgagccgtcaagcagaaaagatgttttttccgaccattgcgcaataaatgtcagtgatgctctgtataaatgtggcatccttatgaaaacctttagtaaaacacgttgctggaattgcccgacaccagaccccgcgacgaaaaaggggatacacgccatcagagctgaagaattaagtgaatatcttaaaacccgcccttttgcaggatgccctgttccagtggaattgggcgggaaaaacttcaaggagaatgtcgaggggaagaccggcattatcttttttaaggattactggttgagagggaatgaacgaacgccgacaggggaccatatcgacttatggaataaaggtaaattagcgggcagtggggcactcgcttcgtatcttagggttaacttccctaatgcaacagagagtgtttctggtctgtttggctcagataccagaattacatcacttgagaaagctactgaagtgttattttgggaaataaaatga

SEQ ID NO: 206933 - DNA, 483 bp, Klebsiella oxytoca
atgaaaagaaaaataataaccgggtcaggttcggtgatagctctattatatacactgttgatgattctggctgtgggaggatttgaccgggcaggagtgattaatagtactatagatttccttggttttgaaaatggtaatatttatggtattcttttattccttctctgtgtgactgtgttagtgctttactatattttaatctcaaaggataagaacaatgtcatagggggaatgttaattttttcatttattatcggtgctgtcttattaatgttggttgttaaaattacttcagtacagaaatatctttttgatttctacatatcctggttttatcatggggtgcattatgaaggagaagataagataccacaggtcttttcattcatttcacgcctcatggctttttgcttctgctgggggggtattatttcactctttatcgtaaagtatattaatcgaagcctgattaagatatga

SEQ ID NO: 206934 - DNA, 2028 bp, Klebsiella oxytoca
atggctaataattcactggtcacttccataacccatagtcacgctgatgtcatggctggaaagcagaaaccgtattgggtcgaatttcaactggttgatgagcagggcgatcccgtggcgaatatgccatggactgttgaaagttctcatccagtttccgggccggtggagggattcacttattctggccagagtgatgatgacgggctaatcagggtcgatatgccacacggcctggagctgagactgacgttagatggtaatcagctggctacggaaatggaaaaatgtgctttacgcgttagtcgcgatgcggaaaatgattctgttgtgcgtcctgaagctgaagagaaaggatatatctggcattatgccgtgatcggtgaactttgtcagagttcaccaaacctggaattaagacctggggaaatgttacctgcataccactttcctgcaaaaacagcatttaagggatttaaattccgaacgaatgaacttgaaaagcgtcatgtaatagaaatatgccccttcagagcctgggagcttgttctgcatcatcaaaaggactattccattgcgaatggaattaaccttggggcagcagcaacacttgcctatgcagatgacagtactctggatacggtgtcaattacacgcttttttattaaccagtgccaggatctatcccacttacctcagctttataaagacggctcagcatggaatatgttagtacaggatgttccctacagtaagcggtattatcctccggtatttatggatacctcgcgcgatacttcgcctaaggcagatgagaagaacccacatggaacagtactggcagaagacgatactgaggcaacaaaggcagacggtgatacgcagctttattatgtttataacgcagataaggtgatcgttgcctggcgtggaacggccagcttgtttgatgtggggacggatcttgcgttcagaccagtaaattctgaagtctgtgatacagataaaacgcaatgcactcagttactacctgctgggaaagtgcatactgggttttggagtggttataatcgagtaggaaagaaatttaaaggtaaagttgaaaaattaaaggatttacttgcaagtcgtaagttatttatttgtggtcatagcttggggggggctctggcattaattgatgcggcaagatttaaaaattacaatcctatactgtacacttatggaatgccacgcacctttacccgcgacgctataatgcagttatcggatattacccatttccgccatgtcaatgataatgatcctattccagccgtacccgcggaagctaacctagataacgagttatatagattatggggatggtttggcgggactctgggctttttctggtcattgggtgagcttctggttaaccagatggttacttggggagactgtttttggcaccacggcaatacggttgcgtttctcacggccacgcagagtcgggaatggaaggagtgtaagagagacctgccaatgccggcagggtgtattaccatcaggaatttactacctcttaaggctaaactttacctggttcctgcactggcagagcaggagatgcagcaggcaggtcagaaacagaaagattttaaagcgtcattaacgcaatcggatttaaatgatttcttccctaaaggcagcaacccagacaggggggttaatataaatatttttgaacactttatgacgtcctatatgccttatatgtataacaagatgttagagttgattgataacgccggtatagtagaaaaacgcacatttactgagcatgtgtataacgttgattcattcagggaacagatggcagaaaataaaaatgatataccgactgatgaattatcaagaaatgaaatgttccttaatatcgaaggcttgctgggagtgtcgctgactccaacattatctatgccgtctggcaatgatacacttttgcggtttgctcaatatggtgaagaggtaatggaaaatgtataa

SEQ ID NO: 206935 - DNA, 774 bp, Klebsiella oxytoca
atgtataaccaatcaaaaattattctgctttccttgatgttgttttcctctacagggtgcagcatgagccgggccgtaaacaagacgttatctccaccggcggatactaaatgggtcaattttgaagtaaaaaacccttctcagtatacgaaaccgtttccgcttgaggtcagatatatatcacatgagtgtcagaaaaaaagagtgagtggatttgatggctcagttatcacagagccaagctataacgttattggggtccccatgcagcaagagagtggggatacctggaaagcaaaagttgctatgaccggtggtggtacgtgtaaatggacattgagtgcggtcaatttaggtatcgagtatatagatgcaacacatcttggcaaagatcttgtacctggaacagcggtgggggtgtcgcttgcttttgataatgatgcttctcgaaacgggcagtataggtctgcgcaaggggatttaaatctatcgccaaaatattatccttatattagagagaggaacatagcagagaagaccaagtcactctctttgtttggagaggaagattttattttattacgggcatctaatcttaataagtttttttatcatccggtgattgatgagttgaaagttgtaaaatacattgagccagagaagaaaattgaaggtgtctactctgaaataatatatccggatggaagtgttgtatctgatggaacagtatttccaagttttgataaagttgataaaatgaatgttaaaaagtaa

SEQ ID NO: 206936 - DNA, 708 bp, Klebsiella oxytoca
atgagccgggccgtaaacaaaacgttatctccaccggcggatacaaaatgggtcaatattgaagtgaaaaacccttctcagtatacaaaacccttcccgcttgaggtcagatacatctcgcatgaatgtaagaaaaaaagagtgagcgggtttgacggttctgttataactgaacccagctataacgttattaggatcccgatgaaccgaagtaatggggatatttgggaagcaaaagtagcaatgactggcggcggttcatgtcagtgggctttgagtgccgtaacacttggtattgaatatattgatgctactcaccttggcaaggatcttgtagcgagtacggcggtaggtgtgtctcttgcttttgataatgatgcctccagaaacgggcagtatactgcaacttttggtgatttaaatttatctccaaaatattatccatatataatagagtggaaattaattcgtaataggaatgacttaactcttttaggccggcatgactttattttaagtcaggttactaatgtaaataatataaaatttgagccgttattggatgaaagtaaaatagttagatatattgaacctgaaaaaaagatcaaaggtgttcacgctaaaataatatatccagatggcagtgttatatccgatggcactgtgtttcctgattttgatacggtcgacaaaatgaacgttaattga

SEQ ID NO: 206937 - DNA, 267 bp, Klebsiella oxytoca
atgacaaaaggcttggttttacttggtgacaatacttctcacggcggaaaagtgatctccgcctcatccaatattacagtcgacggaaaaaaagtggccttagttggagatatggtcagttgcccggtagaagggcacggaacaaatcccattgttgaaggatcatcgcaccggacatttaacggtcgggctgttgtcgtcgatggctgcaaatgtcagtgcggttgtactgtgatttcaagtgctcagaacagcacggtaggataa

SEQ ID NO: 206938 - DNA, 1161 bp, Klebsiella oxytoca
atgggctgggaaaggatgaaagcaacaacaatggagttgcctcctgagccatcttttacgggatggttgttggcaggtggtgttgccgcagttgtgggtgttttactgtttatcctgcatgcatcaggaatggttaaggcactggctgtattcaatatctggtggctggcatccagcccggttcttggctggtttttcctgttttgtttgcggggatggctgtggggcagaacagtcaatgaacatcagtttttgcagaaggaagctgaatacggacagcaacagtgggaagcttgggctggacgttatctggccgtacttggaagcagcatactgctaccttccggagtgacctctgacgccattgctaaatcagatgctgcagatgcaccgcaatttctgtcactgacctgccattttgatgcgcaatcggtgaattccacctccttgctcgaaatggggctggccggtgtacaagacgcgatatcaatgttgcctgcgacagtaccattcaacgtcaccattgtgagcgacatgatttcgtcagatttcgagacccggtttcgcaaatcatgggaaaaaatttatcctggacgtgagctaacaggttcagtttcatgttgtgaagccctttcttttgactggctcgaggagcgccttaaaaatcccgttttcgatattgatttgatcctgatattgcagaatcagggggctgaactgtattccgatgcactcgcagcgatggtacttaccagcgatgatgttgctgaaaaataccagctttcacactccgcccgcatattgcgaccgatgtcgctggacatgacaaatttcagggctgatatggggttgttcctcgaaacacaaacgatcgcctgtcagacgtcaaacgtgttctgtgattacgggcactggaatgacgggtttgctgatttaatgaccgcgtctcaatcacatctgacaccgtgggtgccccaggaaattgatgtactggaaaaatataacggaattccaggggccgggagtgcgtggcttctagcttcattactggccgacatcgtgtccgtcagcaacaaacctgttttagggttgtttacctcaggtaccgatcgttttgtcagtactgttacctcagggagtaaaaataatgatgccgggtag

SEQ ID NO: 206939 - DNA, 195 bp, Klebsiella oxytoca
atgcacagacccacctctaatttcctgacggacagtaaaagtatgtcggcaaaatcacgattttttaaaaaactacaggaccagcattcctacagcgaagcctttgatactaaggcggaagcggatatcgcggcgtttcgtcagcggagcagccagctccaggcgtcaatggaaacgtggcttaggggagtttga

SEQ ID NO: 206940 - DNA, 1140 bp, Klebsiella oxytoca
gtggaaaacgataaggtgaagttaggaagaaatgataaatgctggtgcaaatcaggacttaagtataaaaaatgccatctcgatcgagaccgtgaaatgccggtatctaaagccgaagccctgaaattttcaaagtctaattcgcagagaaaggcgtgttatgcaccagcatccatgcacgaagattgtgacaaacgtatcgttcaggcgcacacgctttctaagagcagtagccttaaggcgatcgccgactctagtaatcatgttatgggagtggtaatgaacctgccgagcctgatgaaaaacaacggaagatgggttccagagaagattggtatcaatcaggcatccacttttaccggattttgtgcagttcatgacagaatattattttcatgtctagagaacgaaaaatttacaggcacggatgagcagtgttttgccctaatgtttcgttcgttgtctaaagaaatttacgccaaggaggggggaagacggtcttccgattttgctaaaaatgccgataaaggaaagttacaggccgaacaagtctatattcaggaatttgtcagcctgcatcaaagcggtttgaatgcagcaataactgaactaaataatcttaaaactagcctcgaccgcattctgcttaacagacagttttcagaaattgaaagtgttgtcttcacgttttcagaaccattacccattgcggtttcgtcaattctttcaccggagagggattttgatgggaccaaaattcaggatttgaacgatcttaccgtgtcggcggaacaggtctgcttcaatgctttttccagcgaaggtaagggatatgtagtgttcagttggctgggaacttcagcaattatcagacgttttgtgcgatcactaattaaggttcaaactgacaggattttcaacaccctcctgtattttttcttcacaaaagctgaaaatacatactcatctcctgagtggtgggacagcctcagtgacaaacagcgagagaatatcggcaatatgattatgtcgggtgttgacttttttgataattctacattacgcgtcgatcattccgttgattataactctgctgcgcttgcagagataagatacagcaacagcgagatttccagttga

SEQ ID NO: 206941 - DNA, 813 bp, Klebsiella oxytoca
atggatgatatctcattatctattgccagaaacatgtttcacctccaagtctatgagtctgacggagttcgctttgaggacttgttttcaaaaataatgtactataagtcgccagattttcagcaggtgaagccttatggaaatattggagacagaaagaatgatggttttattaaggggcagggggtatattatcaggtgtatgcaccagaagatgcatctaataatgtactagctgctgttaataaaataaaagatgattttgaagggttaagggattactggcatgatatatgtcctattaaaaaatattactttgtcttaaatgataaatataagggttccttaccgcagttgcacaaggaattaattgttttgcaaagtgattttaacttaattgatactggagttattgtagcgaaagatcttgaacgtgaacttttcaacttaccagatgacatgattcgttcagttgttgggcacctgccagacattgatcatgaagaatatatgtttgtatctggctttacttgtttcatctctgcttggattaattttgaaaaaattgcaaggcataaggttttttcggctaaacaacctaatcgccctctttttatagggaaagtagtcaatgctttagtaaaaaacaaaataatttctaggcaagatgcaacttttattaaaaaaattactgaggttagaaatagtcttgtacatggggtttcgatgttagtccctaagaagaatgaaatcgatatgttaattttcattactgaaaaaataaaaccagctggtgtatgtaggctagattaa

SEQ ID NO: 206942 - DNA, 1254 bp, Klebsiella oxytoca
atgcttaccgatatccagcttaaaagacttaaaccgcaggaaaaaatctacaaagttaccgatcgtgatgggctctatgtggccgtatcgcccaccggaactcgctcatttcgttacgattatcggattaatggccgtcgtgaaaccctgaccattgggcagtatggcgctgacggtatttcactggctgaagcgcgtgaacaactcattgccgccaaaaagctgatcaagtcaggcgtgtcgcctgctgtgaagaaacgtgacggtaaaaatcagatcagaaatgcggaaactttcgcaaattttaccgtcagctatatgaagcgtgcctcccttgcggacagcacgagatcgatgaagcaggccgttattgaccgggacatcattccttttctgggtaacaagcaaatggcggagattacgccgtcaatggttcgaaccctgtgcgatcgcatcgtggatcgtggcggtaatgccacggcggtacaggcgcgtgagattatcagtagcgtttatacatacgcgaaaaaccgggggcatgactttaagaatcccgctcaggatatcaaggccagttcgatagccacatttcttcctcgtgacagaaccctttctctgccggaaatttctatcttctttaatacgctggataccgtcgctggcatgcccacgctcaaactggccctgaaactgatttttcttacgctggtgcgtaaaagtgaatttactcaggcgacctggaatgaagtgaatttcaatactaatgaatggaccatacccaaaggccgtatgaaagggggacggcctcatgttgtctatctttcccgtcaggcttgcgatctgctggtggcgctgcaaatgtgtgctggaggaagtccttacttacttgccgggcgctatagcatcaacaaaccgttgtctaatgcagctctcaacggggttattaccacgacggtaaaagttgcacagtcgcaggggaagtcgctggagcattttaccgtccatgacatgcgacgaaccgccagcactttattgcatgaggcagggtatccatcagactggatagaaaaatgcctcgcgcatgagcaaaaaggggtgagggcaatttacaacaaagcgaaatacgcgcagcagcgtgcttacatgttgcagcagtgggcggatatggttgatgggtggatcgccgggacgctggtgaggcttacaccgttttcgccgagtaagtatgaggagtggctaagttgggaaaggtaa

SEQ ID NO: 206943 - DNA, 1230 bp, Klebsiella oxytoca
atgaacaccttccaaagtccgagagtcattagaactgaggaacaataccatcagtacctttctgaagtggagaggttgctatccttagacttggctccaggttctgaagaatcggaacgacttgagttattaacagttctcatcgaagattatgagaattcaaattatgcaatcacaccagttaaccctttagacgccatcaaatttcgaatggaggaaaaggggttacgtcaggttgatctggcaccttattttgggacgaaaagtcgagtatctgaagtgctttcgggaaagcgtccactgaccgttgcgatgattaaagcgctctctgtaggattaggtatagctcctcaaacattgttaggtttggagacagaggctgaatataccgtaaatactacagagaatgaagtaaattggtctaagttcccaattaaggaaatgatttcacgtggttggatcgatagtattatttctaaaggtaagaaaagtgctgaggagcaagttaagtctttcattcagcaattgggagggaattcggttgctgcatcgttcaaacgaactctcagtggagatgcatactctccgtcaactcaatataaattatatgcttggatagctcgagttattcaacgatctcgtgaaaaagaaaatattggtgattataaggataactttataaacaaagattttttgaaagagttagcacagttaagttggtctgaatatgggccgcttttggctgtggaatttctagaaaaacatgggatcagtgttgttattgaaccagcgttgacaggaacatctgttgatggtgcagctttaaaagataatagtgggcggcctattatagccctttcattaagattagacagattagataatttctggtttacacttctacatgaagttgtccatatatggaagcatatggaatcaaataacacctttgtagatgatctagagagtccaagggatagtaaagataaaattgaagcagaggccaatagaatagctagagatacgttaataccgcgtgttgtatggaaacgtagtgaagcatatttaaatccgacttcggcaaatattgataagttatcaagagagttaaaaattcatccagcaataatcgctgggaggattcgacgtgagtcagggaaatataatcaattctctgatttgattgggcaaggtgaagttaggaaacattttcctaatcaaaattggtaa

SEQ ID NO: 206944 - DNA, 1134 bp, Klebsiella oxytoca
atgtatcctacatacatgccagtgcttaaagcgaaaaaaggtgagtttgatacctttaagcagttacctataaacattaaaaatgaaatgcttcctgtatttgagttgcctttattatcagagaaacaaagaacgagtaaaaaatataagtcgcttagttctccagtggcagcttttatcgagaagtgtgctgctgacttaagttgtataatggaaggcagattcttttctgttgatgttcaccgttggccttcaaatgcaactattgaatcaggtgaacatgtattaagctattttattggttgtcttaaaaataaaggatgcaatgtcattcctgtcatcggatatgaccgctgggaggatgaagagtatgctactgtccttagacagatttcaaaaaatatcaataaatttgtaattagattagattcttttgcgtttgacgatatgatcgaagaagagccattttttgatacgatagatgacatccttgcgtctatggatatagatgttgaaaattgctctgtacttcttgattttgatgatgtgacaaagatgtctattcttgatatacaagaaaacacacagcgagcgattgatattttagattcttatgattttaagtttatatcaattgcaggttgttcagtatcaggtgatattaatgggatggttcctgaaataaatactgatggtgtagttatcagaaaggaatttaaagtttggaagaccataagaaaattcaaccccaatgttagatttatatttggtgattatggaatagcaaatccacagctaagtgatgatttaattgcgccagatgccaatggtaaaattcgttataccattgaagatagctattttgttgttagaggttactctcggaggcaaggagataaaggagcccaagtgtatgggttatgtcgacgtctgattaactctggacattacatggggccttcttttagttggggagattttaaaataaatgaatgcgctcaagaacagtttttaggaaactccacaaattgggtttcaattgatacctctcaccacatgacatacgtgcttgcagaggtcaaagaatttgagaaacaaatcgtggaagaaaaaacaagagagattttaatttaa

SEQ ID NO: 206945 - DNA, 960 bp, Klebsiella oxytoca
atgaacgcgtaccgccataacccggacacggtgctggttgccatctgcgacaccgatacagaacgctgtgacgaccttgccatggcctacggcgtgatgggctatacccggctggatgtcctgctgcaggaggaagccattgatgtagtctcagtggcgacaccggacccgtaccacaccgaatccatcctcaccgccctgcgccacggcaagcatgtgctggcggagaaaccgctcgccacctcggtacgcgagtgcgagcttatcgtggagatggcgcagcagcgggacctgctggtcggcgtcgatttccacaaacgctgggacccggcggtgatgcgtattaaggccgaactggagaagccggaagccgggcgcatcccgcgcgggcatatcagcatggacgatgtcatcagcgtgccgacagagtggctaaactgggctggcgcaagctccccggtgtggtttctcggctcccactgctttgacctggtgcgccatctttccggccaggaggtggtgtcggtgtacgccgtcggacagaagcggctgatggtcgaatgtggcctcgataccttcgacagtgtgcagagcctgctgacgatggccgacggcagttcgtgggtggtggaaaactcgtgggtactgccggagggctttccgaaggacaacgacgggcgtatcgatattctctgtgaggcaacctatatccgcagcacctcgcagcatcgggggctggaaatcaccacgccggccatgacgctcacccccaacagctatttcatcaactaccgcaacggcatcgccagcggtttcggtatcgaccccatcaatgactttgcgcgcgcggtcagacataaagcgccgtacccggtcaccgcagtggacgggctggcggtaagccggatttgtgaggcggtacatcgcagcctggagagcgggaaacctgaaaatgtttaa

SEQ ID NO: 206946 - DNA, 360 bp, Klebsiella oxytoca
atgaccaccagcttgcgtcgttataaagatttattccctaaaacgggcctacgcgtgatgatcgacagcagcagcgtggtgatcggcgatgtcagaatagctgacgatgtcagtatctggcctctggtcgccattcgcggtgatgtgaactatgtggaaataggcgcccgcactaacattcaggacggtagcgtcttacatgtcacgcataagtcttcatctaatccacatggcaatccacttatcattggcgatgatgttaccgtcggtcataaggtgatgctacacggctgcactattggtaaccgggtggtaaccgggtcctggtcggtatgggttcgattttgttggatggcgtga

SEQ ID NO: 206947 - DNA, 5727 bp, Klebsiella oxytoca
atggcgattaaaaacagcgcaatcatttatgcaggttatgattatcagacactccaaggggtcaggttattggcggattggctcaatataccaactaaatataaccgaattgcattcgaggctgatgcgaaaaagattgatgctccgcaaggtattgatgacattgtctgcgaacgtcaggatggtaaaactgatttttggcaggttaagtttacaccagatacagacaaagaagacaatcagctatcatgggaatggttattgaaaagtagtggtcatagtcttcgatctcgttccatactgcaaaaaatagcggatgctgttgataaagtacctgcggaaagaagaggaaatattactcttttgaccaataaaataccaagtcgtgagatggcaatttgtttgcgaaataacataatagtttggaatcaggttccagttactaagcagcagaaaataattactcagttaggttcccttgaaagagcaaaacaatttttcaatttattacaagtacaccatagtgatcaaagttatacgagattaaatagtattgtcccagaattacttcgcaaacataccaacgaagagggtgtgtatcgcctgattgaacgagctaaacgttgggctatccagcgtaattcaccttcggatgatggatggatatatcttgaacatattcgttcagtgatttcaactaatagaccagaacctattccgcaaacttttgtcgtgccagataactatattgttcctgatgcagattttcacgagaaattcattggtttaattttcaatcctatcaatcgattagttgtcttaactggtgctccaggaaagggtaaaagtacttacattagccatatttgtcagatattaaaagctcgtgagtttccttatattcgccatcattattttcttgggttagatgaccgtacagtagatagattaagccccagagttgttgctgaagacttgatgtctcaggtcaaagtattttgcccacaaatcgaaatgaaaaattattatgcagagcatctacataaagtgttagctgaatgtgggagaatatatgaagaagaaggtaaacaatttttcgtaattattgatggtttagatcatgtttggcgtgataacggcaaagataagtctccactggatgagctattttgccaattgttaccgttgcctgacaatgtgacattattggtcggtactcaaccagtagatgatgagttattgccatcacgattgttacagaacagtccaagaaaaaaatggcttcacttaccaaatatgtctggtgatgctattcgcatatatctatcaggacaagttgaaagtggccgaataatatttaatttccatcaaagccagtatgaagaagttttatcacaatgtgctgaattgttgactactaaaactcaagggtatcctctttatgttatctactcatgtgaaaaattacatattgaaggtaaaaggttatctctctgggaaatagaaaatctgcctgactgcgaaggcggaaacattacaaattattataatgaattatggaaaacattaagttatgagcaacgcgacattcttcatctctgttgtgaatttccttttttatggccagaaacgtcattttctgaaattttttctgagagcgcagaaattataccaaatgttaaggctgtaatccatttgctttatgagtccattgtcgggttaagaccgtttcatgaaagcttgattgtttttatccgtagcacaactgaacatgagaatagaataaaaatgttattgccagctctcatttcatggctggagaagagcgcacctgaaccgataaagaattgttggtactggtcatgtgttgcttgcaatggtgacccatatcctttaagaaatggcttgactagagactggatattggagcggttggctgaaggatatcggcaggatgagtttatccgattacttactcaggctgaaacttcagctttagccgaagggcattttcatgaagcctatcagcatcgttcgcgcaagactcgactacttaatgccaggctgcaaatctgggatatgtcgacattaggcgtttgcagcatgattaatgcctctgaagcattgcttaaacaatatcaatctacccagaatatcagttcgccaaagatactagcaactttggctatcgctttatggttccgtaatagtttcgacgaagcaaagcgcattacaagattggcgttacaacgctactcaaatgaatcatccgtatatactaataaaaatagcgatgagtcgcgcgctgatattcgtttattaattaaatctgctgttttaactgagtgttttgaggaaaaatggttggaatccggttcagtacacaagtggggtgacagtaatattaacctgcttatcgaatgtgcggaatataaagccgacataggatttctatttgcattacataatatttttaatcaaggtggtataaaagataaaatagtcaatgcgattgtcagagttgggattgttgaaaaaatagatttagaatattggccacgattttctgatcttgactctgccctgttgcggttatacagtcatttatccattgtatatccatgttcacttataacagaacaaggtgaaagtgaaatcggtaggtaccatattcatccggaagtatcctacgatgaatggttctatgaaagcctttcttatcgtcttaatgccagtgggaattattgttggctaccggttagccccgaggaaggactggaggaagtcagcaatcactttcaccatttaaatgatttctctgatattattgctgaaagtatggctctaaatattaaacaaagcttcagcgatttttgtgatcttattgctttggcatcagatcttaaagatcatcaaatgcaaatccaacagaagcgaatgttttttaaaactgattgggtaaacattgctttaaatttacacttaatcatgcattgcaagccggttaatagagaagaaattaatatagttcttaattctgagcatacagccctgtatcgtctacataaaactattcttaactttcatagtagagccttcgaatctgaggcaatagcaaactttctggtatttgaggatgagagacagaaggaaaaactgaaagagacaaatgaatatttggctaataatcttgagttatcagagattgctcttcattatgacctcaaccaatcaaatttttttgagcgagtcaagttatgttgggactatggtctgggatatggacatcataaagatatatctttaaatcaggctctgactgcaatagaaactattgcagctgttgagcctaaatatgcgttaacgcagcttgagcgtgtgagtccattggttgataatatttgtgacttcacagatggtgaccatactcaacattccgtaacggaaatgtctgcactatatgctaggctttctcctcttattttaagtagcatctatgatagttatgttagtgaaggtgagtggtatgatgctgataacgcattaacacaatatttaaaacatgctgatctatcatcacctttcgtcgagagtttatgtctaacattattagatgatgggcaaattgaaatagtacggagtcggattaaagatagttcggtattgacgacattttggccggaaatattaccacaaaaaattgattgtagtaatattgtagattcttcactaaagtccgttgactattttgagcctgcaaaaatcagacctactgatgtaactaatttactcaatactcggtcaggttatgacaacattcctaaatggtatcattattggaaagaccagggaaaggttatagacttaattaacgtattattgccgattatcaatgatggcttacctaaatatagtgaatttcgttatatattatctgatttatttgaagatacattgcgtttgaaaggtaaaaaatatgcttttcccattttagtacaggagcatattcaaagaaacggttggggtgagtggggggaatcggatgatcaaacatacgctcggttagataaagttgccatattatacccggataaaattgatgactttatttgcaagacgactcgacttcattactataagactaaagaagacaacttggtaattcccggtaatagactaacatatctattagtaaaggtaggacgagtagatgaggcgaaaagtctatgtgaagcgatgatttctgagctagaggcagaaacccggaatcttccattgtgcaagccacaatggcaatgggagggagaattagataacgatatgatcgctgttaaattcatcattcgtcgtcttttttggcctgttcaatgtgtaaaacatcttgtcgctgagcagttgtcacatattttagcaaatagtaaacgtgctgaagacattgaaaatttacttgcaactgagatgagaaatcgtcaactggagtcagaggtggtagatattttaactgttttctggctagctagcctgaaaggttataaggtccagaataatatctcttcctttatttgtgctcgtagctttctttcagacatattgctggagtctatcgctccaaatttaccaaacctcagttgctatcaagtactgcataaacatcctgatgatagtaatcactatggatttgaaaagattcttggcaatgacctcccccacatattttgggatgaaattaaaaggcttgaggataaatcagggatcccagctcaaagattaatgaaaaaagaatggagtgatatttgtcataaccatattcaacgatgggaaagggttgattatttcttcggttcagagcgtgatggttttactatgagtttttccacgaggaatacacgatttggtatatctgcatacttgagaaccattaaccgaattatcgctgaatttagaatgcccaaggattacgcagaacattattcggcttgtttaatgtcggccaacccattattttattctgtgtcaaatcacaggcctgattggttaccttcatggcaatatggggcgattactacaaaagaaaatataaagtcatatatcgaggaatgcctaaaagaatttaaaaatgaaaataataacttaatgttaggcgcattatcattacctatacgcatagatgaaaataattggttagatattacgattgttatgggcatacaaacagaagagcatgtctcttttaaaattcaatatgcagactgcggtcatagtatagatagtttacttcaaacttatagaaatattgaattttcacttgcaaaatgggctgaatataaaaattgcgtaccactattgggaagcacaggcgagttactgagaatagcacggtgggatataatgtacgaattccgtgggcttttctcattatgttgccaggaacaggttactgcctacccagctaaagattatattaacttcgattatcagggcaataccatcggctatagcgacttctggcaagcaataccattatcaatttatcctaaggatatacgctcacctgttgctacttacactgcttatgataaggaccttgcctataaatggaataatcatagcgtactgaaaaaacctaatatcatgttatgtgattgtaaggtacttaagagagaaaatagttacactccttttgaaacatcagatattcgatttcactttgaatctgagccattatag

SEQ ID NO: 206948 - DNA, 615 bp, Klebsiella oxytoca
atgtacagcgacaaccactatctggcggaaatggcgacccttctcggcaagccggaggaggcaaaacgctaccgggcgctggcgcaaaagctcgccgactatatcaacacctgcatgttcgacccgcagagcaaattctattacgacattcgcattgaagcgcagccgctggcaaacggctgtgccggtaagccgatcgtcgagcgcggcaaagggccggagggctggtcgccgctgttcaacggcgcggccactcaggcgcatgccgatgacgtcatttcggtgatgctggacaacaaagagttcaatactttcgtcccgctgggtaccgccgcattaacgaatccggcgtttggcgcggatatttactggcgcggccgcgtgtgggtggaccagttctggttcggcctgaaagggatggagcgctacggccaccgcgaagaggcgctgcagctggcgggcgccttcttcaggcacgcccgggggttaacctccgatggcccgattcaggagaactacaatccgctcaccggcgctcagcagggcgcgccgaacttctcctggagcgcggcgcatctgtacatgctgtataacgagtttttccgtaagccatag

SEQ ID NO: 206949 - DNA, 699 bp, Klebsiella oxytoca
atgaatttcactcagactataggtatcgggttagcggcaatgctggttattagcggatgtggggctaaagaaccgccgacgcaggtggtttatcgctttgacgaccatcgttatcttgaattaaagggctggaactgtgagggagaactctggtacacggatacgcagagggggattcataaccagatatggagtcagttttatcgaattttcaccaaaaaatttgtgcatccttcggaacgttatcttgctatcccaaattgggacccaggggctttctctgtatcaaaggattacggaaaaaactggaccacggcgacatattctcccggagaaaacgaaccgaatggtgactcatcaccgccgagagacgacattctttccttcacagttgtgaatgatcagggctttttgcaaacgaagcaccggttgtatatgtcgtcaaagccgtttgacgatccgcgcattcttcccggtggtccggggattacctacactcttgatgacggaacggtacagagaattgaaccacaatatccgggaaaggcctgggggctggattatattaccaaacaagcgcttgtaaatgacacggccaaatataaaaccaattatcaggatcttcccgataaagtaccggaagtgaaaaattaccagggctgggatcatatgcggtgcgatatggacgccgggaaataa

SEQ ID NO: 206950 - DNA, 375 bp, Klebsiella oxytoca
atgatgatttactgcgcacgtatcgtcgctatcgggctgttcgtcgctgatggtctcaccgacaaaatgctcatcaccttcgacagcaacgggccgaaggactgcctcgattactcgctgtcgctggagccgtcgttccgggaagagagcctgatgatactccccggcgaccgcctgatgctggcagggcatgattatctgattactgccgtcggcaagggggcacagcaggcgctgtttgaactcggccatcttacactggtgttcaatggcgacctgaacccctgccacgtcggcgcggttcatctctccggtccggtgccaaacctgcgtgacctccacggcaatctggtgattgaggagggacggccatga

SEQ ID NO: 206951 - DNA, 507 bp, Klebsiella oxytoca
atgaagtatctgcatcagcgcaggacctatgaatgcacaaccgagcttcttggctggtgctatcagtttggcgatcacatcattctctctgatgatattcctactggtaaaacaatcagttgcctgatcgaggccatggcattcgatgatgaagttatcacgttaacggtcactgagcctctggactggagctacgctaacccgcgttgctggatacagtttcaggacggtcggccatcaacccgcttattaaccccgacgcgcgtcgatgactttactctttcaataccgtacaacgccgatctgcatcctgaagactggacgatggatgacccggatattgaattaccgcgcctgctgttttgcgacagcgagaagggtgcacgacacggaattattcaggaaatagtcccctcggatgacggcacctgtcaggtgaccgccccggaatataaagaaattttctacgcatacgacgacgccacataccccggcgacgtcgcgtaa

SEQ ID NO: 206952 - DNA, 309 bp, Klebsiella oxytoca
atgctcatcaccttcgacagcaacgggccgaaggactgcctcgattactcgctgtcgctggagccgtcgttccgggaagagagcctgatgatactcccgggcgaccgcctgctgctggcgggccacgattatctggtgactgccgtcggcaaaggggcacagcaggcactgtttgaactcggccacctgacgctggtgttcaatggtgatctgaatccctgtcatgtcggcgcggttcatctctccggcccggtgccgaacctgcgcgacctccacggcaatctggtgattgaggaggggcggccatga

SEQ ID NO: 206953 - DNA, 375 bp, Klebsiella oxytoca
atgatgatttactgcgcacgtatcgtcgctatcgggctgttcgtcgctgatggtctcaccgacaaaatgctcatcaccttcgacagcaacgggccgaaggactgcctcgattactcgctttcactggagccgtcgttccgggaagagagcctgatgatactccccggcgaccgcctgatgctggcagggcatgattatctgattactgccgtcggcaagggggcacagcaggcgctgtttgaactcggccatcttacactggtgttcaatggcgacctgaacccctgccacgtcggcgcggttcatctctccggtccggtgccaaacctgcgtgacctccacggcaatctggtgattgaggagggacggccatga

SEQ ID NO: 206954 - DNA, 309 bp, Klebsiella oxytoca
atgctcatcaccttcgacagcaacgggccgaaggactgcctcgattactcgctttcactggagccgtcgttccgggaagagagcctgatgatactccccggcgaccgcctgatgctggcagggcatgattatctgattactgccgtcggcaagggggcacagcaggcgctgtttgaactcggccatcttacactggtgttcaatggcgacctgaacccctgccacgtcggcgcggttcatctctccggtccggtgccaaacctgcgtgacctccacggcaatctggtgattgaggagggacggccatga

SEQ ID NO: 206955 - DNA, 468 bp, Klebsiella oxytoca
atgaagcacctcgcgcctttgacgtttatggcagaaatcgccaatatccctgaccccgtacagataacaatcaactacagcaatcatgtattttctgaccagaaaggaaacggaccggaaattccaccggatcgatttttctgtgctgacagatatgctgccagccttaacctgccgcagatgctttcaacaaatctgctgacctcctacgttgttccccatatcaataagggaaacaatgagatgtatcattatatggaggttaatgactatgcgatcttctttgacttacgtaaggacaacggccacccgaacggcttaaagctttatgttgtatcagcttatgaagtcaatcagtggggacgacactccataccaaagagtaggcccatgaaatttgcatatgtcgcacatctgcgactgaatggacagacggtttacacgtccagaaaagcaaaaaggcgctga

SEQ ID NO: 206956 - DNA, 279 bp, Klebsiella oxytoca
atggagcagcgtctagcggttcttgaggccaaagtgtctcacattgaatctgatgttactgaattgaagaacactgttgcagtagttgataaaaacacggctgtaatccttgagcgccttgatggcataaaagaatcattagcaaaaaaaccatcttctgacgctgttgataaaaaaatcgcagaagccaaagtctctcaaataatctggacaattggttcagtgctggcaattgtctctattgcctctggtatcgtcatcaaggttcttcactcctga

SEQ ID NO: 206957 - DNA, 429 bp, Klebsiella oxytoca
atggaaaaaattgcatttttatacgtatctcaaatttttcccggaaagatagcgcgttcagttaactacccacaaccatggatcaaacctgatgatgagtcagggaaaatcagcattgatgtatcatttggattaataattaaaaccaaagtcaattatcgtgtcgatgtggatatgttctttggggatcaaagagttgatttcggcagcaaccaatccttacaatctgaaccgataatagcaggtacgacttccggaaatgaatcagttagcatcgagaacatgtcgctaatgaacgtagctgtaaaagatgagggaatttataaggttacactatctttacatgtaatggacgacaagcaagaaaaaagcaacatggttcatagcagtgagtgttttttctatttatcaaaagaatggaaaatttga

SEQ ID NO: 206958 - DNA, 246 bp, Klebsiella oxytoca
gtgcttgctacccactgcggcctcagccgctttcagctgatccgcggcttcgctcgcgaaaccggcatcacgccgcacgcttatctggtacaggcccgcctgcgcctggcgcgccgcctgctcgccgaaggtcactcccccgccgataccgccttcatggccggctttgccgatcaaagccatctgacccgcgcgtttcaaaggcagttcgccatgaccccgggcagctatcaggcgagccgctag

SEQ ID NO: 206959 - DNA, 537 bp, Klebsiella oxytoca
atgaaacttttgcctttactggcagctttacccctgctctgcgcaagcgttgtttccgctaactcactgatgtccgtcggctactttaacggcggcggcgacgtcactgccggtccaggcggcgatattgataaactggacgtacgccagattacccatctcaactactcgtttggtctggtttacaacgatgaaaaagacgaaaccaacgccgccctgaaagatccgagcaagctgcatcaaatttggctgtcgccgaaagtgcaggctgatttacagaaaatcccccgcttgcgccagcagaacccgaacctgaaagtcttgctttccgtcggcggctggggagcgcgcggattctccggcgcggcggcgacgaaggaaacccgggcggtgtttattcagtccgctcaggcgattattgaaaaatacggtctcgatgggatcgatctggactgggagtatccggtcaacggcgcgtgggggctggtcgccagccaaccggccgatcgcgataattttaccgccctgctgaaatag

SEQ ID NO: 206960 - DNA, 165 bp, Klebsiella oxytoca
atgtcttttgaatcctctttttttctgtgttttttcaatgctatttatagccctgatgattaccaaatcctttttgtgtttttaatcgaacttatcaatgatatattgtttccaacgtattttaagcgggagcatttagtactgttatcagttcgctcgcattga

SEQ ID NO: 206961 - DNA, 201 bp, Klebsiella oxytoca
atgaaaaaagaaacatcgtttcaatttaaaactcgttcagcacattgcacctatcatgaagtgctcattgtggacaatgatcgctgtgagccgcacggcgaaaggcttttaggcaaagtgattaatagtttcaattgttactatggcaactttaaacctgtaaaaacggcattctttacctgccaattaccagcggattag

SEQ ID NO: 206962 - DNA, 441 bp, Klebsiella oxytoca
atgacctcgattactaagacatacgagaagatagccccaaaacttgatgacatggtgcgccgtggattcagcgacattgagctaaggtatggaagccaacacgaaatctacgcttatggcgaaaggaagctgttagccgaagagtttcgtaagctctaccctgagaaagtaaacgacattccgcaagacttcccgccagatgccaccgtgatcgtggaagacatggtattgctttataaaccccgcaacggacaactaaccagaaccgcatcagagacacagcttaagcatcaccaggctttcaatgattggtgtcatactaatgttggcaggggaaaaggctacacccagacgacaaaaaacgcagttaacgcgatcaacatcgtcggcgctatcgtattggttgggctgatcatctggggtttaacacatatccgctaa

SEQ ID NO: 206963 - DNA, 594 bp, Klebsiella oxytoca
atgcaagaaaccatgacgagaatagaactgtctggagtcctgggtaaaacctttgggaaggttcattatcgtttaataaagaacatcaatgaagccggagaggcattatctgcgacgatccctggatttgaaaggttcatgatatccagtgaggagcgtggattgacctatgcagtatttaaagggaataagaatatcgggcatgatgatttaggattccctgtaagtggcgaaattatccgcatagtccctgttatcattggcagtaagaaggcaggaattctccaaacaatccttggtgcagttattgttgcggcaagtgttgcctatggttttttcacagaggattgggctaatgccgcgtatggtattcaagctggcggcgccatgatgctcggcggcgtcgttcagatgctctccccacagccagctggcctggcacgaaaagaatccgctgacaataaagcgtcctacgcctttgggggcgtgacgaacactgcctctcagggatacccggtccctttgctttatggcaaacggcgaattggcggcgccattatatctgccggtatttacgtagaagaccagcaataa

SEQ ID NO: 206964 - DNA, 828 bp, Klebsiella oxytoca
atgaatgagccaatcactgagcagttatacaataaagttgtaaatttcgttaataaaatggatgggagtgtgcgctttgattatatttctaagtccttgcgcattcctcctgacactcttgatgaaattgtggacaggatgattgctgatggagtcgttgttaatacaggaacggtaggtgaatatttaccagtaaaacacgcatcttccaaaaacactgataaagataatcgatgctgtacatctcaaaaaaacaatgatagtagtggactaaaatttcttgttgggagagtagcattagttatagccataatattttttattataacctgcttttatgcttacagagcaccgatatcgtttgtttttctaatcccagccataatggctgcatttgtttttacaaaccaaaatcatggtggagaaggtttcctagggttgagttcaatctctgcatgtttaatctttttgctccttactaatgcgcagacaccaatatttggagaagcatatgaattaagaaagcagaggggtgaaattaaaaatgaagttactaggaaatcaaaggaagaagatcagcaacagctaaatgatatccttaacgccagagagcatataaaagggatgctaaaagacccctcctcagctaaattttttggtgaattcattggaaaaaatggtgctatctgtggccatgtcaacgctaaaaatagttttggtggttacactggggagtctcgttacatattttctgtcaatttttctgcaatagatgaaggcaccacctcctttaataaggagtgggagagacagtgttatcttaattga

SEQ ID NO: 206965 - DNA, 525 bp, Klebsiella oxytoca
atggaagggaaggggctgttcaaatattcattaatttcattgctattagggataatcccaataataataatattttttattcatttcagcaatgaaagctcacacatcatttcatacctttttgatattgcaaatggatatcaaagggatttttcagaacaatatttagccgtgagcactatagcttctgcatatactaaaaccgcaccatttttcgtcatattaatgtatataatttgctggaacaagtttgatataaaaaccatcaaactcgatttgaagcgatggcttaaacttctgcctggtgtactccttttaacggcaggagcatactatttaacatatgttggtgtggaaaatatgtctgatagtatgtaccgtattaaaagagttatctctggcaatgaatatttcttaatggtttattacattcttttatttttgactaattatttttttatttggttactttttatttatttatatcttttaaaaggtctgcctttttttcaaaagcggagataa

SEQ ID NO: 206966 - DNA, 1134 bp, Klebsiella oxytoca
atgcctgaagaaacattgactgtcgtaggtggtggtaataacagctgtaatgttagctggggtggtggcaatggtaacaacggtggtgctggctattctggtaaatacggtggtactagctatgaaggtgcaactagtatgttgaagttgaatgaccgtgttttaattcagctttatctttgcaatccgctcaacccagattatattggagcaccttggggcagtgataaagatgcagaatcaattatcagagctaacagagataaagcaggaaagttcaaggctaatattcagaactggaaaacaagcggtacaggttctttaggtagccctgtagttgggaaatcttatagctcaggtgatgtagatacttattcggttagcttcggaaaagaaaaatacaatgtcctgtataaccgtaaaaaagactcttttactacagcttatgtcgatggcggcgcaaataaacctgagcatagcatgaaggatcaggctattgccgttgttaaactttaccttctcaacgaaagtcaggcatcggtaatcgatactacatcgggaattattactgactctggtaaaactcttagcgggaaattaggtgataaatacaacactctggcgaaagaagctgctgacaatataaaaaacttccagggtaagaaactccgcagttttaatgatgctatggcatctattaatgaactagctaacaatccaaagatgaagttaagtcaggcggataaaacagtcgtttctaatgccctcaaacaaatggatttgtcagcactagctgaccgattcaaagggttagagaaagcctttacttggggtgatcgacttcttaaagccgagaaaatcagagacggtgttgttactggtgttaccacaggggactggcaaaagctggcgtttgaggttgaagctatgtacctcagtggtgttgctggcgccgtagcgttagggattactactgccatgattagcacagtcgcagtcgctttgtcacttccagctgtagctgtctctgcgcttactgttgtgtccgtcattggcatctctattctcacatcttatatcgatgctgataaggccaaagcactgaataatgcagtgcttggcttatttaaataa

SEQ ID NO: 206967 - DNA, 801 bp, Klebsiella oxytoca
atgaacgcactctctgttttctcgtttcaggaaaaccaccccgtgcgggtggttctggttaatggcgaaccgtggtttgtagcggttgatgtatgtaaggcattaggactaacgaatccgacgaagtcagtatctgcactcgatgaagacgaaaagcagctttttagcggtgactctaactttaagttagggtcagcaggaaaaggggcgcagtcattgataattttgaatgagtccggcctatacacactgatcctccgctgccgcgatgcggtgaagcagggaacgacggcctggcggttccgcaagtgggtcaccaacgaggttctgccagctattcggaaaagcggtgaatacagctacgtcgaacccgcgccaaaaagcgccggtgaaccattggactggcggcaaaaggaagaattacgcggcctgataaacgatatagcccaaagttttcggtaccacaacgcatggaaaagtggtgtatggctggcgctacgtcgcgcctgcaggaatccatcccccaatccgattacggttgacgatctcccggccatcactgccgagttgcgtcggatattaacgtcggcagaaaccgcgctggacaatatgcggacctacgagcgggaatttttgcgtgaggtggttcgtggggcgcgtcggagtgtgtcgcgagaggaattatcaatcatcgaccttggctcagaggtggagaaggtgctgccagcgcatttcgagctggccatcaataaactggaggccttatccacaaaattagaggctcctgccgtctcttcctga

SEQ ID NO: 206968 - DNA, 1923 bp, Klebsiella oxytoca
atgcgtaaggtgaagattggtgagctaatcaattcgcttgtgaacgaggttgaggcaatcgacgcctcggatcgtccacaaggcgaaaaaacaaagaaaattaaagccgcagctataaaatataagaatgcattatttaatgataaaagaaagtttcgcggaaaaagcttagaaaaaaggatttcggctaatactttcaatgcctatatgagccgggcaaggaaaagatttgatgataaattacatcataactttgaaaaaaacgtaataaaattatccgaaaagtatcccttatacagtgaggaattatcctcatggctttctatgcctgcggcatcaattcgacaaaatatgtcagccctgcaaaccaagctaaaagaaataatgccattggcagaagatttatcaaatataaaaatcggtgcgaaaaatagcgatacaaagttagccaaacttgccaataaatatccagaatggcaatttgctattagtgatttaaacagtgatgattggaaggaaaagcgagattatctttataaactcttccagcaaggctcttcgcttctggaagatttaaataatctgaaagtaaaccatgaggtcctctatcacttgcagcttagctctgcagagcgaacctccatccagcagcgctgggccaacatactcagcgagaaaaagcgcaacgtggttgtgattgactatccgcgctatatgcaggctatctacgatataatcaataaacccatatcttcgtttgatttaaccacccgtcgtggtatggcccctctagcgttcgcgcttgcggcgctatctggtcgacgaatgattgaaatcatgcttcagggtgaattttccgtcgcaggtaaatatacagtaacattcttagggcaagctaaaaaacgctcagaagataaaggtgtatcaagaaaaatatatactctttgcgacgctgatttatttgtgagtctggttaaccaacttcgctcctgccctgctgctgcggattttgatgaagtggttaaagggtatggggaaaatgatactcgctctgaaaatggtcgtattaacgctattctagcgacagcgtttaatccgtgggtaaaaaaattcttaggcgatgaccgccgcgtttataaagatagccgcgctatttacgcccgcattgcctatgaaatgtttttccgcgttgacccacggtggaagaatgtcgatgaggacgttttcttcatggagattctcggtcatgacgatgaaaacacccagctgcactataagcagtttaaactggcaaacttctccagaacctggcgtccacatgttggcgaggaaaatacccggctggcagcgctgcaaaagctggatagcatgatgccagatttcgccaaaggcgacgccggggttcgtattcatgaaaccgtgaagcagctggtggagcaggacccatcgataaagatcacaaacagtaccctgcgaccatttaacttcagtaccaggctgattcctcgctacctggagtttgccgccgatgcattgggccagttcgtcggtgaaaatgggcagtggcaactgaaggacgaggcgcctgcaatagtcctgcctgatgaagaaattcttgagcccatcgacgacgccgatctcgatgacggagaccaggaagatgaaacgctggatgacgatgagatcgaagtagacgaaagcgaaggagaggaactggaggaagtggacgacgctgaagaggccgaggaggctgagcaggaagagaaacatcctgccaagccaaactttaaagcgccgagggataatggcgatggtacctacatggtggagtttgaattcgatggccgtcattacgcctggtctggtgccgccggtaatcgggtagaggcaatgcaatctgcctggagtgcctacttcaagtga

SEQ ID NO: 206969 - DNA, 801 bp, Klebsiella oxytoca; identical to SEQ ID NO: 206967

SEQ ID NO: 206970 - DNA, 231 bp, Klebsiella oxytoca
atgaatcaggtgcagctaaacacccagggtctgcttgaatcgattgaggagcgtctggcgcagatagaagcgctggtttcctctgcccaccggacgatctccagttacgaggcctcactgtatatgcaggaggcggcagaattactccaggttgcccgtgagctggtacaagaggctcgaagctgttcttcctctctgtcagcgcagctgaccgccagggaggccaaatga

SEQ ID NO: 206971 - DNA, 165 bp, Klebsiella oxytoca
atgttcaaatacaggttcgcggcgatctgccgtaccgataaaaaatcccatatccatcatctgtccaccatcgcctcatccgagcgtgaagcccgtcgtcagttcgccagccgttttgttctcgttctgtcagcccgtatccgggttagcggggtggccgcatga

SEQ ID NO: 206972 - DNA, 1134 bp, Klebsiella oxytoca; identical to SEQ ID NO: 206966

SEQ ID NO: 206973 - DNA, 525 bp, Klebsiella oxytoca; identical to SEQ ID NO: 206965

SEQ ID NO: 206974 - DNA, 330 bp, Klebsiella oxytoca
atgacgtcaacacctgagtttttgaacaaactggactacagacagcttcagttctgccgtgatgagtgcgaggccagaatcagggccatagaggaagaagagaaaaaggtagcctgggcggttactgatggccaaattaattatggttggtatcgaacagaggactacctgaaagctgtcgagtgtttagcacgtgaagcagaagagcgctggaaagaagaagataaaagcaaccctgagccgcgcaattggttgaatttttctatcaggggccagcgcctgccggtgtctgagtatgaagcgttatttgccgatggccagtgggggtga

SEQ ID NO: 206975 - DNA, 249 bp, Klebsiella oxytoca
atgggaaaacaacgggaatgccttgtcctcgtggagggatatgacccttatgtggtcaaggtcagccacgacgcgacaagctatagcgattataaaactggccgggaacttccattcacgataattcggatgaacgggttctcagatagtgagggcgtttattgctgcattgccagcgataagagcatggaagacagtacagacgaagccagggcgcttctaaaagcctacaaggtagaccccctatga

SEQ ID NO: 206976 - DNA, 3975 bp, Klebsiella oxytoca
atgaccttacaagaattctatgcggctcgcttcggtagcgatccgtattcattgcttgaagcggcgcgggatgagctgtcagagctggccacaatggctggcattaactggacagcatgcgctgataacattcagttgaacccgcgcggcggggaagaacgttattcaaaatataacggtggcgcccccgaggctctggaaaagagcctcaaagggcgtgtggaaatctactcccgcaaggaacaacacaaaagcggcatcagctacccattcgtcaactttgtccagaaagggcatgacgaaggttcctggagcggcttctccttcctgttcgccgaataccgccgtgaacaacaaagaaatcatgcgaccgtggtcgcacaacctgctgaagaacttgcgcgtattgaacgccaggcagaagcccgcaagcgccgcgccgaacagcaacggataaatgagcttaaaaacaatcagttagagcaagaacggttactcggctggttggcgttctacagtgcatgggaacatgcgccagctgaggacgggtcgtggccttacgcagtgaaaaaaggcattcgtgacgtattcagcgcttgcgatattcgtcgcgtgaccagtcacgacaacgcaaaatggagccttggaccgactacatacatggcgattccgctggcccacctggacggacgcaaagacggacgcattgtcggctggcagcgtatcgaccagcgcggcggtaaattccagaccagcgcgatcaccagcggtgatttcgtcggggcatgttttgttattggcgacctgaaaggcgcgcaaaatgttgctgtagtggaaggtttcgccaccggcgcatcggtatggctggctacccggaaagacctgaaaaaacgttttgatgccgtcgtggtcgccgttgctgcaaacaacatgatccacgttgtcgagcagttggtgaacatgtacccggcggcaaaaattacctgcgccctggataacgaccgcaaatcatctgcagaaggcaaaggtaatacaggccttcgtacagggtacgaaatcatggagaagttttccggtgtcaaatgtgtatacccagcgtttgaggatgacccggatctggaatgcagcgattttaacgatctacacagcctgagagggctgaaagaagtagctcgccagttaaagaaaaatcacctgagccgcgcaactgacctcctgtcgctcacgctgaataaactgcggaccatcccgcgtcagaacaggcgtacatttgccaaagagctgcttcgtgccgtcgatattggcatgttgacatgcccggtaccaaacagcccgaaagaacttatgcgcctgttcggcgccacgctgcgagagatgggtatcgcagaaatctataacagcaccgttaaagatcacattacgcgtcggctgaatcgcaagtgccgcgccgcgcagacttctcgctcgttcagtgaacgcataaccaacccaaacctgcgcccgtcacatatcacgtacaaacggtttgaaactagcagaatgaccgatgaggtgatgacgtacgccgcacagctgcagggcatcgttattgtcagagctggcatggggtctggtaaatcaacaggccttctgcgtccgctgatgctacaggctacacggggcgtttctgtggcgcaccgtgtctctctcattggtggtctccatgaaatgatgacagagggactaggagcgaaagccgacattttgcattaccaggaccctggctatcaggaaatggcgccatatgccaacaagctgaccatctgcattaattccataaccaaaggttgctggcaaccgatgatgcgccagcatgactttttcggcttcgatgaagcaacacaggggctacgtgcaatcctggctggtcgagcaatggaaaacccggtgggcgtattcaacacgctaattgacgcgctggcgcgtactgaagaccatgcccttatggtagatgccgacgccaacgatttgctggttgacctggctgaactggctatgaagcgacgcgaggagctgggcctacctgcctggctgcaaattcacgtgattgaactcccggtcgacgttcgcaaccgcgaaaccaacaagcctatccgcgtattttataccgagaaaaatcggatcatgaccgaggtcatcgctgcagtgcaacgcggcgaacgaatcatgctggccaccgacagttcgacgttcgccgaagacgttaccatgcagctgagactccatttccctgacaaaaagtttctctgcgttaaccagaaaaacaaacaggagaaggaagtcgacgatttcaccaaccagcctaaagtgatggtgaaaaaatatgacggcctcatctacagcccgtcgatatcttcaggtgtatcgattgaggagaaacacttccaccgccatttcggcatgttctgcggcgaagtggtccccagcgacgccatccagatgctgcgccgcgaccgtacagctcaggaatacatcatcggtttcgacaagcttcgcggtaaacgtgaaaccgatccggaaaaaatcaaacgcgcctacgcgcaggccttgctcgaaacggctggccactccgggctgctgacagacgttgtctttgacggtgaccgaatttcactcggtgtggctaactcttcattcatgcagctcaaaattaaagccgccgcgctcgaggcgtcggccagaaatgattatgccagcaacatgatttgcatcatgcatgatgatggctatcaggtcgcgcctatggctaccgacgcgcttgcaaacagcatcggtaaggatttacgtaaagaagcccgtgagctggtctttgagcagcttatggaacgccacctgagtgtcgatacccctgaccaaggcgaacacgatgagttgataaaaaaacgcaccctgtctctggatgagcaggcccagctggtccgctgggacatcgaaaaggagctgcagctggatgtcgacgaggaggcgttaaaattctatttcgacggcggcctgaaaaaagtgcgtctgtttgaaaccatgcagctggatgagataaccgcgcgtcgccttgaccgcgaggaagcgttgatccactttacctacgcttaccgcgtcgccggtcgctggcagcaatttgtcacaacagccatgacacgagaacaggccgacgaagagttccaggctaaattcccggccataaccgattaccgcgtcaaatctaccccagcggttgaaataggcatgcgtggtttttacaccctcaaatcagcaacgctgcggcagtatttccgtgactgtggtattgatccagaaactctggccggtgaggccgatatggacgccctcaaacgcgccagggataacctgcttaccccggaacggcgcgatctgctgaacaacgttttgcgtataggtggcttcaacacagagaggggcaaaaagaaagcacctgaagaactatgcaaaggcatcctggagtctatgggattatccagtaagaccagacgcgccagagatggcgatgcacgacctacaatgcgttctatcgactcacagtcggtcgagttcctcatgaatatcgtggagaagcgccgcgaagcagggttatcaattcacgcccgcaaggtcgaaaaaaccaccatcgaggtggatcgcgatctggatctaaatatagatatacatggtaaccctcgatccaaaacaagccacattcaggacgccccgcaatcagtaattattcaggcactggaggctatcccggtgacggtgccggaggcctgggcggagaacgcgctgccagcaacagagatggcggcagtacgcttgtggccagtggccagcatcgcgagaacgttcgcgtcgttgtacatgaccgaatttatggacctgctatcagtacgcgaaatgaggctgctgaaagcttttctgagccagcggcaagccgtggcgatataa

SEQ ID NO: 206977 - DNA, 609 bp, Klebsiella oxytoca
atgattgatcgtatgaaaacacgaggcgaacgactgaaagcacgccgtttagaactgggaatgacactgcagcaagttgctaaaagtgtggatatctctcttcctggcgtccaaaacttagaacgtggtgacgttatgccgtcactgaagattgggcttgccctggctaaatgcctacgcaaacctgtgcaatggatactttttggtactgaatctgatcctgaccgcgttcctgttattggcacaacagagagtggtccggatagcgactggcagccaggagaacctgccaacacagaacgattcctgccatttgttagccagcgggaaaccgtttatgcgctcactgtcgggaaccaggttcagcacaactatcaaccgggtgacgtcgtcctggttgactcagctctcacgccagttccgggtgaggatgtgttagtttgtgataaagacgggaaaatctcgatacagcggttagcgcgcttcgacgatgagcgctactacttagatggcgctaactctcaacgagttatccatgagaaaagtgatcttcaatttgtgcaccaaatagtcggtacgatcaaatcgttcatgatagagggtagatga

SEQ ID NO: 206978 - DNA, 738 bp, Klebsiella oxytoca
atggaacttgaacgaatccgcgcttgtgtggccacggccctttcagatctgcattacctccagcgaggaattttagaagttcagcttgagcagttacgtcttgccaactccggcaggtttactgataagccaacccgggtcattcaaatgggcgagaataataaatacgagatctcggtcgcggctgagcaggttcgttaccatgttgggaaaacgtttaagcaatcctcaatgctgctgactgaacttgattttcagacggctagttggcgcagagccattgagcagttaaatcgtgaggaaattgcctggctgcattattgctatggctgtaagcccaattttgaaaatgatgaagttatatgccagtggctatggctggattttcttgtcgctcattcaaagcctgatttcaaaaaaatgaaagaggcgacaaagaaaaagatgcgcaatttaacgtattacgccatccagcaggttaaggcttcaatattacgcggagaggatgtggacccgctgcgtgaggatgagcatataagtcttttgcttaatatcaccgtcgatagctggcgtaaggattataaaaaacgctggctattaatgaaatcacgatgcctgcatctgaatagcatcgcgttatttaacgcagcggagaagcgcagtgaaatcatcaaccgccattgtacaggaagtgccaacgtgcctgtgccagcagattatgcacaggaagcccggtaa

SEQ ID NO: 206979 - DNA, 609 bp, Klebsiella oxytoca; identical to SEQ ID NO: 199849

SEQ ID NO: 206980 - DNA, 135 bp, Klebsiella oxytoca; identical to SEQ ID NO: 199869

SEQ ID NO: 206981 - DNA, 477 bp, Klebsiella oxytoca
atgacagatatcacccgactgattaacagcattaagcgccgcacgtcctcagcaagagagcttggctacgatgtcctgttcgtggcacttgatgatttggatgtcctggctgattcgctggagacggcgctgcgcgcaaacgccgcccaggccgctcacatcgagcagctgcaggacaagtttaacaaacttgcagcggagaatgtggcgctgaaaagagttccggaaacagacagcgtggcgatgctgatggctctggattcgttccgcagcgagtcattgccggatgtcggtttgcaaaaagcgtttgaaaacttgatgtaccaccgaaagacccctaccaccgttcgtatcgtagccgggattaaggctgatggagtggaagaatgggtttccagcagaggtggccgctggaatggcacgacagaagaggcgcttaagttcgccaagcagctgcgcgaaggagggaaagtatga

SEQ ID NO: 206982 - DNA, 246 bp, Klebsiella oxytoca; identical to SEQ ID NO: 180600

SEQ ID NO: 206983 - DNA, 366 bp, Klebsiella oxytoca; identical to SEQ ID NO: 199846

SEQ ID NO: 206984 - DNA, 228 bp, Klebsiella oxytoca; identical to SEQ ID NO: 200097

SEQ ID NO: 206985 - DNA, 204 bp, Klebsiella oxytoca
atggaagatacggtcctctcaaattgtgaaaggctggacgctgagctgagtgatatcgatgccgtattagatatggtatcggtggcgatggcatccccggaggccagtttgcatgtggctcaaactatgcgcctcatttgtatgtcacgtcggatgttgcagcggtgccgggatctcaacaaggttgaaggaagaagccactag

SEQ ID NO: 206986 - DNA, 288 bp, Klebsiella oxytoca
atgaaagtaaaaggcatcccatttaaccaggtcaaagaaagtctgctcaacaccccggaggcaatccggggttaccaggaagcagataaagagctggcactggtcgaaatgctgtacgagatgcgtgaaaaggctgggttaagcaaatctgccctggcggagcggatggggatcacgccatctgctattagccgcctcgaggggaacccgttgggggccagcatgaggacactgagcaaatacgcacaagcgtgcggcgctgaaattaacatccaggccgtatactga

SEQ ID NO: 206987 - DNA, 309 bp, Klebsiella oxytoca; identical to SEQ ID NO: 200100

SEQ ID NO: 206988 - DNA, 222 bp, Klebsiella oxytoca
gtgaactatcaaggcaacgaaaaaatgagacaggacgcggctgagatttctaacgagctgtatgaactctggcaaaaagtgaagcgtttccagcgtgagtacagcttcaacagcgagaacattacagacagactggcgggccgactgattggaacaatggaacccaagctggccgaccttaacagctttatggccgatgtcgattaccagtttgaagattaa

SEQ ID NO: 206989 - DNA, 231 bp, Klebsiella oxytoca
atgatgaacgtgaaacagatccgcgagaatatgaccgaagcggccttgagcgttgagagtgtaatgcggggacacccccgcatcaccctgcaggaattaagcaccgcctgcagcattagcctgccagcggtggagtttattatcgagcagatgctttgtatgagggtggcgcagcggggcgcttttgggcggtactcccttaccccggaataccaaaatggtagcttttaa

SEQ ID NO: 206990 - DNA, 1062 bp, Klebsiella oxytoca
atgaaaaacactgtgaaaataaacagtgctgaacttgtgcatgcagattcacttgagtacatcaaaaccctgccggacaacagcttagacgccatcattaccgacccaccgtattaccgcgtaaaggctaatgcctgggataaccaatggcccagcgtaacggattatttggcctggctggatgagtttttcgccgagttctggcgagtgcttaagccagcagggtcgttatatgtgttctgcgggccgaaattatcatcggacaccgagttgttgttacgtgaccgtttcaacgtgctgaaccatatcgtttgggccaaacccaacgggcgctggaatggcgcgcgtaaagaaggtttccgatcttattttccggccagtgagcatattttattcgcagagcattacggcgcggaaggctttgctaaaggccaggctgggtatgcgacaaagtgccaggagttgaaaggccaggtcttcgaaccgcttatcgcttatttccgcgatgctcgccagcgacttggtatttccgctgccgaaatcaacgcggcaaccggcacgaaaatgtgtagccactggtttagcgccagccaatggcaattgcccaatgaacggcagtacctggcgctgcaggcgctgtttaaccgtaaggccgcagagcagggaataacgggattgtcagagccgcatgcggcgctgcaggaggaatacggcactttaacggcgctatattccgaactggttatgcagtattccgaactgcgacagcagtatgagaatttgcggcgccctttccatgtgacaaaagatgttccacacaccaacgtgtggacgtatccaccggttccgtactatccgggcaaacacccatgcgaaaaaccgctgcagatgatgctcgacatcatttcggcttgtacgcgccctggcgatgtgatcgccgacttttttatggggtcgggtgcaacgataaaagccgcgctgcagttaggacgcggagccatcggcgtagagctggaagaggagcgatttttacagacggtctccgagatagaaaaacaataa

SEQ ID NO: 206991 - DNA, 312 bp, Klebsiella oxytoca
atgaacacagctatcgaatatggaaatcctgatctctggctggtcttgctcatgctggccgccggggtggtatcaagcgccctgctttccgaaacccctatcaacccgcgccgcctcatcggagacgttctgagaggcgtaatcgtggccatcatcctctgggcttacggcgctatgggcaacatctcaattttgaacgtaatcactctcgccggtttatcggctgtggcatggccacacaccgtcaacgaaatcaccggctttgcaaaacgaactatcagccgaattttcggcgggagaaaagaacgatga

SEQ ID NO: 206992 - DNA, 492 bp, Klebsiella oxytoca
atgaattatggactggtgagcaagcaagacgcgcgcctgtatgccgaagccgtttgcgatgtgatcgggcatggcaaggcgaatgcagctgttttgctgtgtgtcgaaacggccgcagccgagacattgctcggcgattacaaagacccgacgccgaccagcgccggaaccggattaacccaggttgatctcggtaccttcgaatggctccgcgataagtacaaaaacagccgttatgccccggtactgctgaatcagtttggcatcgacctgagccgaacagtttatgcggaactgaggacctcgccgctgatggcgatgctgttttgccgcctgcgctatctggcggtttcagagtcgattccggcgactcgcgaggcccgcgcagcgtactggaaaaaatattacaacacctcggcaggcaaaggcacgccgcgggattacatcgataaatgccagcgcgctggcgttgatgcgctattcacgcagtga

SEQ ID NO: 206993 - DNA, 477 bp, Klebsiella oxytoca
atgaacagtttaaaacgtatggctaaagcctggttgctgatgaatggtgccttcgtccttctcgtgatggcgacgcaaccagcgatggcaaatgagagccagagtcttggtttggatctggattcaattctgagcgcccttcctgctggctgggccagcggcgtaactgccgtatttatcgtgctgtatgcggtggcgcagctgcgcgctgtactccccccgtcagtgaccaaaaggattcccacggtggtcatgaaaattctcgacctcgttgccgcgaactatgcccacgcccggaacgctgatgcgatcagcaaagttgcgcgggatgccgggaaagccaaaggcccatcagatgttgattatcgtgtgatggtggaaacggccaaaaacaatggagagcttcgtggaagccggattgagagtgctggcgattatcctggagatgatcgcccaggcagtaaaagcccgcaatga

SEQ ID NO: 206994 - DNA, 219 bp, Klebsiella oxytoca
atgcgcgtaataacccagctgattatctgcgtcgctttggccgggtgcgtgaaatcaacgccaatgacaccaatactgaatccggctccgtgcgcagcggaaaagccggtgattgatgtggttcacgtcgatgggcatttcgttatcgctgatgacggtatgggcaaactgaccggctacattgccgcactggaagcgggctgtaccgcaccaaaatag

SEQ ID NO: 206995 - DNA, 276 bp, Klebsiella oxytoca
atgaccgggcgcgagaactttaaccgtgaggcatttaacaaagaagccgaacgactgacccgacacgggcacaccgttttaaacccggcaagcctgcctgatgggctggagcaacgcgaatacatggatatttgttttgccatgctccgttgcgctgatgcgatcctgatgctccccagctggcagacctcctccggtgctacggcggaatatcactatgcctacaaaatggcgcttccggtttataccacggttcactatccgccggtcgcatag

SEQ ID NO: 206996 - DNA, 285 bp, Klebsiella oxytoca; identical to SEQ ID NO: 180585

SEQ ID NO: 206997 - DNA, 432 bp, Klebsiella oxytoca
atgatgtatcaacgcacggatctgacgctctccatgttctatgcatccagcgctgatgcagacgggaacaaagtggctacgttgacgatgcaggtaattgcggcagaggttggcgccgtccagaccagtcaactgctatgcatcaccgatagcgcgaagaaaaaaacgtataccgtgggcgagcaatctatcagtaatggttccgatccgttgctggtcgcgattgagaattactggcgccagagtacggatgtcgtggttaaaggactgatcgccgaggtgaccgatttcatcgcagggaatatcaactcagtgagcacctggatcggccagtttgggatgaaggtattcgagaaccagccattagctgagcggttgccagaaagcgtgctacaggctgatggtagctccactacagcgacagggtcctga

SEQ ID NO: 206998 - DNA, 423 bp, Klebsiella oxytoca; identical to SEQ ID NO: 199877

SEQ ID NO: 206999 - DNA, 1710 bp, Klebsiella oxytoca
atggccgcatatccaaacgtcaatgtggcgaacaaatatgcgcgggatatcatagacgggaaaatagtcgcctgcagagctattcggctggcatgtcagcgccattttgacgatttaaaaaaatcactcgataacaattacccttaccggttcgacagagatttagctgagcgggcctgccggtttgttcagaaattaccgcactctagtggcgatttggcggggcagaaattaaaactggaaccttggcaaagttttattttttgttcgatttttggctgggtcacgaaaaaggataaaaaacgccgatttcgcgaagcgtatatccgggtagccaggaaaaacgggaaatcgttttttgctgccgggattggcacctacatgttttgcgctgatggcgaaaacagcgcagaagtgtattgcggtgcgacaactatggcgcaggcgaaaaaggtcttcaccccagccaggcagatggccagccgcctgccggcacttcgctccagatttgatatttcggtatggaccgacagcctgacacgcccggatggttccgttttcgcacctatggcggggaaacccggcgatggtgacagcccacattgcgcgatcattgacgagtatcacgaacacgatacggatcatatgtacgaggccatgacaatggggatgggcgcccgttcgcagccgttaacgctcattatcacgacatccggctcgtcactggagtccccttgctatgacaaggacaaggaagtcaaagaggttatcgaaggcataacccgtaatgatcgcctgtttggcatgatttacgaactggatgctggcgatgactggaccgacccgaaaaacttaatcaaagctaacccaaatctggacgtttcggttaagtacagcgacctggttgagcttctggaagtagcgaaacaggttcctcgcaaggttaacgccttcaaaaccaaacgcctcaatatttgggtatccggtaaatccgcgttctacaacatggagcagtggaaggctgctgaagaccccgaccttgagctggctgattttgcgaatgacagctgcaacatcggtctcgatctcgccaaaaagctggatatgaacgccgggatacgactatttacgcgggaaattgaaggtaaacggcattattactgcatcaaacctaaattttgggtcccggaagacactatccatacaaccgatccaaaactgctgaaaactgctgacaggtatcagaagttttatgaaatgggcgtgctggaagcgacggatggcgcagaggcagactatcgcgagattctggccagtattatcgatatgcaggacgaaaaccgcattgacgagattgatatcgaccctgcaggcgcaacagcacttcgccaccagttggaggacaacggatttaccgtagtcgatatccggcaggattacaccaatatgtcaccggcgatgaaagagcttgaagcggctctggccggtggtcgattccaccatgatggcaatcccattctgacctggtgtatcagcaacgttatcgggaaatttatacccggtagcgatgatctcgttcgcccgacaaagggagacaatcaaagcaaaatcgatggagctacagcgttatttaacgccatgactcgcgcaatgctgcacgaaagcagcggcggcacatcggtatatgatgaggaagacatagcgtgttaa

SEQ ID NO: 207000 - DNA, 1260 bp, Klebsiella oxytoca; identical to SEQ ID NO: 200116

SEQ ID NO: 207001 - DNA, 921 bp, Klebsiella oxytoca
atgacaacgaaattaattaacctgccgcacctggcagatatggtctttggtgtgccgcattacgtgacgcggcaaacaatggactccgtgaaagcggtgctcatcccccgtattcaggggatcaccgaagatgccgtcattcagatggcgctgaatccgggtaaatcacctgctgctgagcaggtccagcccaccggcggggtggcggtgatccccgttcacggcattcttgttccacgccgggggcagattacggcgatgtgctccgagctgaccagctacgagcggatccgcgggcagttgcaggcggcgttaaacgacccctcaatcagcgaaatcgttctggatattaactccggcggcggcgcagcggtggggtgcaaggagctggccgattacatttatcagtctcgcgacacgaaacccatcacggcgattgtgaactacagcgcgtattccgccgcgtatttcatcgcatcggcctgcagcaaaatcatcgtcagccagaccagtggcgtggggtcgattggtgtgatcatggagcacctcgatacgtcgaagatggaagaaaaaatggggctgacgttcaccaccatttaccggggagataacaaaaataacggcacccaacatgaaccactgagtgaagagtcgctgggtatgttccagggcatgatcgacgaaatgtacgagacgtttacggggtcggtggccgaatatcgcggcctgaatcagcaggccgtcattgatacgcaggcggggctgtattttggccctggcgcggtgtctgccggcctggcggatgaagtctctgacccccaggcggcgatcaatgctatcgcggcaaagtatcagcaaccccgtcaaaaaacctccattcagatgcaggcagccgcgatggacctgcaaaccaaaatgtaa

SEQ ID NO: 207002 - DNA, 1287 bp, Klebsiella oxytoca; identical to SEQ ID NO: 180579

SEQ ID NO: 207003 - DNA, 396 bp, Klebsiella oxytoca; identical to SEQ ID NO: 180578

SEQ ID NO: 207004 - DNA, 318 bp, Klebsiella oxytoca; identical to SEQ ID NO: 180577

SEQ ID NO: 207005 - DNA, 339 bp, Klebsiella oxytoca
atgagcctgaaaccgggtgatatgaactgtcgcattgcaattagctacgttcagtccggtcgtgggccgctgggcgaaccgctaccggaaaagcaggttgaatcgggaaaagcgtgggcaaaacgggagctggtatcggggcgaaaagtccgcacgctggatcagcagcaggtggtggaaacctgcctgttcacggtctatccgggcgtgctggttgatattgactggaaaatcacgacgaaaaatctggtttataccgtccggaatatcgaccgcaaaacagaccggatcattatcacgggggaggctgacgggcggcatgatagagctggcgattaa

SEQ ID NO: 207006 - DNA, 390 bp, Klebsiella oxytoca; identical to SEQ ID NO: 180575

SEQ ID NO: 207007 - DNA, 402 bp, Klebsiella oxytoca; identical to SEQ ID NO: 200123

SEQ ID NO: 207008 - DNA, 462 bp, Klebsiella oxytoca; identical to SEQ ID NO: 180573

SEQ ID NO: 207009 - DNA, 366 bp, Klebsiella oxytoca; identical to SEQ ID NO: 180572

SEQ ID NO: 207010 - DNA, 3357 bp, Klebsiella oxytoca
atggcagacgtcgcatctttagcggtcgggctgcacctgaacgcagccagttttaaatcccagctgctgggagcgtatggcgatgcggagaaccagtcacgacggtttaaccgtaatgcccaggcggacgcgaaaaagacggaggacgcctataagaaggtcggtctgtcgatatccgggatggccagccggctggcggggctggcaggagccggcctttccatcggtacgatcgtcaccacgtccagacaatatggacaggcgttatcagatctgcaggccatcaccggtgcgactgcagctgaaatgaaagcgctggatctggctgcgcaggaaatggggcgcacgacagagtacagcgccagccaggccgccgaagcgttaaagctgatggcgtcggctaaaccggagcttttaaaaacgtccgatggactgcagaaggctacgaacagcgcgcttatcctggcgcaggccgccggcacaacgctgcccgatgcgaccagaacgctggcgctctccttaaaccagtacggggcgagcgcgcaggaagcggatcgttatatcaacgtgctggccgccggcgcgaagtacgggtcgtcggagattgtggatacagcggccgccattaaaaatggtggcgttgcagccgcacaggccggcgttggttttgagcagctgaatgccgcgattcaggtgctggcagagcgtgaaattaaaggcggtgaagccggcacggcgctgcgtaacgtcatcctgaatctggaaaagggcacggacaagagtctcaagccgtccgtggttggtctcagccaggcgctgaccaatctatccgggaaaaatctctccacggcccaggccgtaaaactgtttggcgtggagaacctgaatgcggcgtctatcctggtccagaaccgttcaaggcttgatgagctgaccgcttccctgaccggtaccaaaacggcgcatgagcaggcatccatcagggttaacaacctgaacggcgatttgctgggtctgagcagtgcgtttgaagggatggtcattaagatcggccagagcagtaacgggccactccgcagcgggattcaggttgccacggaggcactgaacagcctggcagacaatttcaacaccgtctccagcgtggcgctttacagtctgatccccgtgctatccacgaaactgaccgcagggctgcgggagaatatcgcggcctggcgggaaagccaggcggcggtaaaagcgcgggcgcaggctgatgcggatattgcccgcaaaacgctggattcgacagctgccatcctgaaacagaacgacgctgagtttggccactaccggcagatggagcggacggctaaacagtacgggatgaatatcagttaccaggatgagtttgcccgcctcatccgacaggaaactgaacaaaccaatctggccagccaggcgaaactgaaactggcggcggcaaaccggcaattgtcgatatcagcccgcgcggcctctgttgcggtgggcctggcaagaggcgccctggcttttgttggtggtccggttggcgcggcgacgctggctggctctgcattactgtatttccatcaacaggcaaaagaagcccggcaatcggccattgatttaaaagatgccgtagtggaaaccagtgaagcgctgatgcgcctctcgcttaaccagttaaatgtgaagcagttcgacctggaggataagtacgaaaaccaggtcgtgcagcgtaaccagctgatgaaagagattcaggatgccgacagtcgtatcgacagcctgaaagggtttgaccccttcggccagctggaaggggtgacaaaaggccaggcgcgtgcacgggcggatctcgaaagcgttaacgagggactccgcaaaactgaggaaaacattaagcgtgtcagtgatgcaaaaacactggctcagctgggtttatcgggaaaaataacctcccttacggacgatctgaaaggagcgttaagcacgccccccaaagagaccggagagggaaatccctggggcggcgatggcggtaccggcacggggaaaggcagtaagtcccaggtcgaccagttcaaaacgctgcggcagcaaattgaagaagcccatgcatccagcctggccagaattaacctgcaggaaaaggacagcaacagggagctgcaggaagcggcgaagaaaaatggcgccagtgatgctgacctgcagcgcgcgctgttaatgaatgcagagaactaccagaaacagcgactggatctggccgcgcagtattcccccgcccgggaaactctgcgaaaagagcaggaagccagccgggacctggctgagcttttcaaagcccgccttcttgatgaaaaagagtaccaggccgcacgaataacgctggccagagataccgcgaaagagctgctgcaggcaaaggctgacgaaatcgcggcgcctaaactggatatcgccggtgaggttgatccactggtagcactccgcaatcagttaacgcagcggcaggctttgctgctgtcgtactatcagagcagcgcgatcagcaaagaacagtacgaaatgctgatgaagaaggcgacgaaggattctgcagattcgcaatatcagacgtcgctggagttatatcgatcacagggcgaattccagagcctggccgtcgggttatttgaaacggcccatgagcgctctagcaacttcctgacgagcatgttgacgcggacgagaagctttaaggagaacatggctgacctgttttcctcgctcacgcagtcggtcataaaaaacctcgttgatatggccgctcaggctcttgttaccagcactatcatgcaaaccatcatgggtgtggtgggagctggagtgagtattgcaggtggtgtttctggagcggctgatgtcggcgcaggaactgcgattcagaatgcgggtaataactttaactttcaaataccgggttatgccaaaggcggtgtcttcgattctccttcattaagtgcctacagcaaccaggtctacgactctccgcagttcttcgctttcgcaaaaggggccggcgtatttggcgaggccgggccggaggccatcatgccgctgacgcgtgccggtgatggttcgctgggtgtacgcgcggtgggtggtggtcagaacgccggcgcgtcggaagggccaaaagtctatatcacgattgaaggcggaaacacctcaacgcaggcaccgtctggttttgagcagtttggccagcagatcggctcgtttgtggagaaaaaatacagggagctgatggcgcaggatatgcgccctggcgggatggtctggaatgcagttaaagggcaacgttga

SEQ ID NO: 207011 - DNA, 339 bp, Klebsiella oxytoca; identical to SEQ ID NO: 180570

SEQ ID NO: 207012 - DNA, 756 bp, Klebsiella oxytoca
atgagccttaacgcgaattatcagaagttagagccaggcgatgaggttcgtctcctggagatcgatggccaggcgtttggcctggacgaggttttgtatttccacggctataacgtcccccatactgcagccgaaatcctcgccgctgacggcgacctggataagctgcctgcgaaaagcatctggtggcaggggcgggagtataaagcctggccatgtgtaatcgaagggatcgagtcatccaccacgggcagcgacgcgcagccaacgctgcgggtagggaacatcgacgggaaaatatccgcgctctgtcttcattacgacgatctggctctggcgcgggttgtcatccacgacacgcaaaaacagtatctcgatgcgaagaactttccggacgggaatgcctcagctgatccgacgcaggagaaacggcgccttttcttcattgacgtaaagcattatgaagacgatgagaaggtggaatttactctctccagcccgtttgccctgcaggggatgatgatccccactcgccagctgcatgcgatttgcacctggtgtatccgcaatcaataccgcagcggtaacgggtgcgactatgccggcacccggtattttgacaggaacaatcagccagttgatgacccgtcgcaggatgtctgcaacggaacgctcacggcctgcaaattacgtcatggtgagaatagtgaactgccgtttggcgggttccccggcacctcattaatcaggagctga

SEQ ID NO: 207013 - DNA, 711 bp, Klebsiella oxytoca
atgcgtcagaaaacgattaaggccatccaggaacatgcggcggcagaatatccgcgcgaggcctgcggcctcgtcgcccagaggggccgagcggagcgttatttcccctgccggaacctggccacagagtcgaaagataattttgtgctggcgccggaggattatgcggaggttgaggaatggggaacgatcaccggtattgttcacagccatcctgatgccaccacccagccgagcgaactggataaagcgcaatgcgacgcgacccttcttccctggcatattatcagctggccagaaggcgatctccgtaccatccacccgcgtggtgagttgccgctcctcgagcgaccattcgtgctgggccactacgattgctggggcctggtgatgagctattttcggcaaacccacggcatcgagctgcacgattaccgcgtcgattatccgtggtgggaaaaggagtatccggacaatttttatcaggactgctggtatgaatgcgggttccgtgagtttgatggtccaccacaaccgggtgatatggtgatcatgcaggtgcaggcggataagtggaaccacgccgggattctgctggaagaaaatatgctcctgcatcatctgtatggccatctcagcaatcgcgtgccgtatggtggatactggatggaaaggacgatgaaaatcgtgcgacatcattcactattttaa

SEQ ID NO: 207014 - DNA, 828 bp, Klebsiella oxytoca; identical to SEQ ID NO: 206964

SEQ ID NO: 207015 - DNA, 594 bp, Klebsiella oxytoca; identical to SEQ ID NO: 206963

SEQ ID NO: 207016 - DNA, 12705 bp, Klebsiella oxytoca
atggcaaataacataattaaagggcgcaagggtggcggctcaaagcagcgtacaccgacggaacagccggatgatttacagtccgttgcaaaagccaaaattctgctcgcattaggtgagggtgaatttgcaggtggtttaaccgggaaagatatttatcttgatggcaccccgcttgaaaatgctgatggttcgcaaaacttcagtggcgtgtcctgggaatttcgccccggcacgcaggctcagacttatattcagggtattcccggtactgaaaatgaaatcagtgtaggaacggaagtttccagcaagacagcctggacccatacctttactaatacccagctttctgccgttcgtgtccgcctgaaatggccgtccctgatgaaacaggaagatgacggcgacgtggtgggcaataccgtcaagtatgcgattgacctgcagaccgacggcggcgcctggcagacggtgctggaaaccgctgtcacgggtaaaaccacctccggttatgagcggagccatcgtattgatctgccccaggccggcagtacctggacgctacgcctgcgtaaaatctctccggatgcaaacagtgtcaaagttggtgacgtgatgacgctgcagagctataccgaagtgattgacgcgaagctgcgttatcccaacaccgcgctgctttatatcgagttcgactccagccagtttaatggctccattccgcaaatttcctgtgagccgcgtgggcgcgtgattcgtgtgccggataactacaatccggaaacccgcgaatataccggcgtctggaccggcgggtttaaatgggcctggacggataacccggcctggatctattacgacattgttatagcagaccgttttggtctcggtaatcgtctgagcagcgccaatatttcgaaatggacgttgtaccagattgcacagtactgcgatcagctggttcctgacgggcgcggtggtgacggcatggagccgcgctatacctgtaacgtctatgtccaggaacgcaacgatgcttacaccgtgctgcgagactttgccgccattttccggggcatgacctgctggaacggtgagcagattgttgtgcaggctgatatgccgcgtgatgtcgattttacctatacgcgcgccaatattatcggcaaaccccgttattcgagcagcagcagccaggttcggtacaccaacgccctggtttcctggtctgatccggataatgcttatgctgatgcaatggagccggcatttatcccggaactggtttcccgctacagttttaaccagctcgaaatgacggcgattggctgtacgcgccagagcgaagcccaccgtaaggggctgtggggcatactgaccaacaataaggaccgcatggtcgaaattgatgtcgggctggacggtcgcattcctcaacccggttatatcattgccctggcggatgagttgctggccggacgggtcaacggcgggcgaatcagcgcggtgaatggccgggtgattacgctggatcgtgatgtggatgccaaacctggcgaccgcctccagctaaacctgccatccgggatctcacagagccggactattcaggctgttaacggacgccggcagattacggtcacaacggcgtacagtgagacaccagaacgggaatgcgtctgggccattgaatccgatgacctcttcctgcagcagtaccgggttacaggggttaaagagaacagcgatgccaccctcacgatcaccggcgtggcacatgacccggataaattcgcccgcatcgataccggcgcgattatcgatcagcgcccggttagcgtattgccggcgggcaaccagtcacctcctgacgatattgtcatcacatcccgctcggtcgtgaatcaggggatcagcgtcgaaacgatgcaggtcaactggtcagcggtcagcggtgctattgcctacgaggcgcagtggcgccgtaacgacgggaactggattaatgtaccgcgcagctcgaccacctcgtttgaggtcagcggcatttatgccggtcgttacctggttcgcgtccgcgcgatcaatgcggcggagatttcgagcgggtgggcgtattccgaagagaaaaccctgaccggcaaggtcggcgagccgctggcaccgctggcactggcaacccgttcgctggttcatggggtccaggttagctgggagttcccgaccggctccggggatacgctgcgcacggaactgcagtacagcaaaaatcaggacggcagtgcgccgatgccgttatcagacgtggcctatccggggaaaagctatcagcagatgggcctcagtatgggcgcagaattctggtatcgggcgcgccttgtggatcgtcttggcaatgaaagcccatggaccggctgggtccaggggatggccagcgataactttgatgactactacgaaaacctgaccgatgcgatcaaggatacggctgcctgggaggaatcgcagcgtaccattagcgaaacgcaggaaggtatccgcaatacgcagcaggaactggagcagaccgctgaagctctgcgtaaggaagccgaagaccaggcgaagcaggtcagccaggatattgatgcatcggcgaaaagcatcactgctgatgttgacgggaagatctccgctgtaaataaaaccatcacggatgagatcacctcggtcaatgaggctctcgattctggtctggctcaggcaaacaaaggcgttcaggaggcaaaatccgccgtcgcagatgcgaacaagcagatcgcaactgtgaacaagtcgctgaccgacagcatcacccaggtcagacagtcagtcacggatacggctgcggaaatcaacgccaccatcgacctggagattgccagggtcagcaaaacgctggccgacggcgatgccgcattgaatgcacagataaagactgccgaaaatggcctgaagcagtcgctgtctcaggtcaacaccacgctgaccagtgcggtgaagcaggagaccgcggatcgtatcgccgatgttaacgcgaaggcggcacaggccgctgatgaactgctggcggcaacgcaggggattgaggcgagtatcgagagcctgactcaggtgatgaagactgccgatgagaatctggcgcgggaaatgtccagtctcgctgccggcgctaatatccagttcgattcgcaggttatctggcatttcaacagtcagacgaccgagggctggaccggcagcgccggcgtaccgggtgtgtcccaggatggctggttacgcccggcggacagtgccaccgatccgtacattacctctcctggcggactggctgtcgatggtgcggcgtaccgcttcatcatgctgcgctttcgtaaaaccggcaaaccagtctgggcgggtgagatccgctgggtgtctgccggcgaaaacttcaataacacgaagcgatacattgttgctgagccggaatatgccgatggggtggcaaccctgacggtgcgtgatattccgtggacagggaacattgatcgtattcgcctggacctgacgaaccagcaagacgccagcaactttatcgaattcgactggatcgccgttggccggccagcacccggcgccagtacggcggctctgcaggatgtgcgcagtacgctgagtaacgcgctgaccgccgaagcgcaggcacgcagcacgctggcggcgcagatgcgtggctcctatgagggcagcgatctggagaaagtcacctctgggctgctgtaccaggaaaaaacggcgcgcgttaccgccatctcagcggaagttaaggccagagagtccctgcagacgcagtttaacgacaacaaagctgctgtttctggtgaactgagttctctgacgacagagcagagtgcgcaggcgagtcgtatcggaggcctggaaaccagcctcgggaaaaaagccgatgcgaccgcgctgacgtccctgacgcagaaagttgagcaacagggtgccacgctgacatcgcagggagccgcgttaacatcactcactaaccgggtgggccagacggaaacgggcctggctggtacgaatgaggcgttgagcgggctggagtctactgttacccagcagggcgacaggataaccagccagggtcagtccatcacgaaactgacgagcgatttgggcacgacaaatgccgcgctggagaagaaagcggaggcgagcgcggtcaccgcgttaacacagcaggtagagcaaaacggccaggatattcgcagcaatactaacaacctcaccagtctgtcgaatcggctggtcaatggcctgcggaatagttggtctcgtcggatctatcctattcagctggctagtggcgtggcacttccgtcctttagtgatattcgcgctgtggcacctacgaccgtggatgaggtggccgatacgaccaaactggacttcacgttcgccggtagctatctggtcgcgctgtattcctgccaggtgaaagtggccgccaacacaaccgtcacaatggggccgggtagcagggtgtttgatgataccggcgttgtatttgtgaatggggttcaggtcgcttggggtaacgcaagcacgagtaccgttagttttgaactgaaagcaggctggaataccgttgagtttctggtgaaccagtggaccggacaggcgtatatcaacctgggcctgaagctgtcagacaaggttgctgagatgtactccggtctcggtgtttccgcgctggcaaacgcagccggcgtactcagctcgaatgtcagccagattggcaacgatgtagtcagcaattcgcaaagtatcacccaactccggaatgcgctgacgcagacagacgcgaacgtggccagcaaagcggatcagacggcgatgaactcgctaaccggacgagtggagaagacggaatccgggctgacggctgctaacgccaacattacctcgctgaaatccgctgtacgggccggaaacgcatcaggcggagatttaattcccaacccgacatttgacccggcttacgaccagatggggtttagcgtcgtatccacgacggctgaggaggtccctcctggctgcccgtatggttatgcggccagaattgccagtcgggatcaccatcctgagtttgccgcgttcccggccacgcttaacgatgtgattgagatcagcgcactggttgcctgcggcgctggcacggcgaattttaatctgtatgttggcaccgccgttcggccagatacgagcaccggtgcgccactcatggcggggggcggaaaatcaccttctgcgacctggcagagaaccacctggcgcttcaaggtcacgcaggcgatggtagacaggggttatatccgcccgttcctgcagatctcgcagaacagcccgtatggcaccgtatggttcgttacggactggcatatgcgaaatgtgacagcggcgcaaaaggttcaggatactgcggatgccacggcggcggcggttgactcgctgaccaccaccgtgacgcaacagggtaatctgctgacctcgaccggcaaccggacaacccagctggaaaacgggctggccaccaccaatgccgcagtggccaaaaaggctgatgcgacagcggtgcaggatttgaccaataccgtcacacagctgggcaacgatctgactgctgcgaacagcgccatcacgaaactgaccggaaatctggcgaataccgataaagcgctggcgcagaaagccgatgcgactgcgctggccacgctcgacacgaaagtgacgcagcagggtaaaacgctggagagccagagcaattcgctgacgaatctgtcgaacagtctctcgcaagttgcggcagatatcgatgccagcggtcagataccgggtaacctggtcgtgaatccctcatttgaacgcgggctggatggttataccgggcggtcaaccgcgaccagtgtggtggaggtttccgctcctcacagcgggacgcgggcgctgaaggttgatccggggagcgtgtctccggggcaatacatcccgtttgttcaggggcgaacctatgaaatcggggtgtgggtcaaggaacccggagcgacgacggataatggcgcggggaacaacaagttgcggatcggtaactctgccggccagccggtctttgagcgtccgtacaacagcggcacggtggggacaaactggaccctggtttccggtcgctggaaagcgacggagacagccagcctgccggtgacgctgagcaactatctgattagcggcagccgctacttcgatgatttttacgtcactgacgttaccgaccgggtggacatcgatgccaccgccggcgccgttaccggactgacgagccgggtcagcacagcggaaggggccatcacctcacaaagccagcagctgacgaacctgcagaacagcctgaacacgaccaacagcaatgtgtcgaagaaggccgatgccacggcactgacttcggtcgataaccgggtgacagaggcggaagggaaactgaccacacagagccagcagctgacaaatctggcgaatgtgctgacggccacccgcaacgccggcgacaacctgatcccgaactttgattttctgcagggcagcactgcctgggatattcagtatccagccggtgtgacctttggcgatttcggggacgggaaagcgggggtccggctgaaccggacgaccactatcagcccaggaattttctccaacaacaacaagccggtgccgctgaatggccagcgcaagtaccgggtggtggtgaaggccaaaggtgtttccggagcgatgagtctgctgatccgtcgccagaacaaaattggccagacggatagcacgtatgaggataaaacggtcacgctgaccactgactggcaaaccatcacctgggaaaccggattgacggctgccggcgcggacgggcagaacttcaaactttattctcatccgacaaacggtgaaatctggctcgattccgtccgggtttttgatatcaccgatgaaaccaacatcaaggcgaccagcgatgctgtttcgtctctgaccgggacggtgacgaaccaggggaacaccctgacatcacaggggcaatccatcacggcgctgaataacgcgctggaaggggtcaaaggcgatgtggcgaagaaggctgatgcgtcggcggtcagttcactgaccaaccgggttacccagactgaaaaggatatccgtagccaggccgacagcctgaccagcctgaatacatcgctgaagcagcaggcgacacggggagccaacgtactgccggacggcagttttgaatcctatgccgtcggcgatgttctcagtaatgcccgcgccgttatcaccagtgaagctgctcacagcgggaccaaaagcctgcgtgttacgcgcagtacggagtacaacccgaacgcgacggataataacgatacccatatcttttcaggcatgcaggttcgcgataacgcggtctattacgtggaggcgtgggttaagttgccggctggctcgaccgccgatccgaccgtttatatggtactcggattttccttccaggattcagccaatggctggtcgtggcctggcctgaacgtgaaagtctccgagttgtcggtggacaactggacaaaagtcagtggctatctgaccaacaaccgaaccgcactgaaacaggcaatggtgaggatctccatcccgaatacaccaaaagttcgcctgggtgacgccttcctgattgatgatctgatcatcactgacgtgaccgatgcgaaagcggcgctcgatgccgccgatgcgaatgcgcaggcgctttccagtctgtccgcgtcagtcacgcagaacgggaagaatattacgtctcagggcagcgcgatcacgaagctgcagtcggatgtgacgcaacttggtaaggatatcagcggcaaggccgatgccagcgcgctgacgaatctgacgacccgcgtgacggctaccgaaggcagcctgaaatcgcagggagacagcctgaccagcctgcagaacagcctgaacacgactaacagcaatgtggcgaagaaggctgatgcaacggcgctgcagagcctgcagaacaccgttgaacagcatggcagggatctgaccgcgcaaagcagcgcgctgacgaacctggaaaacaacttttcctccctggccgttggcgggaccaaccttatccgcaatgcggacacactggagggatggagcagccgccacgccacagagacgtatctgggcgaccgcgtggcctacacccggctggcgaaaggtgcatccggttatatccagctggatgaacagacgctggatgttaccgggcgtacggaatttgtattcagtttctatgcgaaaggggcttatgacgggcaggagatggcgagttatttctataacccgtcgaacaccaccaccacggaaaccagccagggcgttaaaggcggggccggtgacggcaaggcggtcacgaaactgaccaccgcatgggcacgttactgggtgaaatgggttattcctgccaccagtggcaccaaacggctgattgccgcgcgtctggaaagcgcgacgtctgccgacaaagaagtctggctctgccgccctcagctggaaaccgggaccgtgatgaccgactgggcaccgagtcctgatgatgcggccagcggtattaccgcgaacacatcggccattaacagcctcaccagtcgggtgacgaatgccgaggggcaactgacctcgcagtctcagagcatcacgaatctgcagaacagcctgaacaccaccaacaacaacgtggcacaaaaggccagcgcgcagtcggtgagtgatctcaccagccgggtcaccagtgcggaaggcaaaatcacctcccaggggcaggctatcacgaagctgcagggcgatttgagcagcaccaccgataaggtcaacaccaaagcggatcagacggcgcttaacgcgctgactggccgggtggagaaaaccgaggcaggcctcacggcagccaacagcaacatcgtcagcctgacggcagcggtgaacgccgggaatgctgccggggatgattacattccaaacccgtcatttgatccggcgtatgaccgcatgggttatgacgtggtggagaccaccgccgatggtgtgccggctgactgcccgttcaggtatgccgtccggctggccgggcgagaccatgtgccaaaaattaacaacatcgccgtgacgccgggcgacgttttcgaaatgtctgctctggtagcgtgtggtaccggcagcgctgactttaatttctacatcggtcgggccaccactgctactggtggtattggggcgagagcgtccgggggaaacaccaggaccaccaccgcgtggaaacgagccacctggcgctttactgtgccggcagacacgaacttcctgcgaccgttcctgcaggttaatcagagcagcccgttcggcactgtctggtacgctgccgactggcatatgcgtaacgtgacggcggcgaacagtgcgcagaaaaccgcagatgcgaccgcaaaagcggtggattcactgaccaccacggttagccagcagggcgatacgctcagcagcatcggcacacggaccacctcgctggagaacagcctccggtcgacaaacgatacggtgagtaaaaaggctgacacgacagcggtgacgcagctgcagggcacggtgacgcagcaggggaatgacatcgcggcagccaacagcgcgctgacaaaactcagcagcgatctggccacgacgaatgcgaacgtgaacaaaaaagcggacgcaagcgcgatgaacaccctgcagaaccaggtcacggagcagggcaaaacactcagtgcgcagggggattctctgacgcaactgagtaacagcctgagccagacggcagcggatattgacgccagcgggaaaatgccgggcaacctcattgtcaacggcagttttgagcgcggcgcggcgggctttaccggctggagcagtaccgcgacggtggccgatttacaggttccgcactcgggtaacaaggcgctgaaaatgtccgccggccagtcgaacctggtcggacaggaaatcagtatcacgcagggccgtacctaccgcatgggggtatgggcgaagcaggacccggggaccacgattaaagatgcgggtaacacgaagtttcgtgtggccgacagcacgggcctgctggtcggctcaaactacggaccgtttagttctggctggcaactggtaacgtttgactggaaagccacgaagaccacgacggccagtttccagctgacaaccttcctcagcgcgggggcaatgtattttgatgatttccatgtcctcgatgttacggatgaaaaggatatcgcggctaatgccggggccatctctcagatgaatacccgcgtcaccgctgcggaaggggctatcaccacccaggcgcagcagctgacgaaactcagcggcgatctggccgtcacgaatgcggcggtcagtcagaaagccgagcaaagcgctgtcaccgggttgaccacccggatgacgtctgccgagggtaaactggattcgcagtcgcagcagctcaccagtctgcagaacagcctgaccacgatgaatactgagctgggtaaaaagactgacacgtccgcggtgagttcactgaccggtcgcgtcagccaggtggaaaacaccatcaccagccagtcgcagagcatcacgtcgctgaccagcaccatcaataccatccgcactcagggagctaatccgtgggttgacggtacgtttgaaagctacagcgatggccaggtgctgggcgggaacggcacagccgttgtggtggcgtctcagaaattcaccggcggtaagagcctgaagttgagatgggatgagaacaacagcggcaacagtgataaacagcttggcacctggcagtcagtccgtgaggacgtgaagttccggtttgagttctgggctatgatgccggcggatcaggcgccctcctccgggtggacgacgctggtcggtatccagtcgcagaatgctgccggtcaaaactcctggcagtcggcggtcactgtcagcgaagccgctcttggtgcgcgtgataagtgggtgaaatttacgggtattgccagtaacaacgggggtgggagaacacgcgcagtggtctggatctctacccgtggcgcctccggcagcggcacccccggttattcgctgtatatcgacgatctggtcatcacggatgttaccgatgcgaaagcggcacaggatgcctctgacgcgacggcgagcgccgtgagcggcctgacggcgcgcgtaacggatgccgaagggaaaatcactgcccaggcgcagcagcagacagcactggcctcgaaagtggataacgccaactcccgcgtcgataacatggcgaagacgctgagcgacagccagagcacacaggccagcctgaatacctcgcttcagtcgcagattgacgcgcaggcggccgccaacatcaaaaaccagacgacgctggacaacacgattaaatcggtggccagtatcaccagtacccagcagacgcatgcaacggcactggaggcgctggcaacgcagcagacgaccctgacatccagtgtcggggatctcagcgcttccgttcagaacaccgccaaaaccgtggcggatgtgaatggtacggtgagttcgctgtggtcgatgaaggttgagacggttaacgggaagaatgttggcgcggggattacgctgggcagcaatggtgaaacgagcgacatgatcctctacgctgaccgcttctcgctgtttaaccgtaataatgcgacggctgttccggtgatggttgccgaaggcaatgagctgtatatcgatacggcacgtatcaaaaacagttccctgacctcaaccaaaatcgcggacggttccatcacgaacgcgaagatcggccacgagatccgctcgaatgactttgttgacgggtcacgcggctggcgtatcgctaaggatggctcttcgcagttcaacaacgtgatcgttcgcggtgcggtttatgcgactgacggctggttccagggtacggtatatgcgaaccacatcgagggcgacatcgggtcatttgcgatcaacatcgctcagcaccgcacgcgcaaggtgccgaaggctacatggcagtggtttgagctggcccggttccggcggcagaatttcgaccaggtgatcaatattcgcggtggactcctccagacggatagcatcactatcgacggcggcgcgaaactcagagcggggatgtcctacgcgccaggggatgacggcggactgaatcctggctatctgtcgtatgcaatgcttcttcgtggcacaggcgctacgtctggtggcggcagtatggagctaggtattgagcttatgtatgaaacaggtggagcaacacgcctgttaacggcgcaagagtcaatgaacgtagacaacatgtcatttgtcgtccctgccggtactggcgacgctgttctgcgatatggctgttacctggaccgtaacggacagatggtattaaccatcctctcaagattcgacgccttcgccgcgcgcaataacaacgtaattcgcggttcatcaacctga

SEQ ID NO: 207017 - DNA, 1500 bp, Klebsiella oxytoca
atggcgatgtatgaagtcggtaccgtcacgggtgccgcgtcgcaggcacgggtgacaggtgcgacaacaaaatggtcacaggaggcgctggggatactgcccgggtcgattctggtggtctaccgcagcggtagtgctgacctgtatgcgatcaaatccgtggacagcgacacgcaactgacgctgacccggaatatcaccaccgcattttccggtgccagttacggcattattaccgctgaaaccgccagcacctcgtcgtttgctaaccagctggccagcgcgtttgcattctggcgtagtgtagtggagggctggtcgatggccctgaccggcagcggcaatatcaccctgacagacccgatcacaggaaagcaggtgatcgtgccggcgatagccgggatggcgaaggcatcggatcttaacgcactggcaaaactcaccggaggaaacaaactcgacggctcgcaggttataaccagcgataatgccggttttattttgggcaggaattcagatctggctctgctcaaaaaacaggggcaaggcgggacaattgccgttggctcgggaacaccgttcagggttcaacgttcaagagcgaccactgtatcaccgtcagacacctatgatgacatcctcgttattggcaccaacaaccagacgacgttgcccggagatttggttgtcggtggtggtttcgataatacggcaaagggcaagctgtattcccaggcgttagagctgtcgatgggcactccgtacatcgactttcattttaactacagcaccgacgacttcaccgggcggattatggccactgccgccgatcaaattagtgtacaaggtagtcattggcgagttgacagggatcttcgtgttggtggtatggcagatattggagggtgggcgcaatgcggagtcgacctttcggccaacagaacagactttggttcccctgctgatggttcgttggtttcaggcggacgtattcgatccagaatgctgggacgcggcggtaacggtgacacctccggggcgtggggcggtttctatgttgaagagtacgtgggaaccgaacacaggattatcatgtatatggacggcttcgggagaaccgacgcatggtcattccgcgcaggtggggtaatttccacgcccaagggcgacgtcatgacgaccggttccgacgtgcgactgaaaaccgacttcacacaagcgcctggaaacgcctcagagcgcattgaacgcttaggggtgtgtgagtaccggatgaatggggaaacgcgccggaggcgtggttttatcgctcagcaggctgaaaaagctgatgatctgtatactttcctcggcatcgagcaggagattgatggcgaaaaatttaaggtgatgaatgtggattacacggcaatcattgctgacctggttacggtggcgcagggtttactggttaaaaatcaggaactggaaaggcgtatatctgtactggaggggatctga

SEQ ID NO: 207018 - DNA, 966 bp, Klebsiella oxytoca
gtgaaacagcgctctattttaaaaaatgcccccaacatcgacagcattatgagcaagacgcaccaggcgcccgcatcacagcctgtgtcaccgatggtgggtgatttgcaacgccagcttagttcattatcgggaaacagtattatgctgcctgtgtgtggacgtaacgttaactttaagctggaaactatcccagcggataaagttgaaatggcgacgatggtttggctcggtaatgaacgtgatcaagacctgctcaacgaaacgtccttggccgatctcgttccgtcattcctcacttcggggcagcagaacccggcgttcgctcgcaaaactgcaggcatcatagaggttgctgatggttctcggcgccgaaaaacagccatcattacaggttgcgattatcgcgtattagtcggtgatctcgatgacgaacaaatgcagtggctctctcaaatcggcaacgattatcgaccaacaagcgcatatgagcgggggaaaaaatatcagcgccgcctgaaagattttgacggcagcgtaaaagctttagctgaagcagaaggggtggaccgcaatatcataacccgctgcatcaacacagctggcctgcctaaagatatcatcgccatttttcaacatcctggtgagctatcagcccgtgcggggcatgacttgttcaagatatatcagggaaacgagaaagctatgctcgatgcggcgcagcagctgctacgcatgaagaagcagggtgaaaagttcgaacctatgcggatcatccaggcattacaggattttattaagaccaatgcaaaagatacacaaaagaccgaaaaagcatatggtgaaggggttgttgcgaaatataacggtaattacgttaccttaaaatttgataaccggaagattccatccagcttaatgaaaaaaattgaggcgttgcttgagtcagagttagaaaaaaaataa

SEQ ID NO: 207019 - DNA, 1164 bp, Klebsiella oxytoca
atgtcgcttattaatttactgcatgaatgtatcagccgcgggcaggagatgacgcaggccattgctatagctcaatttggtgatgatagccccgaggctcgccgtatcactcgtcgctgggggataaccgaggttgctgatttaatcggcgtttcgccgcaagcaattagggatgctgaaaaaaatgggcgactaccaccacctgattttgagttacgcggtcgcgttgaacgtcgcgccggctataccatcgaccagattagccatatgcgcagcattttcggcaatccgaatcaacggcctgcagacaaaaatccagctgtgttagctgttatgtcgcacaaaggcggcgtttataaaacctcatctgcagtgcatgaagctcaatggttagctctgcaaggtcaccgagtgctactcattgaaggtaacgatccgcaagggaccgcctcgatgtatcacggctatgtaccggatttacacatccatgccgaggatactttgctcccgttttaccttggtgagcgtgataatgcggaatacgctataaaaccgacctgctggccaggtctggacattatccccagctgcctggcgctgcaccgtatcgaaacggatctgatgcaataccatgcccaaggaaaactacctcatcctccgcatctgatgctacgggccgctatcgaatccgtatgggataactatgacatcatcgtcattgatagcgctccaaacttagggacaggtacgattaatgttgtttgcgcagccgatattatcgtcgtggctacccctgcagagctatttgattattcatccgttctgcagttcttcaccatgcttctggaccttcttaaaaccgttgatttaggtggttttgagcctgttgtacggctgttactaacgaaatacagtctgaccactggtaatcaatcacgctggatggaagagcaaatcagaaatacatggggatcgatggtcctgcgtcaggttgtccgagtgacggatgaagtaggaaagggccaaataaaaatgcgcacagtatttgaacaggccgcgaaccagcgttcaacgcttaatgcatggcgaaatgcagtctctatttgggagcctgtttgccaagaaattttcgatgacttgattaaacctcgttgggaggactaa

SEQ ID NO: 207020 - DNA, 264 bp, Klebsiella oxytoca
atgaatataaacgctatataccgccatcctgctgaacttgaggccgaggcgatgttatcccgtgaacaatcttaccctgacgatttcacgctggcggaacgcacagcagagcgtatgacccgagttcacaatgggctggctcacgttatgaccgatttattaccactcctcgaagttgagcaagcagtcatcgtgcattgctggctgtataaagtcctggcgattgtcgatatggccagaattgatgcggaggtcagggtatga

SEQ ID NO: 207021 - DNA, 957 bp, Klebsiella oxytoca
atggctgtggcagcaaaagatcaaagtttaaagtctataagagtgggattttatacaagttctgagaacattcgcacgaataacaaagggttaactgcagaagcctttaatgttctgtataccaagtgttcaaaagatctcaagatgactcaccatgctgactttggcgaaagagaacttaaaattcatttccttgccgtatcacccgaagatggctcctacttcggttttatgtcacggagaaggaaaagcgccacattagcatatattactgatactgagtgggttgaagagaagatccctctggcaggagcaaagtctctttccgagcgtacatacttcatctactacccccagatagacattttagtattgtccttaaaccacttaggtcctcgtcatagtgacctagctttcctgcttttcaattccagtactagcggtaccccggtttcttttgaagccatctggaaagaagaaagcattaaagaactacttgaaactggatctaacctaagaagctgtgagatctctatagcaatcccaagaaatttcaatgctgcacagtacaatctcgatggcatgttcgccaatcagatgattgagatgataaaaggtactagttcaagccaccttacgctttcgcttcgcgggcattccccgttaaaacgaaaagccaaaggatggcttgaagatgacgtcaaaaaaagcctaaaggaaatgcttgaaaagtttcctggcggcgatggtcgcttgacatttgagaaagctgatgttgtcgcccaaggcgataaaaagaagaaaagccttgtagatgaagtacttacagtaagaaaaatggttcctattcaaaatgatggatatccgatcgatatcgacgttaaaaatgctatgctacaagcgaaaaatgacaacctcaagtatctaactcagtactatttggttagtcaaccttaa

SEQ ID NO: 207022 - DNA, 1005 bp, Klebsiella oxytoca
atgcgtttttatgagatcaacatatttgaagaaaacaaagtcattaaaaactattcaagtcataagaacggagtttacaaccccggcgctttaatggtggagttcgatatacagcaagtatgcttgtccacgcctgccggtgagagccgattaacaatatgggggataagtcccgccgacatgcaacaggcaagacttaactacaataacaaaaaaattcagattttcgctgggatggctgctggattccctttagcagggaagcatggaaaggggctggtcattgaaggagttgtgaaccaggtgtttggtaactggcaggggacggagttaaggatggattttgtaatatttgccggaccagcaaagactgacaaagatggagcagttagctctgaaaaaatcacatttccctggtctgttggacagaagttatctgtggcactgacccagtgtattatgcggatgggagggtatagaccaaatataaatatcagtgatttactggttctcaattatgagcgtccgatgttttgcgactcaataactcttctggccagagatttaaaaaacttttctcggtcagtaattagagacccaggatactcaggtgttgagatggcaatagtcaatcaaaatgaaatcagggtttgggataatgactataaaaaccatccatctggcgttaatgagcgaaaaaataatcctctccagattgagtttactgacctcatcggccagcctacgtggataacttatggtgttgtaagcattttatgtgtgatgcgggctgacatccacacgggtgatcatattctcatgcctaaaaattcaaggcctcttatccaggcagcttctttttcccagtaccgtgatgattctgctttccagggacagtttgaagttcagtctgttcgctttttggggaacagtcggcaaccgacagctgattcgtggataacaatcattgaggctcatccagccggagagttgaaagcaaaatga

SEQ ID NO: 207023 - DNA, 717 bp, Klebsiella oxytoca
atgagtattgaacaaaagctgaatttcagcagaaatctgaatacttttgcggataaaaaagttgagacggcattacaggtttcagggaagattctgcccgtgagtgttgtaagccagtcaggaaagatggtgacagtctcattcgacttacatgagacaccatttcttctgccacaattaacggtcccgatttttgggcctcaatatatccgataccctatgcagaaaggggataaagggatcgtaattccagcagatacctatctgggaggggttagtgggcttggtgggggagtggcagatcttactccaccagccaatttaagtgcgctgttctttttaccgatcagtaataccgagtggcaggatgtcgacggacaggtggtgacggtatacgggccggatggtgtaacgctgcgtgacagcggaagcaacaccacatttctcctgaagcctgacagtatcgctatttccacacctgacagcttcaccgtaaccgtcggcgggacagttttctcgctgaccggtagcaaatggagcctttcaggagaggcagggcacctgcaggattcagtggccagtaccagcccggcaatcatgcacgccgggtggcaatcgcttctggcgtggcttaacagccatgaacattcaaacggcaacgatggaaatgataccggggggccgacttcaacgtttaacggaagtatcacagaatga

SEQ ID NO: 207024 - DNA, 690 bp, Klebsiella oxytoca
atgtcaggaatcggaagagagccatctgttacaactcgttttgcaaatcagctcaaacgtgcatgcgaaaaaaacaaattaattgacataacatttgaactagctggacaagataacagagctaacgcagatgcaatattcagtgttttagataactttctattgatagaattcaaatcttacaagaaaggaattaagagtgagaaatataaaagcagagtttataatctatgccacaatcttttaataaacgaaagaatgactcattatcatagaagctgccattttattatgtggggcgccagcgagaaccacagattgcaaacaaagtatactatttatcaagatagtgtttgcagaaaaagctttcttgtcgattctaaggtattagataatcctccacttccaactgtattggagggcgtgagcctcgcagacaaaatatccaaatcagaagtggggctgggcctagaggactttcttatttatttaaaatggcttttcagcgacaacaggtctcaaaatgaaacattcggcggacctatatcattaattgcaacgtcatcatccgaatatattgatggtctagaatttgattcttttaatgagtttgaatcttgggccaagccaacagtaacagatttaatagagaaattaagaaacaaacctaaaaatgacttttggggttag

SEQ ID NO: 207025 - DNA, 357 bp, Klebsiella oxytoca
atgagattgaccagccgcaaaaaagaaatattgagctacttcgaaccgaataaccgggaatgggtgacgggcgagatcggtgcgcctccgctcgatgtgtctgatgtggcatacctgctgtatggaacgggcatcaacgataaccggcactggctcgagtccaccaggcgatcgctggaagcaatggtgaaagacgggttactggagagatgccggagccgggaggcaaggagcatcgttataggcagcgagaccactgccacagtaatccgctacggccttccgtgtactgtttcagtagtacgcgacaggggaggtgctaataacgcaatatcaggtgatatgtgtgcggattag

SEQ ID NO: 207026 - DNA, 255 bp, Klebsiella oxytoca
atgaaaaacctgaccaacaatcaagatccggatggggtggaaagcgtgccggcgcaggcgcatcattggctaatactgatgccgccaaacatggtgaacgcagtcgatgggcattcttcccatttgagggaggagaggcgctttctccgctggtgcgaaatcgtgcaagaaatctcatactggctgagtgatacgggctattactggcgactaacccgacgccgggaacagaagaatggcgcgagatggcattga

SEQ ID NO: 207027 - DNA, 663 bp, Klebsiella oxytoca
gtgagaggcagaacgcgcagctataccaccgacctgccctgcataggattaccatttcttgccgacatgcgcaggacactggcagacgctgatccgggtactcagctttatacccagacagaatgcggaacgttgtacatcttccggcaagccgacagctacgccatgacaatcaacggcgtgacgcgagctattcgcaccacgatcacgcaggccggttatggccttcgtgaatggtacgtttgcccccattgtgtgaaacgggtagcgaaattatttattggccggaaggacgtagggtgtcgtaaatgctggagccttcactatgccagccagagtgaagatgagatatctcgcttacggcgcagtgtgttgaagcagaggcatgatttatggggggatgattacccacctgcggacagcctgctaaatagcccgctcaagtttccgaagcctgccggcatgagatgggataccttcgagaaaaagcgctctcgcctgctaaagactgaatcagcttactggcggttgaaagaaccgagggacgctaaagggtttgcccgggtgatgcgcaaagctgaggcgtcaatgcgttcatttgaacgggcatcgaaaaaggctaacaccaggctatcagtagagcatgtcagggcaaaaagctga

SEQ ID NO: 207028 - DNA, 300 bp, Klebsiella oxytoca
atggcttttctagtaattaatttaatattgttcattttatctttctttaataataagttattttttaagttatcactttttattgtttttttatactgctcctttacgtacggacgaggatatgattggataaattattatgattactataactcgattggatatggcagtagtacaatgccattcgagcccggctattattatttgatggttgttttttcagcgatgggtcttccattctcaattttaattttttgtacaactatattttttgtaatagaactgaaaacccgtctttga

SEQ ID NO: 207029 - DNA, 738 bp, Klebsiella oxytoca
atggcagtctgtattataatgttatctattccatattttgaaaggggcgaaaagaaaaaagctgtattatttgttttttttgcaatgttatttcatgtttcagcagttttttgtttcctttatttttcaataatgaaagttggagggcgttttggtaaattaaagtttatctctggtagcttaatttttgttatattggcactgtatgcatggaataatcctggggtgttgtcatttattccttttttatatgacaagatgtcagcctataatcaatcttatggagaagatgctgcttctattataaaaatatttctttccaaagctgcatttatttatatatttgtttttgttctgtgctttctctttcttcgaagcggaggagggagggagatcgatagagcaattaaatcttctttttttatgatacttacaaaattaacatttttcttggcaagatttcagttttatgctgttcctactttgattatagggctagatcactactttgcgaataaggggacgggagggaaggtttcaatatataaaacagcatatttgatagtgatttttttgatatctttagttccttattggtccccgatttatactcgttccttagcttctccgctttatatgacatcatcaaaaagcgatattgaaaaaactatcgggcgaagatgttcagacctatttaactatgataaagaaaataatgccattaggcgttgtttataa

SEQ ID NO: 207030 - DNA, 2160 bp, Klebsiella oxytoca
atgtcatcagttacgaacaaaactacatctaaagatgcagatgaaattgatttaggtcgccttatcggtgaatttatagatcatcgcaagctaattatttctgttacttccctctttactttaatagcattaatatatgctatctttgcaacgccaatttaccaggctgatgcacttattcaggttgagcagaaacaagcgaacgccatactcagcaatctgagtcagatgcttccagatagtcagccacaatccgcgccagaaattgcactgattcagtctcgaatgattttaggaaagacggttgatgatcttaatctacaagcgagagtgaaacaaaaatattttccacttttaggtcgaggttttgcacgccttacaggagatatacctgggactatttcagtttcacatttgtacattccaggaaatattgaagatgaacctaagatattattaaccgttaaagataaaaaaaactttttagtacagcatgatgatttaactattaatggtaaggtcggtgaactcattgatcaaaaaggcatttcatttaaaattgatgagattgatgcgaaacctggcacagagtttactatcggctatgtaagtcgattaaaagcaataactgatcttcaagaagcattaagtgttgttgatcaaggaaaggatacaggaatattaacactttctttgactggagatgaccctgtactagttgaacgcattattaatagcattagcgaaaactatttagctcaaaatattgcacggcaagctgcacaagatgcgaaaagtcttgagtttctaagtaagcagttacctcaagttcgtggtgatttagatcaggccgaagataaattgaatcaataccgtagaaagagcgattcagttgatttatcacttgaggcaaaggctgttcttgatcaaatcgtaaatgttgataatcaactcaatgaattaacttttcgagagtcagaaatatcccaactttataccaaagaacatccgacgtataaagcgttgatggaaaaaagaaagacattacaggatgaaagatctaagcttaataaacgcgtatcggctatgcctgaaacgcagcaggaaatattgcgtttaagtcgcgatgtagaatctggtcgtgctgtatatatgcaattgttgaatcgtcagcaagagttaaatatcgcaaaatctagcgccattggtaatgtgcgtattattgataatgctgtaactcaaccgaaaccagttaagcccaagaaactactcattgttttgatcggaattatattgggcatcgtgatttcagctggtctcgtgttaattagagtttttctgcgtagaggtattgaaacaccggaacaacttgaagatattggtattaatgtttatgcgagtatcccagtcgcagaaacattttccaaaagtgtagtgcagaaaaaagggtggagtaaaaggtctgatgacgaaattcagggctttcttgcagttgataatcctgcggatctggcgattgaggccattcgtggtttacgaactagtcttcattttgccatgatggaagcaagaaacaatgtactgatgatctcaggtgcaagccctaacgcaggtaaaacctttgtaagctcaaacttggcagctgtaatttcccagacaggaaaaaaaatattatttattgatactgatatgcgcaaaggctacacgcataagttgttcaatgaaagtaatactaatggactttctgatatactttcagggaaagttgatattaacaaggccataaaaaaaatctcgtcagcgggttttgactatatttcaagggggatggctccgcctaatcctgctgaattattaatgcatagacgttttggcgagctactcaattgggccagtgaaaactatgacattgttattctcgatacaccaccaattcttgctgtgactgatgctgcagtaattggtaattacgcaggaactactcttttggttgcgagatttgaattaaacactgcaaaagaaattgaagtgagtatcaaaagattcgagcaagcaggtgtgtcagtgaaaggctgtatattgaatggagtaataaaaaaggcaagcagctattatggctatggttatagtcattatggttattcatatagggataagtaa

SEQ ID NO: 207031 - DNA, 435 bp, Klebsiella oxytoca
atgtttgactcgattctcgttgtttgtacaggcaatatttgccgttctccaattggagagcgttttttgcgaaatttactacctggaaaaagaattgattcggcagggactggcgcactcattgaacatgcggctgataatagtgcgattaaggttgctcagctccatgggctttctttggaaggacatcactctaaacagtttacgtcatcgctagggcgccagtatgatttgatattagcaatggaaaaatctcatattgagcggatagggcaaatagcacctgaagctagaggtaaaacattgctatttggtcactggctggaacaacgggatataccagacccgtaccgtaaaagtgacgaagccttcttatcagtttataaacttattgagcaagccggtaaactgtgggcccaaaaattaggtgcataa

SEQ ID NO: 207032 - DNA, 6273 bp, Klebsiella oxytoca
atgtctgacagcttacttgttcgcaccagtagagacggcgatcagtttcattatctctgggccgcacgacgaatcctccggttacttgaacctcaatcaaaccttgtagcactgacaattgaaggcgcttctacaactgagatgggatctcagccagtcattgaggaaggagaagagctgattgatgtcgctgaatactacggcgacaccgagcttgataaggcaacaaccgttcgttatatgcaactaaaacattcaacgttgcatgtaaacacgcccttccctcccagtggattacaaaacaccatcgaaggctttgctaaacgctataaagctcttttgcaaacaattcccttagaaacattacggagtaaacttgaattctggtttgtaacaaatcgaccgatcagcaccaatttctgtgaagccatctatgatgccgcccaccaatatgcccctcgtcatccaaacgatctggaaaaactccagaagtttaccggattaaaagacgaagctctgtcaattttttgcgaactcctgtatgtagagggacggcaagatgacttatggactcagaggaatatcttattaagggaatcatcaggatacctaccagatctggacactgaagcaccgttgaaattaaaggaacttgtcaatagaaaagcactatcagagagcgcatcaaatccttcaatttctaaaatggacgtactccgcgcattaggagttgatgaaacagatctctttcctgccccctgccttatagaaaagatagaaaacgccatatcaaggaaacaagaggcttcgttaattcagcgtattgttgatgcggcaggtacacccgtagtcatacacgcagaagcgggagtagggaaatccgttttttcaactcacatagcagatcatcttcctacaggttcagtcagcatcttatacgattgttttggattgggtcagtataggaatgcttcttcctatcgccatcatcaccgtacagcgttagtacagatagcaaacgagatggcttcatatggtctttgccatcccttgctcccaaatgccagcacagatgtatcaaattacatgcgtgcattcttacaccgtctttcgcaaagtatctcaacactcagagctactgcacctcaggcggtgttatgcattattgttgacgcagcggacaatgcacaaatggcggcagaagagattaatgaaacacgatcttttatcaaagacttgatcagagaaaagctccctgatggagtttgtcttgtttcactttgccgacctcataggcaagcactgcttgagccccatcctgatacgctcatcttatccctacaccctttcgaccatgatgaaaccgcagtacacttgcgtcaaaaattcccacatgccagtgaaagagatgtagatgaatttcatcggttaagctcctgcaacccccgagttcaagccctgtcattgtcacaaaatcttcccttaacagagacgcttaggcttttaggaccaaatcccaaaacagtagaagataccattggtgaagtgctgaaaaaatctattgatcgtttacgcgatactgtaggaataaccgaacgtactcaaatcgatttgatttgttctgcgctagccatactgcgtcctttaattccattatctgtattatctgccatttccggtgttgaaagctccgcgattaaaagttttgcgctcgatctgggtcgtccgttaatcattagcggagaaacgatccagttttttgacgaaccggccgaaacatggtttcaagaacattttcgcccctctaattctaagctgcatcagtttattaccaaactaatgccgttaactaaagacaatgcttacgctgcatcagtattaccagctttaatgttagaggcaaaccagcttccagagctaattacactggcaatgtcttcacaaggtctacctgaaacaagcccagttgaacgcagagatatagaacttcaaagattacagttcgctttaaaagcggccttacgtgcagagaaatatccagatgcagccaaactagcgctgaaagcaggtggtgaatgtgcaggagatagcagacaaagaggtctactcaaggataatatcgacttagctgcaaaatttgtaggtatcaatggtgttcaagaactcgtttcccgcaacgcatttacagatactgagtggctcggatccagaaatacctattatgcagcaattctttcagaatatcctgaactattaggagaagctcgtagccgactccgcatcgcaatagaatggctaaataattggagccaattgcctgaagatgaacgacgtaggcaaaatgtcactgatcaagacagagccgcgatgcttatagcatgtttaaatattcatggagctaaggcggcggcagccaatataagaagatggcgaccgcgtgaactatcttttgaagcaggaaaaattgtttcccgacaattattagttcatgctcgctatgatgagcttgatcagttagctatttcagctggaaatgatatcagcctaattatggcaattgttttggaagcaaagaaactccaccatccggtcgctgaagcagctataaaaaggtgctggcggttactaaagagtccacacatctatataaaaaatagaaatcatgttaatgatcaaacaatagcagcagtaacaagcatggttgaaatggctcttaaactatccatttgtaacaaagctgaaagtttgcaattattgactcgctatttaccagaagttccgccctatgcactcatctcagattatagtgaagaaagaactgattatattcgagcatatgctcttcatgccgccctaaaggactctcaattaacacttacagatctatcatcctctgaggccaaaaaggagataaatgcagagaaacgctatagtgagtcagatgatttccgtaagttaaaacaatacagtgggactttaattccttggtataacttatgggctaaagttgttttaggtaaagttgataagaataatctaaaaaaagacattgagaatgcaagacaagaatcaatcagcatcagggggcattcctattctgagcactctcctgtaactaatgatattgctaatatatggtttgatattcttatcgaaatgggtggtgtttctgatgatgatttagagactattatcgaatggagccagagaaaagaaactcgagtatacactccaacacttcaccgttttagctctgtttgctcacagatctctgggcttgaaaaactatcatataccttcgctgaatatgccttatcactatggaaagatgaacactctgatgcacaggttaaagctgaaggttatatcgacctttcgcgttcactcatctcacttgatgaatcagaagcaaaggaatacttcaatcaggctattgaagtcactaataaactaggcgatgaaaatctgaatcgatgggaagcaatccttgaccttgccgaatatgttgctaacactggtggagctttccctgaaatcgcgtataaactatcccggtgcgcagaggtaactagagagtatgcttatcgagacaaacacttcgcctggaatgacaccgtcgaagttctagctcaattatgcccatcatcggcgttggcaataattagtcgctggagagatcgtacatttggcaaccatagagatatattagcatggacaattgaacaacttgtaaagaaaaataaaatcaatgcttctgacgccctcccctttattgcttttcaagacaactggaatgagtgtgatttgctcgaatcagttctttcttcatgtgctaataatgaagagaaacttcttgcttttgaagtcgtttatcagtacacaaaatttgaatctcaaagtattgagatgttaaaaaggctaagctttcttgcggcatctatcggtattgagcatcctgagttaaaagaaaggatagcggcctatcgagatacagaaaatccatctgtaataacttctcactcaccaaatagcaattcctcaaatgaatgggaacctatttttaaagattgcaacttatcgacctctgacggtatttatgctgcttacgaaaaatttcgctacaaccctgttctatattccatgggaagcttcattaaagaagcaataagccgccttcaaatagggaaagaaagagattttattatgtccctcaaagaaatgtctgattggggactgtatgacttcaaaggcattcttgaatctatccctgatagatgggcttcacgattaagtattaaaactgcattagctgaattaataaaaaaatgttgtcaacgcttctgcatgcgaatcagcaaaaatcgttactacgaagtctttccatttaatcttgcaaagtcgctttctggcatgaatgaagatgacatttcgagtaccatcttgaatgctatcgcagaatcacctgaacccgctgattccaaccgtttatttagccttgttggtcttcttgtcggaaaactaaagcatgatgaagcattaaatgttttatcttatgctttggacttattcaatgacgtattgaaagaagaagatggtgatgggccatgggatgagcagttatcaccgccaacctatgtagaagattcacttgcaggatatatatgggcccgtttagcttctccagattcgacaatacgttggcaagctgctcatgcagtattaactttatgcaggatgaaacgtaaccgcgttttacagggaatatttcaacacgcgacgaataatactacattgcccttctgtgatcgtagcctcccattttacactctccatgcacaattatggttaatgatcgcaactgcacgagcatcaattgattatggaaaagtactactaccctatatagattatttctaccattatgctacaaccactcaaccacacgtattagtccgccttttttctgccagaactctactcgcattgcatgacgcaaggctgatttcgatatcagatgaagaacaaaacaatttccaaaatataaaccagtcgacgtatgatccaacatacaatgaggataaaggtcacataggtgaagattcgtactcgtttggtaccgattttggtccctactggctgaaacctttgggccgttgtttcggtgtatcacaaaaacaattggaaccagaaatgttgcatattattcgcaataatttggggttcaaagggagtcgccgctgggacgaagatgagcgtagtaaaagacgttactatgaatattcagacactagccatagtcatggctcatatccacgagttgatgattaccatttttatctctcatatcatgccatgtttataacggctggaaagctcttagcaacaaggcctttggttgcagatccttacgatgacggtatagacgatgttttccaagattggctgagcaggcatgatatttcacgaaacgacaatcgttggttgtctgaccgaagagatccacaacctcaaaaacgtcccgactggttttacgatacaactaataacttgaacgagtgggtaggttcaatttcagcaaacgtttttgacgaagcattgagccataaaaccaactcattaactgtatggggacattggtcagaaattggttcagaccgcaaagagtcgattgcaatccattctgcactagtatcaccagaaagatctttatctctgcttagagcgctacaaacgactggaaatgtgtatgactataaaattccttgtgctggagagagtctcgaaattaatcaaccttcttatcagttaagaggatggattagagacatcaatgaaaattatggaattgacgaatttgatccctgggcaggtaacgtaaggtttccgatacccgaacctgcgtcgtttattattgaagctatgaaattgaccaccgataaagatcatcggatatggtcttctacaccttgcgccaagacagagatggtttccagtatctggggtcacctatcaggcaaaaatgatgacgaaaaacctcatggttacaagttatgtgcctcaatagacttcattaaatcaatgttaaccatattaaaaatggacctcatcatagaggttgatattgaccgctactcacgaaatgatagatatggacgaagtaatgaaaatgagctcgacaatatcccatccagcactcgcctcttcctcgtcagacatgacggaatcatccaaacgctatacggcaattatagaattggggagaaaactagttga

SEQ ID NO: 207033 - DNA, 726 bp, Klebsiella oxytoca
atgacggaatcatccaaacgctatacggcaattatagaattggggagaaaactagttgatgagctggaactaaatgactctgttgatacattaagcagatggatggcccaccatatcgcagagctcatttatgatgccgaacattgtacagacgacaccatccgtacagctaaacaagcggagattagggacgctatctggtcattctggtctaaccgatacgaattgccaattggtaccagaccatttaaggagctcgaacctattctaagaaccttaaaagatcttgatcctgaaaatgagcaaccgagatttttttcaccttaccgaaatctagttaacgcagaaaacgaaaccagtgaggttcaaaagtggttaaccgctgctaaggatattgattctgtagcaaaaatactgattgattactgtttatctttggcagcagagaatgctatcgataaatcccaagaatgggtggagttagtacagaaagctggattggaggaagatgttgatctacttgaaattcgtatctttcagttacgaggtaatccggccaatacagataatcccaataatgcccaacggaggattctggaaaaaaggcaaaaaaggcttgaagcgtttctctcactgggctcccagttaaacgaacaacttaaatatcagcttgaagccttaccagcaattgtggatgagccaacggatgacgacgaagacttctga

SEQ ID NO: 207034 - DNA, 246 bp, Klebsiella oxytoca
atgtgcatggtgaatgccagattatcagtgtgcgtaaaaatcgttaaatcaggtagttgcgaaggtcgtagaagaagacccgaacacaagatttatcgcgtgttacactcctattatcggcaccatttcaagttcctcaaccgtccgtattattccataaatcatctgatttataacgattttatcacttttcagtccatcatcgtccgcagccatccagtagaatccgataaagaatgtgtatag

SEQ ID NO: 207035 - DNA, 1218 bp, Klebsiella oxytoca
atgaaatacaagccggatcaatacatcatttccgatagttacggagtttattacgtcaggatctcaattcctgtatggctccgtagtgcatttggtggaagaaaaactctcgtccgtagtctgaacacttccgatcttcgtgtggctcgtaggaagcgtgatgttatagccgatgaatttcaccacatcaggcaaattgcagagccgccaaaaccggacagcttgcaggacacgatcagctatctaaagagcgttgctaagtacgcaaaagctgccccgaaagcatcagcgccgattatctaccaatgcccctctctgaataagatgttggagatttacctcacgcataacgctgatcgcctgaaaatgggaacattaagcaagaccagaaaagccgttgaactgttcctgaattacctgcgaaagaaggatgttgaactaaacgatatcaaccgtaccaccgttacaggctggcttgatcatctccgagaaacaaaggcagtccaaacagtggctaactatctttctgcaatggcaaacattctcgatcttgcctcttcccgataccaggacgccccaccgctggaaagtaacgtattcagagggcataaactcaacacagcgcagagccgccagagttacgaggcattcacggacgaagaaattacgaagctcattagcacgtttaacaagttaggggaggacgaattaagggatgtgagcgccatagccgcttatagcggaatgcgcatcaatgaaatagccagtttgaaatctgacaatattcgtgaagttgagggggtgttatgtttcgaggtgttggaaggaaagactcgcaatgcggcgcggttggttccaattcatagtgcgattaaaacaatggtgctggaacgctgccataagccgcacaatggctttttattttaccgtgcaagtgtgaccaagcgagaggatggcaagcgctcctcgtggcacgtaaaccgctttggacggcttaaacgcgatattctcccagggcaggaaaacaaggtgtttcactcgtaccgccatgccgtgatcagtaagctaaatgccgccggagtggatgaatctcgtattgccttgctcgcgggtcactcatttggagaaacggagtctttcaagacgtattcgaagagtgttcctgagcgtattatgaaggagttagcagggtatgttgagctaatcagctacaaatga

SEQ ID NO: 207036 - DNA, 1038 bp, Klebsiella oxytoca
atggcttattcagatttattttctggcaacatgtatgactttgccagcccgtttactttctctactcaactaaaccagattgtaactaatcttggattattcaaaattgagaaccacgatgttaactcaatcgctcttgagaaaatcaccgatgtgaaaaatctcgttgcacctgaaaagatgccctatgcacaaagcgattggaacagtgcagaacgcccagaatttaccaatgccctctatcagcttaaatacactaattccttaaattcagtgacttcacgagatctggagcagtataaagcgcgtggaaccgtagacactgctgatcaaattaccctcgctatttctgatttcagcgatgcgcagtacgcccaggtgagcaacaccgtagaggttgaccttgtagaggcgctgttagggcttcgtgttaattctcaattcgccggacagggcgatcttgatttccttgctggcggtagcaaaaccacatacacgatggacattagcgcagacgctaacgtgttccagcaactaagtgagatcggacgcattcagaatgtgaaacttggatcagggctggcgcaggctaaacaaggagcggtgatcctggcatccggcaaagcagccgtagcgctacgctatcacccgtccgtgaaagacttcatggtgtatacgctccctctggagcagggcgataacttctacacccgcactaaaggtgcaaaccctgctttcgaaacctggacgctaaacggtgtcaccgtgatcgatgtgacaggctactctctgattactgatcgtattggtgttgattcgttcgtgagtattccggtaatggctcctgaatctaacgcttacgttcttcactctggtgttggtgttcgccatgcgacacaaggcaaaggcgcggaactgtatcaccagtatgtgattgtagatcagcgttggggcttcccagaagtggctacagagtgcagctatctcccaatcgtggcgatcccacaagcgatcattttcggtactgtctcagaatag

SEQ ID NO: 207037 - DNA, 378 bp, Klebsiella oxytoca
atgcaatttggaacatttcaaactctgaacgggaataacagccacgcccgttataaagtagtggcttacgcatctgatgcaattatgcaggacaagctgatccgtgtggaatccggtattcctgccgatctcattgttggcgatctcgtaaccgcaacaggtgcaaaagctgccacccctggtgacattgcgtatgttgtcgtagaacctgcaaccgctggcgataaagcgtttattgtagcttctccagagcatactattttagccctggttggcgttgaatttggaagcctggataaatctctggctcaagcgcaattagcaactcttggctttactttcactgattttgacaccgtagctctacgcaccacctaa

SEQ ID NO: 207038 - DNA, 228 bp, Klebsiella oxytoca
atgcttctcatgaattatgaccgtgtgatcactcacaaaggcgcttctcttattctctctgaaaagatgctgaaacaagcggctgatgttctcagcgtagacgttgagactattcgagaggctacagaaaaattctggcctacagccaagatcacaaaatcaaaagaaggttcccacccattaacgggacttgaggaacgattaaaactattagcaaaaggaaaataa

SEQ ID NO: 207039 - DNA, 390 bp, Klebsiella oxytoca
atgggaagaaaagagcgaaatccgattaaacggatagaaaaagcagtaagagcaacaaaacgtaaatacagccataagctaaaagattattcaagagaatctataccaggctcactaaaaacaactattttagaacaccctccctctgtaccttgcggtgatgaatacaacgccttgcaagaaatacttagcactacgcccggcgtattctggaaacctcgaaaaagaaaagaatacataattaacagtagccagcttaaatcctggcaaattctcggatttgaacattacgccgattatgtcgggtatttgggaactaatgccctcagcaatcacactgccgatttagattttttatttaatgacgataaggaaaattataatgactaa

SEQ ID NO: 207040 - DNA, 603 bp, Klebsiella oxytoca
atgaagacaacaaaacacgaaaagctattcctggcgattgactatgatttactcggaatcacttccgtagaagttaacggcgaaactcacgaagtaaaacttcaccacaagatcgtttattcctatctgcaaagcctgtccggtacattccaacaagtaaccccttcattaactggtattggtaaacggctcggacttggtacagatcaaactgtacgccgccacattaaagaccttgtgtcttttggatggctacatgtgaaagagcgtccagggtgtacaagcatcttcaccgttctaccgtatgaccagaagccacctgtaacagtgtctgacgaagtgccagcccctgagccagtgaagacagtagaaacccacgaagacacaccagcgataacgcctcaaagaatccgtacttctgacgcagtgaaacacctgcttgaaaatctctcacaacgacgagaggacgagagcttttattcctggtcatcaagagtgcttcaacgaatcggaatagatcattcaattggaatcgagcaactatttcaggaaacacacccgtatgaatacacccagattgaacaatcaacgataccattttaa

SEQ ID NO: 207041 - DNA, 165 bp, Klebsiella oxytoca; identical to SEQ ID NO: 130997

SEQ ID NO: 207042 - DNA, 462 bp, Klebsiella oxytoca
atgaatcattctcagccacacctcagcaccactcgcacgccacatacaattgaactcaccactgaacagatgtttgacagtctggtgccctatttcaccgaggtaacgcatccacaaaagcgcggaaagcaccccaaagtactgaccattaccaccgatcataaacgagtgtgggcgtatctcagagagtgtgaggacgatacagccggatgtgtgatgttcgatctgagttgtacagcccgtaatctcggcatgactcagaaacgagtgatgaccgtcattggcgatctggataatgctggctggatactctgccgagacattggctcgcccggtgctggaacctatcagatcaccatccaggacattgaaaccatcgtttcactatgtagcaccatcacgtatgcccagccaactatactaacgatggatgtgctgagaggctcacgcttggttcattaa

SEQ ID NO: 207043 - DNA, 627 bp, Klebsiella oxytoca
gtgcccgctggttgttaccttcacccgtttgagagccgttcgccgcaagggcgtaaacgagcacggcccggtgcagatgtccggtacggaggcgacattatttgtcgggttttcggcaaaaaatgtcgccggagagcatcagcggtactggacagccaggcgggttgtgcttgtctcagccccggcgaaaggactcaaaggggtgaaacgccaccaggtaaggaaagagcaggaacccgccgcaacgtcggagaagcggcagcgaaaacggcgttgccccttacagcccggcggccgtttgccggggtgcgaaaagcgcaggtgacggcgcgtaaaagggcggcgcatcctgacaaggatgctgcaagcctgccgttgacgtcagacatcagacaccagccggcaggcccgaaaccgcggcgggttcggcggagcttaccgcgtcctttcgcggttagcggagtgtggctcgacgaccggacgcgcagcggtcgggagccgaaggtgtccccgggtctggccagtcagaaagacacctcagaagagagaaagcagcaggaggagagactcaccctgtcagaaaaccgtatcagggagacaaagaatttaagatcaacaatgcagtga

SEQ ID NO: 207044 - DNA, 885 bp, Klebsiella oxytoca
atgtccgatttcagacagttgaactattttctgactctggctgaatgtcttaactatggcaaggcagcaaaagcgctgaacatttcacagccaccactgagccggcagattgcctcactggaggagaagctcggagtaaagttatttaaccggcatcattacggtgtctcactgactgaagccggaaaaatgttttacacagataccaaggcagtcgtcagcgcgtatgaacttgcctgtcgtaatgtccaaaaaatggctgccggagagaaggggcagctgtcagtcggttttatgatgcacgctgcgtattcaacaataccggagctcacaaggcgcgtagtcactgattttcctgatctacaactaaccttgcaggaagttactcctggtgcactggtaagcgcagttcatgacggtgattatgatgtcggattggtattcaacccaggcccgtctcgttttctagaaagtcttccccttcatcgagaaaaactctgtctggtagtaaatagcaagcatcgtttaggcgtaaagaagtccattagtgcatctgagttgcagagcgagccattgattgctacccctcacgccgttgcccccgtgttgcgtgaaacgattgacctttttctacgtcagcagggcgtcgctccctgttaccgtctggaaacacagctacagcaaaccattgtaagtctggttgccgaagggttgggagtagctcttgttccagaatcggttaaaaaacttaattacgcagggattgaatatcttgaactggaacagagtccaacgatagaacaagtacttatttggcataaagataacagtaatccggcgctggctctctttaaacaactagcaagagcattaactgaatcttga

SEQ ID NO: 207045 - DNA, 144 bp, Klebsiella oxytoca
atgaacataatcgtgcagtttattcttgagctggcgggagtagatttctgtaatatgtactcccgcgtgcagcctgtcacagacccgttcagtgtgttaattctgcagtcatatgcactctgttaccgctgtatgcttcagtga

SEQ ID NO: 207046 - DNA, 1593 bp, Klebsiella oxytoca
atgaatactaaggataaagaattattcaaccaaactcgcttccctccttttgatacgataatcaatgttaatgaatatattagacttcttgatgataaagcaaaatgggatgaagttatttacttcaccgatgacaataataaaaatgcacttatcgctctccaatttgaatcgaatgtagtatctgcaatgcgttttaatctccctttggatgaactaattccaataattcaacgtttatgcaaagtaaagaagcctcttaagttggctattcttcagggaatgtcattagatagttctcatgtaaccagtttaaaatcgattcagcaagttcttcaactatgccaatttcagacaataaaagttactacgaatgagatcaggagattcctgaaatccacgggaacaactaaagcaaagggacgcggcgaaaattttagtaaactaacgaaggatgaagtatggaaagatagtcacggtcgatgcatgtttaccggttgtgggctgcgtctgaatattgatgaattaaccggggaacgtggaaattttagttatctagcacataatgttgcgtcatctgaaaggggggagcgtggggtagctgttctatcagaaaaattatccaatgatcccagcaacgtgcttttactctgtgacaagcaccatcgattgattgataaaattgctggatgcgattatcctgcttctcgcctttccgaaatgcgctcaagacattgtcacacatctgagttgttgttagatggcttaagttatgagccagtagatgtctatgttcttctctggcctgtcaatacgcaggttatttctgctcctggttcaaaagaaatagcagcctcactatcatcaatgcggcttagagctttaggtgcttctaatattattgaaacttgcggagaaagtttttttcttcaacaaggctctgacaggaaacagacaatttctctgattgagaattcagctcagcaaattcgaaatcagacacgtaatcaaaattttaaagctgcattatttgcgtttggccctatgcctgctcttgttggactcggtgctcttttagggaataaaggacaatattttccaatgctccgctacagagatggcggatgctggatgtggccaaaacctgagcccgttgggaaattttactctgttgagggttttgaatcacttactgttcatgatgaaattgttgtttgtataaattttactgccacagttcccaaacttgtaagcaaagcgcaagaactaaaatcctcaaagggttgctgtgttgtcagctacacttcaacagttgattacatgggaaatggcgcaataccccatccagaagatggcatagcattctgtgcacgattacaacaagatttgcacaatttcaaaaacgaatatggggtgaatcgtgtccaccttctgatttgcgcatccaacgctgcttctgtttttgtcggccaagcatatgatttacaccatccagatattcttgtttatgatttttctgaggaagggatggaaccagcattattgattcagaacaattcagttataacaaaagtgtcaccgcccggagtttga

SEQ ID NO: 207047 - DNA, 165 bp, Klebsiella oxytoca
atgcagatgatcaaccctgcgttgatgctcagggtcttgaagcgtaaaactcaatctggaacatcgatccccattctgtggaacggtaacttcgactatatgataatgttccaccccaagatctttattaccaatgaggacaccaaatgcttcgggggccgttga

SEQ ID NO: 207048 - DNA, 1737 bp, Klebsiella oxytoca
atgaattattcagaaattcaaacacatttaacagaaggcggatacaaagtatccgccttcccttacggctcggcgggaaatgattctttcactgtcgagcttgagattaataattttttagttactttgcaccatattgccgttcctgaattaacccaaatgcccagctttcttttaggagatccatcggcattgcctaggctcgcgcatactacaattcatgcagataaacgctacgcgagtatctgtgtaaatgttcctgatgctgtatccgtaaactatgaacgcccagaactggcatttgaggagtcactcacaaggcacatcgcattgctgactaatgctttatcagatagcgaatggaataattctgagctacttagagagtttgaagctggttggttaaacatagttgcccaaaacactgctccatttctctgcttgtctgaaagcaaaataatggaagaattatgtgttttaaagccacgtaaaaatattgtcagaggactaggatcatactatgtgggatatgcagcaggatgtgtaccagacaacattttttcaccgattaatcagctcataacagatcgagaagcaactaagggacgaggatttgttataccccttagcattgcgacaccggcacctaagcagagagaagaccttgccgattggtatctttccctattagctgatttaccgatggctgttcgaaccaaactgacgcaacaattctctcaacaacgctcccatgaattttggctcatttttaatacccctaccccatcaggaatgacatggtttggtatttatttttcactaaaaagtcctgtaaaaggcaggaaacacttaccctttaaagggtctcatttagtggagtgggagctaacgcccttagaagtatcaacttttaaccaagatagacttatgccaagaagtggtgcggagcaatctcttcttcgtaaaaaggtgttacttgtaggatgcggctcagttggtggtgaaattgcagacaaacttgcagcctctggtatcggttatattacgttatgtgaccctgattgtctttcgctgaataatctttatcggcatattcttcctcctgcatatgtttcatctcgaaaatcactagctctttggcacagcctgacaagtaaatacccctggattacgatcgaacattatactgacagattacttgagttaaggcatagggcatttctgtcgcaatttgatattatcatcatagcgataggttcacctacccatgaacgattatttcatgattacttgattaaggaaaaaatttatactccagttattaatacttgggttgaaggatatggtattggtgggcatgcagttctggatattcccgcccaaaaaggctgtttgcggtgtgcatatgtcgacccttccgacttctctcgaggactggcatcaaacctgaacttcctagcacccaatcaggatttgacaaaaaatcatgcaggatgcggtgatgcttttttgccatacacttacatcgcatcaactcagacagcccttattactgcagatcttgctgctaaatatcttcttggtaaagtcaatgattcatcaaaagttagttggaaaggaagtccagttgatgcgagcgagaatgggtttaagctaagtgatagatatcaagcatttaaccgctcattagaaatattacccctgtacaatactgaatgtgatatttgcaatgaataa

SEQ ID NO: 207049 - DNA, 1044 bp, Klebsiella oxytoca
atgagtcttcaaaacaaattcatgaattttcatgatgctatcaagttaggcaggcaggatctagagtacacaacggcacgtctgaaggatgacagcatcactgcggaaatcaaaaaacgcttcaaagaagatggctatccagtcattgaggattttattcagggctcattggcgaccagcacaggtatccgggaaaaaggtcaagattttgatattgatcgtgctatcgtcattgaagccgatttagcgccagaaaatcccattacacctaagttagctgttctggaagtacttgaggatcggggctttaaaaacgctaagataaaaaagccttgtgtcacagctgattacaaagccgatgacctccacgttgacatccccatttatcgtaaatacgaaaacggacagtacgagcttgcggttggtaaaaaacattctgatgagaacaatcgagagtggtcccggtctgccccccacgaactgatcgattgggtaaatagttacgataaaaatggggtatatggttcaaaaaaacatgaccaataccgtcgtcttgtccggtatcttaagcgttggagaaacgtcacatttggcgaggatgttcgacgcaaaatctattcaataggtattgctgttatggtcaaagagtgcttcgtctcttcaatcaatgatgaaggcttcccgaatgacctttctgctctatgttcaaccatcaataacattcttaattatagcaactattttactttggttgatgtggataaatacaaggttaaagttgctctgccggtcagccctttcagagacatttttcatagcagtagcactgcaacgggcacgcaactccgtaacaagtttagctcgttatcaaaaacacttgataaagttgctgatgaagaagatgagtccaaacaatgtgagttgttacgcggtgtatttggtggtgatttccctgagtgtgcttcttcatcatctgcatcgtcggccgctaaaaaaacagtgtatgcgtccgcaggtgcagtagggacatctcaaggcgcatga

SEQ ID NO: 207050 - DNA, 1230 bp, Klebsiella oxytoca
atggcaaaactcgcaaaaaaactcacagatactgaaattaaaagtaccaaaccttcagacaaagaaaccaacttgtttgacggcgatggtctgattctacgaatcgctcccctctcaaatggaggaaggaaaaattggtacttcaggtatgctgtgccagtgaccaaaaagagaactaaagtgtgcttaggaacctatcctcacctcacccttgcaagagctagagctttgcgggatgaatatctctccctgctagccaatggcattgaccctcaggtccatatcaacgataaagcgaatgcattaaagagtgcgactgaacacactctccaagccgtagcaaggaaatggttagatgagaaggtcaagacttcaggtatctcaaaagaccatgcagaagacatctggagaagcctggagagaaatatttttccaggtcttggtaatgttcctatcaatgagatccgacctaaactcttaaaacaacatcttgatccaattgagcaacgagggattctggaaaccttgcggcgagtcatttcccgattaaatgaaattttccgttgggcagctactgaggaacttatcgagttcaatccggctgacaatctggggcaacggttcagtaagcctaaaaaacagaatatgccagcattacccccttccggactcccccgcttcttagtagccctaaactatgcctctatccgtttagaaacacgattattgattgaatggcagcttctcacgtgggttcgtccaggcgaagcagttcgtgcaagatggtctgatatagatatggacaatcatatgtggaacattccagctgagttcatgaaaatgaaaaagcctcataaagttccattaagcaaaggtgctattcgagtactcaatacaatggagtctatcagtgggcaccgcgaatgggtgtttcccagtataaaagccccactcaaacatatgcatgaacagacagctaacgcagcaattatccgtatgggatttgggggtgagcttgtagcacatggaatgcggtctatagcaagaacggctgcagaagaatcaggaaaattcaggaccgaggtgctcgaagcagcacttgcccactcgaagaaagatgaaataattgcagcctacaatcgtgctgaatatctggcagagcgatcggttcttatgcagtggtggagtgattacgctcaggttcagaaatttaaagctattgttgcctaa

SEQ ID NO: 207051 - DNA, 201 bp, Klebsiella oxytoca
atgaaaataaaaaagcccgcttcaaaagcaggcttttcaaatttggctcctctgactgggatcgcctttgccagtaactggctaatatgtaagctaaacctgaatttccgttctgtcaagaccaccagaatgaccaccattaaacgctgtactgtagatcacgtggatgtattgctctgtgaattcacggagctaaattga

SEQ ID NO: 207052 - DNA, 267 bp, Klebsiella oxytoca
atgattagcagaaaagagttattcgctgaaattagcaacgaggcggttactgaagatggcgaagtggttgggtattttgtcaaaaatagccgcatgaatctgcttgaacagatgctatgcagcaccgtcaccgatgaaaaactgcaggaaagtgcatatagggctgggttaactgctggctggaatctggggctggctaataacaacgaagggttcaataaatgcctggccgctcatgccgctggcatcaaggtggaggctgaatga

SEQ ID NO: 207053 - DNA, 237 bp, Klebsiella oxytoca
atgccggagatcagcgccggccatcacagctatatcccctgccttgggacccttacggctaccgcgccgtcgttttttacccttggtattccttcccgccttgagcgggttttttattatcaggtcccgcaggaatcatcatcgacatgcttcgttgttaaatccagcctgacgggcctgacccttttcaaacacacagcttcccgatctttcatcggaggcggtaactatggctaa

SEQ ID NO: 207054 - DNA, 2220 bp, Klebsiella oxytoca
atgaaaaatataaatgtgacagtgaaagaaactggtgctgaatacaccgtcgatggcaatcaagttaatctcaatacgcagtcagtggtcctcctgcacgttaagcgtgaggatattcgttcatatacccgacaaggtaatgatcttgttctgaaactccaaaacggtgacaccgttacaattaaaaactttttcgttgtggatgagcatggacagcacagtgatttggttcttatggatgatgagaccggcgcgctatggtggctagaaggtgcgggtaccgatggggcacactattcgctgattagcgatctttcagaagtcatcgcgaccggtggcgcgggacaaagtattgccggttgggttatggctggcgcggctttgctgggtattgcggcaatgttcgccggcacctcaaacaaagaccaccactcttcggtttctgaaagcgattctgatgctgatagtgattcagactccgacagtgatacggatgctgacagcgatagcgactctgattcagacagtgattctgattcagatagtgattccgattctgacagtgattcggattcagacagcgattccgactccgacagcgactcggattcagacagcgattctgactctgacagtgactctgactccgacagcgactcggattcagacagcgattcggactccgacagtgactcggattcggacagcgactcggactctgacagcgactcggattcggacagcgactcggattcggacagcgactcggactctgacagcgactcggattctgacagcgactctgactccgacagcgattccgattctgacagtgattccgactcggattcagattcagatagtgattcggatgctgacagcgacgcggatagtgattctgatgctgacagcgactccgatactgataccgagctacctaccgcggcacagaacatagcggtcattgacaatgtgggccccatcaccggtgtgctgcattctggagatgtcactgacgatacgaccccggagattaaagggactgcagaggctggggcaacgataacgatttatgacggcgataccaaactgggttctgtcgtcgcggatgaaaatggcaactggagcttcacgttaccggagctgagcgagggttcccatagcctgagcgcgacggtgacggacaaagccggcaacgtcagcgagcgttcgccggcgtttgaactgaccatcgataccactgcgccagcagccagcattccgcaggtaaccgacaatgtcgcagagcacaccggccagctgcagagcggggatcttaccaacgatgcgacgcccaccctgaacggcacggcggaagcgggatccacggtgacgatctatgacggcgacaccgtgctgggcacagtggttgccggcgaggatggacgctggagcttcacgccagctagtctggaggaaggcgcccacagcctgagcactacggtaacggacaaagccgggaacgtcagcgaacgttcgccggcgtttgaactgacggtagacactatagtgaacccggttagcgatctgcaggtaactgataatgcaggagaagacacgggtacactgaacagcggtagcgtgacggatgatgatacaccaaccttgagcggtacggcggaagcgggcgccacgatcacaatttatgacggtgataccgtactgggcaccgcgattgcggacgaggacggacgctggagctttactcctggcgcactggctgaaggatcccatagcctgagcaccacggtgaccgatctggccggcaacgtcagcgaacgatccccgatatttatattaactgtcgatcttagcgatgacaccgactccgacagcgactcggattcggacagcgattcggattctgacagcgattctgactctgacagtgattcggactccgacagcgattccgattcagacagtgactcggattcagacagcgactcggattccgacagcgattctgactccgacagtgactccgactcggacagcgactctgactctgacagcgattccgactcggacagtgactcggattccgacagcgacagtgattccgactctgacagtgattcggattccgacagtgactccgactctgacagtgattcggactctgacagcgactcggactctgacagcgatgctgactctgacagcgattcggattgctga

SEQ ID NO: 207055 - DNA, 456 bp, Klebsiella oxytoca
atgcatcacccctacaccgtcccggaggcggcgctggcgcgcctgtccgggctaccaatccgtagcccggctaagcgcagcgcgagccgggaaaaagccgcgccgatgcatcaccccggcaccgtcccggaggcggcgctggcgcacctgtccgggctaccaatccgtagcccggctaagcgcagcgcgaaccgggaaaaagccgcgccgatgcatcacccctacaccgtcccggaggcggcgctggcgcgcctgtccgggctaccaatccgtagcccggctaagcgcagcgcgagccgggaaaaagccgcgccgatgcatcaccccggcaccgtcccggaggcggcgctggcgcacctgtccgggctaccaatccgtagcccggctaagcgcagcgcgagccgggaacaagccacgccgatgcataacccggcaccattcccgagtcggcgctag

SEQ ID NO: 207056 - DNA, 723 bp, Klebsiella oxytoca
gtgaccacgctttccgaagagacgccggacgccgcgcgggtgatcccgaaggccattttccttactgcggtctacggtggggtgatttttatcgccgtctcgttctttatgcagctcttttttcccgatattagccgttttaaagacccggacgcggcgctgccggagatcgccctctacgttggcggcaagctgttccagtcgattttcctgtgcacgacgtttgtgaataccctggcctcaggcctggcttcgcacgccagcgtgtcacggctgctgtacgttatgggccgcgataacgttttcccggagcgcattttcggctacgtccatccgaaatggcgtaccccggcgctgaacgtgatcatggtggggattgtcgcgctgtcggcgctgttctttgacctggtcaccgccacggcgctgattaactttggcgcgctggtggcgtttaccttcgttaacctgtcggtatttaaccacttctggcggcgtaaaggttttaacaaaacctggaaagatcgctttcactatctgcttttgccgatggtcggcgcgctaacggtgggcgtactgtggattaacctggaggcgacctcgctgacgctgggtctgatatgggcgggcctcgggctgctgtatctgacgtatctgacccgccgcttccgcaagccgccgccgcagtttgacggcgccaaagcggaacaggcctgggaatcgtaa

SEQ ID NO: 207057 - DNA, 657 bp, Klebsiella oxytoca
atgtctattaatccctctctcgataacgcctctggggcggaaaaaccgcgcctgcgcaagtctctcaagctgtggcaggtggtgatgatgggcctcgcctatctgacgccgatgacggttttcgatactttcggcatcgtctccggcatcagcaacggccacgtcccggcgtcctatctgctggcgctggccggggtgctgtttaccgccatcagctacggcaagctggtgcgccagtttccgcaggcgggttcggcctatacctatgcgcagaagtcgatcagcccgcacgtcggttttatggtgggctggtcatcgctgctggattatctattcctgccgatgatcaacgtgctgctggcgaagatttatctttctgcgctgtttccggacgtgccgccctgggtgtgggtggtgacgtttgtggctattctcaccgcggcgaacctgaaaagcgtcaacctggtggcgaacttcaacaccctgttcgtgctggtgcagatctcgatcatggtggtctttatcgtgctggtggtgcaggggttgcataaaggggaaggggtgggcaccgtctggtcgctccagccgtttattagccagaatgcgcacctgattccgatcattaccggggcgacgatagtctgcttcacgccctga

SEQ ID NO: 207058 - DNA, 222 bp, Klebsiella oxytoca
gtgccgccgtattacgattccatgatcggcaaactgatctgctacggtgagagccgcgatgtggcgattgcgcgcatgaagaatgcgttgcaggagctgattatcgacggtatcaaaaccaacgtggagttgcagacccgcatcatgaacgacgaaaatttccagaacggtggcaccaatatccactatctggaaaagaaacttggcttgcacgagaaataa

SEQ ID NO: 207059 - DNA, 831 bp, Klebsiella oxytoca
atgttgatgtgtgatgcgaccggtctgtcgcaacgtcgtgcctgcaggcttacaggtttatccctgtcgacctgccgctatgaggctcaccgtccggctgctgatgcgcatttatcagggcgcatcactgagctggcactggagcgcaggcgttttggctaccgtcgtatttggcagttgctgcgccgtgaagggcttcatgttaatcataagcgcgtgtaccggctttatcacctcagtggcctgggcgtaaaacgcagaagacgtcgtaaagggctggcaacagaacgtctgccgctgctccgtccggcggcgcccaatctgacctggtcgatggatttcgtcatggacgcactttccaccggtcgcaggatcaagtgtcttacctgcgtcgatgatttcacaaaggaatgcctgacggtcactgttgcctttgggatttcaggcgttcaggtcacgcgtattctggacagcattgcactgtttcgaggctatccggcgacgataagaactgacctggggccggagttcacttgccgtgcactggatcaatgggcctttgagcatggtgttgagttgcgcttaatccagccgggcaagccaacgcagaacggatttattgagagctttaacggacgatttcgcgatgaatgtttgaatgagcactggttcagcgatatcgttcatgccaggaaaattattaatgactggcggcaggattataacgaatgccgcccgcactccacgctgaattatcagacaccgtctgaatttgcagcgggctggagaaagggtcattctgagaatgaagattccgacgttactaactga

SEQ ID NO: 207060 - DNA, 654 bp, Klebsiella oxytoca
atggagtcgataagggcttttaaaaaaaacgaaactgctgacaatttaacagattgcatgattaagggtaatgaatatttcaatcatgcagagaagttagtatctagcagcagtttaaaaggtaatcatagcaatggaatatggcttagcgatttagctgaatcttgcgaggaaatattagtatcttatataaaacatattgcattcatatcttctcataatcaattgctaaataattcatataaaaaaccatctaaaaatgcatgcaccaacatgcaaaggatggtaaggatgcattgttcaaaagacatttcagatgcactaagaaaggaatttactgatgcagatttaccaacaagggggtttgatgtgaaggcgtctgccgataaagttggaatggaaaaaatactccctgttgcagtcggagtttttttcattctcatatcatttttttcggctttatttattagagatcccagccacacacagtttttcgtaattagaggtctgtttgcactcggttgcgctgccgcaggatcatgtattcctggatggttaaatgtagaaattcatggctacgtaaaagcaggtggggctatagcccttgttcttatattttggttttttaaccctccggcatttataatgagttaa

SEQ ID NO: 207061 - DNA, 321 bp, Klebsiella oxytoca; identical to SEQ ID NO: 179498

SEQ ID NO: 207062 - DNA, 156 bp, Klebsiella oxytoca
atggcgcgactggcgaagctgacgcggaacctgctgatcgttatcccggccgttgtaacgatcgctttgctgctcctgctgtttcagcagggcttcggcttcttcaacctgccggcgcagcttttcagaacgggtaccgaacagcatccgccgtag

SEQ ID NO: 207063 - DNA, 123 bp, Klebsiella oxytoca; identical to SEQ ID NO: 149139

SEQ ID NO: 207064 - DNA, 450 bp, Klebsiella oxytoca
atgctttatagtgtctctaatgacgctaatgatttttttgttttctttaatatatttaatcctcgtgctatttctcataataatgattataacctgaattttaatatatctaattcactaatggatgaagtggaggtggataaagaagggcgaattattgagaattgcttcataaggtattttgacacaaaaatacaagatgatgataaagaaagtaaacggccagatctaaataatatgtttattgatattgtaaaaaataagaaaataaaaaatattgcagtgaatcttcagtatgaaaatgctaatgagtactatcgtttttattctagaaatgttgagccgaagaatgatcacttttttgtaattgattttgtagaggataagatccttcttaatagaggtaaaaatatggcagaacatatgcaattgatgatgaataataaatga

SEQ ID NO: 207065 - DNA, 633 bp, Klebsiella oxytoca
atgacaactacaatagagggtgcattaataaatgagcattctttaaaatacttttacagatggatttgtcatatcgtttttaaccagctagacgtcaataatgaaaaccctaaaaaaatgtttgctggcttaatgagaacgtacaatcttaaagatggagctataagtatattaaattcggcttttgttctctcaactcatttaagtatattagatccagtggagcaaaagctggtattcaaggttaaaaaaagggctctttttttaattaaaaaaagcattaaaggagattttaaaaacaataaagaaattacaaccctatttagacttctttttggagggaaaactgccacacttataagtttagaaatgaatctgaaaaaaagttgtcaaagaatagacccatctattacagccacaataaagaaatataaaagcaatgagcttaaattcttactcccctataccacaaaaactagtggctgggttaccagttttttggattttacgatagctaagttagagcaagaaaatgctgataagatagccgagaatttacgcttccttttccctgaaattatatctataatagagcaagcttcttcttcgatagatataggggagtttcactga

SEQ ID NO: 207066 - DNA, 825 bp, Klebsiella oxytoca
atgtgtgatgcgaccggtctgtcgcaacgtcgtgcctgcaggcttacaggtttgtccctgtcgacctgccgctatgaggctcagcgtccggcggatgatgcgcatttatcagggcgcatcactgagctggcactggagcgcaggcgttttggctaccgccgcatctggcagttactgcgccgtgaaggccttcatgttaatcacaagcgcgtgtaccgcctttatcatctgagcgggctgggcgtaaaacgcaggcgacgtcgtaaagtgctggcaacagaacgtctgccgctgctccgtccggcggcgcccaacctgacctggtcgatggattttgtcatggacgcactggccaccggtcgcaggatcaagtgcctgacctgtgtggacgacttcacgaaggagtgtctgacaattaccatcgcattcgggatttcaggcgttcaggtcacgcgtattctggacagcattgcactgttccgaggctatccggcgacaataagaactgaccaggggccggagttcacttgccgcgcactggatcaatggtcttttgagcatggtgttgagttgcgcttaatccagccgggcaagccaacgcagaacggatttattgagagctttaacggacgatttcgcgatgaatgtctgaatgagcactggttcagcgatatcgttcatgcaaggaaaatcattaataactggcggcaggattataacgagtgtcgtccacattcagcactgaattatcagacgccatcagagtttgcagcacggtggcggaatggaaaatgtgaaggtaaacaaaccgacattatggactga

SEQ ID NO: 207067 - DNA, 438 bp, Klebsiella oxytoca; identical to SEQ ID NO: 156283

SEQ ID NO: 207068 - DNA, 201 bp, Klebsiella oxytoca; identical to SEQ ID NO: 156284

SEQ ID NO: 207069 - DNA, 225 bp, Klebsiella oxytoca
atgaaaatcgaatatcaggactttgacatcgttgcgaatattgtaatcactagcaccatttttgagatccgtaaacataaccagattgttgatactaccttgtttcttgttcctgaaatggccagtaatagcagcggttttttcttcatgaaaaccgttttaagcggccacgctaaacacgcattgcgcgcttacaagcatcttctcagggagacgattagatga

SEQ ID NO: 207070 - DNA, 582 bp, Klebsiella oxytoca
atggatcacacagtatttaacccggaaccaacgtctgccggcatccggttatctggaagcagagtcattggttactccgccgctattcgtgaactggataacggtcgctatgacaaacacctcgctaaaggtatggaaattctggcgtgcgtcatggaggcggtagaaagcaactggatcacactcaacatcgagaagcaaatcatcgtctggcgctggttgctcgccgcagtcttcattgccgaagagcatgagaaaaacggcacaattgaaatagccaacgaaaacggaggtgtagatcgagcaattatctattctggaaaaaacggggctctgagcatctaccctggcccactacggttttctcttgcaaaccatgttgaggggatcgctattcaaaaatacggacaggagatcggccagcaactggctttacgcacctaccaagaaatggttgtttctgatcctgagcaaggattcaaagtgtcagtagtgggcagggaaggtctggagctgctccatgatgactatatcgaaatgattaacaacggtggcatgcctgaaaggctcgtcacgcactaa

SEQ ID NO: 207071 - DNA, 441 bp, Klebsiella oxytoca
atgattgacaatcgcaccgccagcgcaattgacctagcacttcacaaatatgaaacgcctgttggttacttgttcgctgccgttcgtcatgggcgtatgaagcgctgttttagccgggacactgcgatccgttatctggctttctttatgactagcgaagcttttgaacgctctggcttcaaacagcgttacccggatgtacagacagtacaccccataaccccccaacttaattgttgggagcgtggcgcggcaacacgcgcatatcacctagcccaccagcgttgtattcgtcgtcttcgtcgaatcctcgcccgcaaacgtgaaatgcagaagtggtgtgaaaagtgggatgccatgcacgaccgctacgtgaaagagcgtgaagaactcaaagccagcaaaccagcagaggtacgcaatggatcacacagtatttaa

SEQ ID NO: 207072 - DNA, 186 bp, Klebsiella oxytoca
atggctaaattaaaccatcctattgcacacgaaaaagtgcaagtcgttatgacgattgaaaacgggcaggtaatcgatacccgcaaaattcgcgataacgaactgattgcaactatggaaacttttttctggatggctaaaaaagctggttatcaggtcatagaccccaaagcggagaaacaatga

SEQ ID NO: 207073 - DNA, 219 bp, Klebsiella oxytoca
atgaatacaccagctaacatacttgaaagtattactgacgatgtgttcaatgcagtaataactgcaaagaaactgaaagaactcacccatatttataccgaattttatttcactgataaggacagtgataatcccaattgttatatggcatcagtaatattcgactatgcaataaaagtttgcagtgaattgaaaagcatcgaagcgaaattgaattaa

SEQ ID NO: 207074 - DNA, 576 bp, Klebsiella oxytoca
atgaaacacgaactcacttttaaagatcacgcggttgttccgtttgataatggcgacggcaaaatctggtttaccacagaggctctggccgggctattgggttacgcggatgcgaagaaggtttccaatatctataaccgacacaaagacgaattcacagagagtatgtcaacacttgccaaagtgaggaagtgtaatgaaaacaacgaattattatacacacagaatcgtttgttttcaccgcgtggtgctcatctcatcggcatgatttcccggacaaaagtagcgaaagaactacgtatctggctgttggatcttgctgaaagggaatccggtgtagcggtaggttcgcttgatgttaatcaccttactgatatggccgggcaacagatccacgacgcaattattaaatttgacaaactctcatttgaacatcgcgggcagaagggcagcggcctgatggctcaacgtaagcgcgatatcaaaaaaatcagagaggcaacgcgtctcgcactacagcttacacagttcagtatctgcgatttaggcgattttcctgatgcgttgcaagcctga

SEQ ID NO: 207075 - DNA, 285 bp, Klebsiella oxytoca
atgtatcccgattacgtgcaggttgatatgccagtcagatatagcccggcggatgctgagtggattcaggggcaactaaaacagttacctccatcactgagggcgaaaatcgccctgaagtatgcagaagtttacgaaatagagtttaacgctgagcccgtttcattccgtagagagaaccgggcacggcatgaggccaatgtgaggcttcggcggtttgtaggtgcgcacggacgcgcattgcaggggtatacgaccaatccactcctcgcgggagtgcgttga

SEQ ID NO: 207076 - DNA, 1620 bp, Klebsiella oxytoca
atgctaaatatcaaaccgaactttgcccaggagcgtgggctaaacatgttgcgccgctcctggaaggagtacgactcctttatggtttactcaccgaccgggagcgggaaaaccgggctggctgcgtttatcgttgctggactggtcagccgtggtatgcgcgttctgtttgtcgccccttacaccatcctgattaaccagactgctcagcgtttcaccgagtatggtttacctaaagaccagattagtttcatctggcgtgatcatccgaactacgaccccaatctgctgatccagattgccagtgccgatacgctaatcaggcgtgagtttccagaaaatatagacctgcttatcgtcgatgaagcacatctacgcaaacgccgaattttgaaagaaatcgaacggatcaccactgagaaaaaggcgaaggttatcggtctgtctggaacaccgtttgctcctttcttgggccactactatcaaaacctcatcaagccaacgacgattaatgagctgatccagcgcggtgacctgagcagttacgagtttttcgcgcccacaaaaccagacctgagcaatgtaaaaacgaaaacgtcaattgaattcggctctgattatgatgaatcccagctggcggaaattatgtgtggctccgatctggtaggcgatatcgtcgataactggctgcgtcatggtcatgacttgccgacagtagcgttctgcgtcaacaaggcccacgccaactttgtgactatgcaatttaataaagcgggtatcaacgcagaggtaatggtagctgaaactcccgacgaagaacgacaggtgatgatccaccggttcgaaacgggcgctacaaaaattatcgtcagtgtaggagttctggtggccggtttcgacagcgatgtgcgctgcgttatctacgcccgtcctacaaagagcgaaattcgttggcttcaggctcttggccgagggctacgaactgcccccggcaaagatacttgcctgatttttgatcacagcggcactgttcatcgtctcgggttccctgattccattgagtatgacgctctcccctcaaaagatgatggcatgaaagaggctgcctgtcgcgcagctgaggaacgtgaagagaagctaccgaaagaatgccctgaatgccatttcatgaagccggctggtgtttatgtctgcccgaaatgcggctttaaaccgctaatggggcaggacgtagaaaccgatacaggccggactattagaaaactaaaaaaaaaggaaaaggttcataccaaagccgaaaaacaatcatggtggagccagatcaaattctatcagcgtcagcgcgaattaatggggaaacctgttagtgatggctggtgctctcacaccttccgcgacaagttcggagagtggccgagtggattaagtgatttcccaatggaggtatcgccagccgttaataactacatcaagcataaacaaatcgcttttgctaaagcgcgccagcgtgaaaaagaacagcctggtaattcagaccagaaaatgacctctgaaagtatcaattttgcacaacaagcaataaaagaaattcgaaataacttagggagaaagaccgcatga

SEQ ID NO: 207077 - DNA, 378 bp, Klebsiella oxytoca
atgcgtgatattcaaatggtaatggagcgttggggcgcttgggcagcaagcaatcgtgaggacgtttactggcctacgatggctgcgggcttctctggtcttatcccttcaaagattcgttcccgccctcagtgttgtgacgatgacggcttgatcatatccaatctaatggcaggtttgcgctcaaagcatgaggcggcacacgatctactgttcgattactacatattcggtaaaacgtttatgcaattggccagacagcatagatgttctgatacgcatataggaaagaagctaagcaatgctgagggagttatcgatgggcttcttttagcgctggatataaagttagaaatggatcgttatgtgcaacgctga

SEQ ID NO: 207078 - DNA, 255 bp, Klebsiella oxytoca
atgcaagagataaagaaagggccgcgcgccttaatgctgatttgctttctggcactgtgcagcagctgcagcaacaagccaaaaagctcgctacccgtctggacgcagcaagagaaaccgcaaatcttgccgctaccgcaggaagcaaagcagaaactacccccgccggaatgctcgcctacgtgctcggagagattgcaggagaagctgaaaaacttgctggaatcgctgacgagcgctaccgggccgggctga

SEQ ID NO: 207079 - DNA, 165 bp, Klebsiella oxytoca
atgtctcaaagcggacaagtcacccgccaggacaacgaagtaggcgaactgcagcgcgcccttaaccaccagtacaaccagcttacgcagctttccagtgttgtggctagtctgcgcgctgaagtcgccaagctgaaaaagcaggttgcagaacagggtaaataa

SEQ ID NO: 207080 - DNA, 654 bp, Klebsiella oxytoca
atgaactcaaatagcatttgctcagcaatcagaaggatcacatcgcatctgatatcagtgggcattagtgatgctcaaaattttccagtgataacacaggatagagaatattgctatgtcaattatagtggatttgctgatgcttcgattgcactaagaaatatcgagtatgccgatatttataattttcttgatgaaaacaggcaatacaatatcaaattattggatggaggtttgctccatcttctatttcaatttgaccaccgcatgaatcttgtaaaagagcgcttatgctatttccctgctccaaactatgaatcatttcaaaatgatcccgacctatatttagatgaaagtaatttttatgctgatattgtccaaaaatcaattttacccgttcctatacgagttgattatgctccaaccgatgctaatgatgtcattcacccagcggcacacttgaccttaggtcagtttaaaaattgtcggatacctttatcatcaccattatgtccagtaacatttgttaaattcatattgagctctttttataatactgcttatcatgattttggttttgaaatggaaagattaattcacccaaatacaatcaccgtccgagagagggggatgttacacttttcaattgaatag

SEQ ID NO: 207081 - DNA, 2097 bp, Klebsiella oxytoca
atgattgaaatattgggtatgaaacctcggaaccatacggtttctgatattctggaaagttctataagtcaaataaatgacatatccggatattattatcgtggttttcctgtaatatttttaagtgaaggcaacgttacacttgatggcctactttgctcatcaaaacatggtgttgtaattttccatttcactgaagaaagagaattagtccaagatgatattgatatcattgacgaaatgcacatgaaatttgttgcgaaactttctgaagtaaaagcattaacaaaaaatagagtgctgaacgtacctgtaaatagtgttgttttttcaccgaactgtataaatattgatgattttgattgtgatagtggcttaaacattagttccaatgtagaagaaatattgtccattcttgataacataacttgggatgatggttcccttcttgaaactttactatctcatgttcaatcactctcaaaattgaagcctaagagaaaaagaagctatgttaggcagattgactcaaagggtagcgtactaaaaaaattggagaattcacttgctacgcttgactccagccaaaccacagcggtcttggttaacattgataatgtccaaagaattcgtgggctcgcgggttcaggtaaaacgattgttctcgcccgtaaaatcgcgcatatacactcgcaaaatccccattggaaaatagctgtaaccttcaacagtcgctctctcaaagagcaactaaaacacttagtttcagcatttgctgatgataatgggattgattgggataatgtagatattattcatgcctggggaggctccagaacagaaggtttatattacaatgcatgtgttgcacataatgtgccttattatgactataatggtgcacgcagccttgcggagtacaatgaaacaccttttcaagctgcatgtaaaaacttcttagataataaaaaggaggataaaaagctctatgattttatccttattgatgaggctcaagatttttcaattgaatttcttcgcatatgttattctcttttaggggaagaaaaaagattagtttatgcgtatgatgaattacaaaatcttggcgattcgtcaatgccttctcctgaacaaatatggggagtagacgaacatgggaaaccaattgttagcttcaccagtgaagagcaagatataaccttagatatttgctatcggaatcctggtccaatcttgaccactgctcacgcattaggttttggaatttatcataaaccaataattcaaatgtttgattttgaaggattgtggacagaaattggttatgaaaaaatcgatggtgaattagttgaaggtaaagaagtcatattatccagaacaactaaatcaagtccatcattattaagcgctcataattcaattgatgagatgattcaattcgttaaattcgatgacaaacattctcaatcgaactggattgcgcaagaaataataaaaaatattaatcaagaggagatattgcctagtgatatagttgtaattcaccctgatacaatgcgcatgagaaatgaagtgggttatctacgtgatcttcttttccaaaacggtattaatacatcaatagccggaattacaagctctccagatgaatttttctcagacaatagcgtaacatttacgtctatattcagggcaaaaggaaatgaggcagctatggtatatatcatggacgctcactattgcaatgttgattatgagttagcaaagcgcagaaatattctttttacagcgatgacaagaaccaaagcgtggctccgtgtatgcggtgtgggtgctttctttgatggtttgattaatgaatataatgaggtcaaacagaaagggtttaaattacaatttacatatcctacagaagccgaacgtgaaaaaatgcgactcgtaaacagggacatgacttcacaagagagaaaaagagttcatcaagctaaattgagtgcgcataatctcagagtgctcttggatggacaagttagagtagaggatataccagaagaattgcgccttgctttgattaagcaattgaagggtgagtga

SEQ ID NO: 207082 - DNA, 180 bp, Klebsiella oxytoca
atgtcgttttgttcccggctcgcgctgcgcttagcctggctacagggtctcaaccatctgcgagccggtagcccggacaggtgcgccagcaccgcctccggggagtcgcatctcacacaacaccagcaggaattaaaacagcacggtaccgcagcggtaatccaggcggatctgcggtaa

SEQ ID NO: 207083 - DNA, 1176 bp, Klebsiella oxytoca
atgtctgtttcacaagtttgccataaatttttcagccagtccctgaactccattcatcagtaccgtaaaaacgccctgctcgatatgaccgtggccctgacgcgtggtgcttcgctttctcttaccagcatcggcagatacctgccaggccccgcacgtgttaagcacaagattaagcgtgttgaccgacacctcaacagcgacctgatgttcagtgatattccctccgtctaccagcagcttgtatcccgtctcacccacagcctttcagtttgtgtcattgtcgtggactggagtggctatccttcatcagagctcagtgttttgcgggcaagcttattgtgtgatggcagagctatccctctgatgagtaaggtcatttcctcccgctaccagaacaactctgccgtgcaaaatgcctttctcgatcagatggctgtcgccatcggcaaagataagcaggtcattatcgtgaccgatgcaggctttcgcagtagctggtttcaccacatccgctctctgggctgggattttgtcggacgggtcaggggcagcctctattttcaggtcgtcgggaatgaagagtggcagatggcgcgggatattgcgtcatcaacaacggcgcgctatctgggattcgggcgactggcacgcaacgccagtcgtgactgtccgggacatttctacaccgtgcataagcgggcgacgggcaggaaaagccgccagcattatcccaaaacagacaggatgtaccgtaaaaacgcgcgtgaaccgtggctgctttttaccagcctgatggaatataagccacgcgagatagttaaaatttatagtcgccgtatgcagatagaacagaacttcagggatgagaaaagcgagcgctatgggctgggactgcgggcaagtaaaagtcggggagaaaaacgactatccgtgctttgcctggttgcagttctctacagcatcatcatatggctgacgggatattaccttgaaagtaagggaataaatcgatggttccaggcgaacagtgagaaatcacgcagggtgctgtcgtatctgacattgagtgaaaatgtcatccagcaatcgccggggcttctgtcggggatgaaccccgacagggtatacgccgatatggcgaggacttatcgaaacatcatcatggtgtattaa

SEQ ID NO: 207084 - DNA, 246 bp, Klebsiella oxytoca
atgagtaaaagcatttttgtttctggtgaggatttggttattgatcgtgtgtttttgggatggaaggaaaggatttcacgtattatcgatagggggcattacgaggtggcctgttcacaagaggctcatgcgcattacggcgacaaatttacccgtattgatgcctgtctgtatttcatacgtggcgcactgtctgaaactttcaggaaatcactgagagaaaaagaaaacgctcatgaaatataa

SEQ ID NO: 207085 - DNA, 1146 bp, Klebsiella oxytoca
atgttcagattcacacagttactacaaagcctgatcaaaacggggaatatggttgctgaagatcgcatatcacaacttgaagatacatccgttaaggaattaactacagttcgacttcgtcccgaaacaaaggcctacttgcagtcgcaaagcgagactcttggcgtttcactttctcaggtgattaatatgatccttgacggcgtggtttcaatggaaatgaaaccagcagctgataacaaaatcaaaggaatatatgacaggattatgtcgctgtttgaattgcataacatcaatacagttgatatggcgaaaatgctctccggctatgggatcaagttatcgcatattcgaaatccggataagtttattgatattctttcaatggatatgattaaggagatagctaactggttttcgattaattataaatggatcataggagaaacaaacgagttatattctcctcgggataacacctggtataaggattcctatggtttctcgctactgttgttggagaaatcattccgacattctgatcttaaggtttctgtagttaaggcaaataatgtatcttttgagaaagctgagaaacttgaagaacaatattccaggttgtatgtcggattcatattaagttatacatctaaggttaatggtgtatcttttacaaaatacgaagtttgcgaattccagagatggaattataataaatgtcgtggttacttaagattcattttttattttttggattctgtcaggacgagaataaactgccagggcgtatcattcaatgaagagattgttgatggtttgatggcaggtaggttatttccatcaacaattaaagggatgttatcagaaacttggttcattgcagaacgaatagggcatatagaaagtaattacgatgtagagataaatccagttgagtatttgaacaggtttaacagacttatacgtttatttcgattcggtagttctgtgacaattttagatattgaatatacaacgaaagatttttcatatggatggattataaagtattcatgtaatggggaatatcatacggagttttaccacagtctggccactggtctggacgatatttatgataagttcatcgtcgagaatccttcataa

SEQ ID NO: 207086 - DNA, 285 bp, Klebsiella oxytoca
atgcttcgttttgtcccagcagcgcccagctccgggccctttaccgccccctttttcactgagcgatgccctgccggattcccttcgccggcacaatattacgtaaaaacggaacttgacctgaatgaatactgtattcagcggaggggctcgacttattttgtacgaaccatagggaactcaatgacggacattggtctacattcaggcgatttgatgattgtggataaggcaggacgggtcagtgaactgctgctgtggcgagtaatactgcgagcggaataa

SEQ ID NO: 207087 - DNA, 177 bp, Klebsiella oxytoca
atgtaccttaaacagggtcgccagatcgcggcgttccgcctcgataaagagtgcaaacgccagggatggccagcctgctctcgttgctgctggattgttctcgtgttgtttaactccagatccgaaaaatggagtttttggatccagaacagcaaagtgcgtgatatttcctgttaa

SEQ ID NO: 207088 - DNA, 276 bp, Klebsiella oxytoca
atgagcgaggacagtttcaataaagatgacctgagcagcacctttgcgcgcttcaccacaaaacgccgcaatatcgtttgtgatgaatccaagctgaagcggaaaaaacctgagccaattgcactaacaagcgcaaccaattcattggggagtagtgtactgaattttgtagcatctgcagtttctaaagcgccgaaaaattatgatgataccgaattcagaaaaaataggccgtggctttggtatagctgggaacgcaaagaagattttaaataa

SEQ ID NO: 207089 - DNA, 330 bp, Klebsiella oxytoca
atgaaaggtaacagcagttctccgggtacagacaatgcatcaaaagaactgaacattagttatactaaagaactgtcaacacgggttgcactcgctcagaaattcaatgaattagtaaataaacggggcctgaatcagaccgaagctgcagaaatcacagggcttacacagtctaaaatctcgcagttacgtcactacaagttacagaacatttcactggaacggttaatgcaagcactggtgtctttagatcagcgcgtagaaattatagttcagtcagctcatcgcccacctgcacagctgtatcgtgagtcaacctggccaaaatga

SEQ ID NO: 207090 - DNA, 987 bp, Klebsiella oxytoca
atgagaacaaaattcgcctacgaagatatgagcgatgatcaattcgaagtactaattgtgcttctgtgtcagcgtttgttcgggatcgctgttcagggatttgcaaaagggcctgatggtgggcgagatgcaaaattcgttggtactgcagaactacatcctagcagagccgcgccttggtcaggaacggtgattgtacaggccaaacatactaatggttacaatcgcagcttttctgaactggacttctacagcaatacgagtaatagcacagttatcggaaaagaggttccgcgtatccagaagctccgagcaaccggacaactcgaccattacatgctcttcgcgaacaggcgactaacaggcaactctgaagcagaaattcgagctcacattgcggataaatgcgatatccctgttgcttcagtgcacctttgcggactggaacaactggatttgttcctgaaacgctttccagaagtcatactggaagcaaagcttgatgtcgttgactcacctctcatcgtcagtcctgatgacctagcagaagttgttcaggctcttgcccgccagaaagatggtttgatggaaatacttgatgcgccgcctactgttcgtgtgacttatgaacaaaaaaacaaactaaacaacatgacggaagagtatgcgaaagagttacggcgtaagtttctaaaggaaaccgcgcaaattcgaacatttctggctgcaccagaaaacatagaattacttcggatgtacgaatctgtcgtagaagagtttcagttcaagattattgccaggcgcaaagactaccagactttcgatgcggtcatggagtatttagtcgatctactatacagtcgtgacccggtgctgcggcagaatgctcataaaaagctgacccgggcaatgcttttctatatgtactggaattgtgacatcggggaggtgggagatgttacgaccgacgaaacattcacatcctga

SEQ ID NO: 207091 - DNA, 249 bp, Klebsiella oxytoca
atgttacgaccgacgaaacattcacatcctgatcgtacggttataaatgtgtcgctgctactcttactgaggctcaaagatcgtcgggttgatgaatatgattctctaaagaagtatgcgaaaaagagcgtcacagggggagatgtacttttcctacctgcgctcaattttctttacctgatggggctgattgagtatcgccccaagactgatgctgtagaatacgtgggaccaaatgagactatctaa

SEQ ID NO: 207092 - DNA, 1797 bp, Klebsiella oxytoca
atgagactatctaaactctattctgacaagccggacgcgtttgaacctgtggactttgttcccgggttgaacgttgttatcgctgaaattcgcctgccagagaacagaaataaagatactcacaatcttggtaaaaccactctgggacgacttctcgatttcgtttttctgtcaggaaaagacccaaaatttttcctttttaaacaccctgacctgtttgctgacttcactttcttccttgaagtcgagttagaggatgcttcctttgtcacaatcaaacgcagcgttaaagatgcaacaaaaatagcatttaaacgacatgaagccgcccatcagaacttggtagcattgccgcctacggaatgggatcactacgatgttccattcgagcgtgcacgagaattactggatggtctactggactggagagccctcaaaccgtggtcataccgtaaagaactggcttatcttctgcgcacacaggaagatttccgtgaggtatttcagctacggaaatttgcctccaggcatgcggactggaaaccgtatcttgcgcatatgctgggctttgatgccagactcgttaccgaacattactcaaaagaacaagaattaaccaaaaaacaagaaatagctcagacgatcaaaaaagaattgggtggttcagttgaggacattagtaaaatagagggtatcctccttctgaagcaaaaagatgcgaataaaaaacaagcattactggacgcgtttgattttcggacactggacaaagaccatacaaagaaagtggttgacgacgtcgatgagcgcattgctgcacttaatgcagaacgctactctttgagccaaaacaaaaaaaagattcaggcgtcattacaggacgatcaaatcctctttagccctgatgaggcacagcggctttttagtgaggctggcgtgtttttcggagggcagattaagaaggactttcagcagttgatcgcttttaatcgggcaattactgacgaacgccggggttaccttcaggaagagtttactgaaatcgaaagtgagctgaagcgtgtgaacgcagaactgaacgcgatgggaaaaaagcgctcagagatgctttcattcttgagtgggaccgatgttttcggtaaatacaagcaactctctgatgagatggtcatcctgcgtgcagacatatcaactctggagcaacaacgaggtcatttacatcgattgcaagaactccgaactgaaattcgttctttaactgatgaatgtagtcatttgcaggtaaaaatagaagccgacgttgaaaaacaaaactcagacccagaaagcctgttttcctctatcagggtcttcttcagtgacatcgttgaagaggtaattgaccgtaaggcgttgttaagcgtggctcccaatcaagctggacatctggaatttaaagctgagattctggatggggcaggtaatgccaccagtgctgaccttggacatacctatcgaaaacttctgtgcgtcgcctttgatatggctgtattacgggcacacttaaacgagaaatttcctcgttttgtataccatgatggcgtgctggaatctctggatgatcgcaagaaagagaatctgctggctgtggtacaccgatatgccgatctaggattacaacctgtcatcactttgattgatagtgatttacctgtacgtccaaaaggcagcattcctgtatttactgatgatgaaattatcttaactctgcacgatgaaggagaccatggacgtctcttcaagctaagagggtggtaa

SEQ ID NO: 207093 - DNA, 420 bp, Klebsiella oxytoca
atgtttaatcgtaatgatctgaccctttctctcttctacgcctcctccacgaaggatgacggtgaaaaagtcgcgacactgaccgttcaggtgaacaatgccgacatggtggccatgcagagcaacaagctgcagtgcatcacggataaggctggtaagaaggcctattcagtcggcgagcagacggtcagcaatggctctgatccgctgctggttgccctggagagctactggcgccagagcactgagacggttgtgaacgggttactggtggatgttggcaactttattgccggccacatcagccagtcctcaacgttcctcggttttaatgggctgaaggtcttcgagaatgagccgctggcggcacgcatccccgaggatgtgctgcaggctgacggcggcgcgtccgcaggctga

SEQ ID NO: 207094 - DNA, 207 bp, Klebsiella oxytoca
atgcgcgtaagacacaccgtcacgctccagcgccaccagcgcgccattaacgtattcaatcttgatattttgcatcgtttaccttcacgaataaaaaagccccgctattgcgaggcgcatatttatcaatgggttgctataaacggagatagttataaaggctatttaggtataaatcgaacccgcaatccctactaccgcagctag

SEQ ID NO: 207095 - DNA, 876 bp, Klebsiella oxytoca
atgattaaagtctgccggtacgctattgctttatctttgttaagctatattccgctctctctggcggaagtgacgacgattgaatcggattcgtatgaaaccgtcggcaatattattaaagagaaagactctcgttaccagccagaaaatgtcttactggtatttgatattgataatacggtcctgaccagccagctggaggtcggtagcgacatttggtatcagtggcaaactaacaagctgccgctaaaacccactgccgatcagcgagtggcttgcttatatgaagactctatcgcgctgctttataatattggcaccatgacattaaccgagccagagctggccgcgcagatgaaatcctggcaagagaaacacagcgtttttgcgctgacctcgcgtgctccggatacccgctatgccaccgagcgagagctaaaaaagaacggcatcaactttagcgtttcgccgcttaagccgctgaatgaaaacgaggcgcctctgtatgaggggcgacttaaacgttcttatatttacggaaacggcatcatgctctcctccggccaggataagggcgtgattctggattatctgcttgataaaacgcagagaaaatatcgtgcaatcgtatttgttgatgatggtattgccaatatcaatgcgatgaagaatatgctggtaagcgataaatataaaaacgtggattcggtgctggttcattatactaaagtcgaatccgatctgcttaaaaaacagggggtaatactgaccgcagagcaggcgcagcggatgagcagcgagtggactcagctctccagtaccctgcagaagatttttcccaacagagcacaaagctgcagctcggacaaaaaataa

SEQ ID NO: 207096 - DNA, 726 bp, Klebsiella oxytoca
atgaaaagaatgattccgattgtatccatagtattaactggcctggcggcgcatagtgtttatgctgaacagccgcatggttttatcgattatcgccacgaatatttagataaaaaaagaacccatgccgatcgcgtagaattcggaacgttcttcagcaacggcatcggcttaatgggcgaactgcgctataatacccaggaaggtaataaagataagtgggacccttctcagtttaataacaacggttccggtctttctatcgtttaccgctttaagccgctggaggataaaaacttctggcttgagccgatgttctggctggattctactgagtactggaccacctacgaatatggcttatccgctggctataactttagcaaagcctggcgcgtctccggccgtttccgttatgacatggataaagctaccagtaaatcaaaaggctatgggaatgatgaccgtaataaccgacgttacgatctgtgggtcgattatcgccccgataatagtaacttccagtatcagctgaatcttgtttattataacaacggatatattacctgggataatggcaacgaaaactatacggcctcatttaaggtcggctataaattcggttcatgggtaccttacgtcagtattgccgattatcgtggtaccgataaaactactgacgaacgtcagggccgttatcgtatgggcttaacttatacattctaa

SEQ ID NO: 207097 - DNA, 1134 bp, Klebsiella oxytoca
gtgttatcgataccaaaggttatattacatgaacatttggaaggatcggtgacggcaaatctcgccgttcatttatcacggaagaatggaatagcgatagcggataaatatatcaagcgcggggccattcccggcgactatgaatatgcatgggataagtcagatttcgcgcattttataaaaatttatgattttatatcgtcacttattcagactcccgatgattattatctggtgacatcggattttctctctcgtaatgcactggcgggaatgatttactgtgaactgattatttctgcagatcatatgcgcaaggttggcggaggcgatgaggcgagcaattatcgcgcctgtctgcatgaagtcacaaaggcaattaaggatgctgaagcacaatatggcacggtgacccgcctgcatgccgttctgatcaggcatcaaggggtcgaacaggtcgcttctgccgtagatattttgctgaacaatccgcacccctatattaccggcgtgaatgttgccggacatgaaggaagcaacagctttagtgattattctgcttatcttgcccgcctttatcagacgggcctgcgcgggtcgctgcatgccggagaaatctgcggcgcggagagcgtaaaagccgctctggatgcaggcgcttcgcgtatcggccatgggttccgcgccatcgagtcgcctgcgcttatcgaggagcttattgcgaaggagacgttactggaaatctcattatccagtaatcatttgctggttaatgagatccgcgaaggggtgatgcctcaccctgtcagaaagctgtacgattgtggagtgagattaaatctgaataccgatgatgccgggatttgtgcaacggatatattaaaagaatatcagtttgctatgcgtacatttggttttcagcgcgcggagctgattgatatatccatgatggctattgaggccgcatttgtttcggaggatattcagaaaacgcttttagataaagtatgcgcagctgccaccgatgaagatattgatttcttcgcgctcgtgcaacagtccgctcattctccagcgctgcggctgagatttgcagaaagatataaacaacttacttcgaccagacaattatga

SEQ ID NO: 207098 - DNA, 168 bp, Klebsiella oxytoca
atggccgaggtttttatctctctcgtggtcgggattgttacaggtttaatattcagttgttttaaactgccgatacctgcaccgccggtgttgtcgggaattattggcattgttggcgtttatcttggtagtaaaggttatcaggttattatgcaacttattggctaa

SEQ ID NO: 207099 - DNA, 765 bp, Klebsiella oxytoca
atgtctgatttatcttcacccaccaacaacgattcacagtcgttaaaatatctcgatctgttcactattattaaagaaaaaatcgataactatgaatggccagagaatgaaaccattcctaccgaacgtgaattagccgaacgctatcaaaccagtcgcactaccgtacgcaaagccatcgaacacttacgccaaaaagggtatctgcatagcgaacacggacggggaacctttgttcttcctgaacttagccgtcgctcccagcgtcaactacatggatttactgacgatatccttgcccgaaacggcacgccgaagcagcagatccttgaatttggctttgtccctgtcaatgaacctattcgtaacgctttgcaactcgccagccacagccgggttttacggatcaagagagtgcgctttgacaatacgaccccaatgggtattcaaactacctatcttcctgtcgatgaaaaaaatgcctttaccgaggcagaattactggagttcggttccttgtataaactgctggcgcaaaagctggggcttgaactgcttgaggcctacgaaaccatcagcgcccgccagccatcatccgccgaagcctctctgcttgagctttccgtccatgatgtcattctgacctgtaccagagtgacgctttcggttaaccgcaagcccatggagtatgtcgaaatgatctaccctgccagccgctactcctacgaaattaaaatcaccaaagacagctttagccgaaaataa

SEQ ID NO: 207100 - DNA, 1134 bp, Klebsiella oxytoca
gtgaatattaaaaatattttattatccggtgctgcgctttctatattatggggtttttcaagttactcggtggccggcgaggcggggctgaaatttcttggcgaatataccatcccgacctcctttacctggaaaaatgtgccccttggcgggctatccgcaatccgctggcatgagggggaacagcgcttttatgccatttctgacagccgcaacacgccagcggaaggcaagccgcgtttttataaattgaagatcgacctttcctcggcgggtattaaagatgtcatcgtcgaacagcagttcgatctgctggatgccgatggcgaagcgttcaaaaaaggatttgtcgatgcggaaggtttggttatcacgccggaaaatcagctgctttggtcttcggaagccggaagtccgctgcgcaaaagcaccttaagcggaaagtttgttgaggatctgagcgccatttttcccgacggttatgacgttgacggtaaaaaagacgatcctcaaggctttcgcagcggcatttcctgggaggggctttcatttaccccggataaccagtatctgtacgtcgcggcggaaggggcattaaagcaagacggcccgctggcctcgccgctgaattcgagcccggcacggatcctgaagttccgctaccgcggaggcgatacaaagcccgagctggaaaaatcctttctctataacgtggatccggttgctcacgtttcgccttttggtatcaacgacaatggcgtttcggacgtcttagcgcttaatgacagcaaactgctggtgattgaacgttccggacgcaatgcctcggaaggctttaacgactgggatttctccatcaaggtatggctagcggataccgcagcgagtacggatatcaaagagattaacgctttatcccaggtgaagcagaaaggcgtcattcagcctgcggtgaaaaagctgctgattgatttttctgcggttactgatgcgccggactgcattgagggcgtgactttcggcccgcttattgatggtaaaaagaccctgctgttcgtttcagataataatttccaggcacatcagaatacaaaattctatctctttcaggacgtgaatgacgtcctgaaataa

SEQ ID NO: 207101 - DNA, 927 bp, Klebsiella oxytoca
atgataaaaaaatatgatgtcgttgcggtcggaagcggcaatattgacctggtttttcgggtgcccagactgccgggtaacgatgataaagtggttgggaaaaaaatatccgaaaatgttggcggtaccgtggcgaatagcgcttgtatgatgtcaacgctggggctgagcgtggtctcgttatccagcgccggggacgatcgttatggccagctgattgtcgatgattttaaacgtcatggcgtggatacctgctatatcaaaattaatcccggccaggatcctaatatggcgataattattctcgacgagagcggcgaaaaatcattaatctatgcgccgggtgataactgcgagtgggatcggcagacggcttttaccgcaattggtgaaagcaaaattatgtacacgatgcctggcgatcttgaaaaatatataattcaggcccagcatgctcattcacagaatacgttggtggcagttgatattgaaccacatattgccagcgataagcagcagctggcgaagatattaagccttgccgatattgctatttttaaccaagatggtttcactgccagcagccactgcgatcctgaatttccggtgctccatgcgttacgccgaaaatattcgctgtccgcgctggtggtcacctgcggcgctgacggcgtactggccgttagcgaacaggaagaggcgcgtcacccgggctttaagatcccagttgtcgatactaccggggccggtgatacctttaatgcttcctttatttatgcctgggccaatgagtataaactcgcgccagctattgaatttgccagcgccgctgccgcgctcaatattatgcagattggcgcccgcggccatttggcgagtattgcagaaataacccattttatttcatctaccaagggcaaggaatag

SEQ ID NO: 207102 - DNA, 1011 bp, Klebsiella oxytoca
atggaagataaggtcatcatgccattgtcctgcacccggcaagagattgccgggatctctggcctgttgtcctcaatgcagcttcagtcagaaaccctgggtccgttgcaggatagcgatttcaccgcttataaacggctgtatctggtggggtccggtgattcgtacgccattgctctgatggtggaacagtatctgaatcgctatggcgtggtggcgtgccgcgccgtgcagtccttcgagttcctgggattttccgcgcggcaggtcagcgcagatacgctggtggtggtgattagcgccagcggcaggccgtctccggtactggatgcgctcgcacatgcgcttacgatgccagcgagcgtggtgggaataaccaatgtatcgggaagtccattcgccaatttaacgccgtgtatgcttttcacccaggcccgtaagagaggaatgcccacgcaaagtagttcggcaacgctctgtttattaatggcgctggccgaccgaatcctccaggcgaatgcggtgcctgcagagtcgacaaatttagatattgagcgtttgcagcaagcatgggaagaggcgcaatggcaggcctggctgagcgaatatgcgcaggcatttttctcccgccgcgtgattttcctgggaaatggcctgacccggggcgtcgcatatctggcgtcaaacctgatggcctgcgggccgcagatagaggcccgctttttccatattgaagaatattgccatgcattaaggctgaatcaggctaatcagcagcaccttgtggtgatgtttcccgacacaaataaagacctggcgctgtgcgcatctattcaacagcatttagcacgccggggagcgttgtcacattgttttgcaccttctgagaattgcaaagtacacgattacttacagcaaattatgctgctgcttttcaaactctctctccaactggcagagcgttacgtcgctacgggtggtgaacgcgtcacattcgaggatataaaatga

SEQ ID NO: 207103 - DNA, 1083 bp, Klebsiella oxytoca
atggcttcatcagttggatgtgattcggtggtttataacaaaattttgggtgcgctggcatgcgcagggatgggcgatgcgcttggcgcatcgactgagttgtacagcattgatgaaattaagcagaagtggggcggttggttagataagtttgtcgcccctcctgaggacacctttgcggggtctttaaaaggcgtggcggggttaattaccgatgactcgagccagatgtacgtttttgccgaagcgctgattgctgcaggctacggaaaattcaccaacgacagctggaaagccgcgctgctgcgctgggcggatatgatgccttacgccatgtataaagggccgacgacggaacaggtcgtgaaagcgctgcgcgaaggttacccgaccaacaccatcggccgcatcggcacctccaaccgtcaggcgccgaatgtcggcaccacgaacggggcggggatgcgcgttgccccggccggattaatctatccgggccagttgacccgggcttgcgatctggcgttactcacctgcctgccttcgcatgataccaatattgccattgccagcgcctgcgctatcgccggggcaacggctcaggcaatggtggttgataccacgctcgacgagatcgttgaggccagtcttgaaggcgcacgctatggcgaagcgctggcgaagcagcatgcgcgctgcgtcgcggggccctcaattgagatgcgtacgcgactggcggtgaaaattgcacgtgaagcggactcgcttgaaaaatgcctgtacgaaatcgagggctatatcggtaactccgttgccgcgcatgagtctatccctgctgcgattggcctgctggtcttctgcgaagggcgcccgtgggaaacaatcgttgccgcaagtaatgtcggtaatgacacggacagtattgctacgatggccggtgctattgcgggcgcatggaaagggttcgatgcgctaccgaaagagcagtacgcatttttcaattccgttaacagccgcgactttaatctgccggaaattgccaccgggctgaccctgctggcggcggaatcgctgaaaggttaa

SEQ ID NO: 207104 - DNA, 1293 bp, Klebsiella oxytoca
atgtctatcgctatcgtgatgatgtcgatggcaatgattattacctatttctatacggacgtttacggccttacccctggagatttagggatattgttgattgccgtacgttttatcgacgcagtcatcgacccgctcatcggtatgatgaccgacaggacgcaaacccgctggggacgctatcgcccctatctgcttttttgcgctatccccttcgggctcaccatctggatgatgttcactacgccagattttgactatacgggtaaactcctctgggcctggggctcctacatcgccctgacgttgacctacacctttatctccatcccgtatgtttcactgatcggcgttataactgacgatcccaaagaacgcctgagcgcgaacagctaccgctttgtgatgaccaaaatagccatgtttttagtcactatcatcgtaccgatggcggcgctgcattttggtaaaaacaacctggccagcggctatcaactggcgatgggttcgatggggattgtttcaacgctgctgtgtatctactgctttttctcggtaaaagagcgtatcagccataaaacggaacaaatccattttccgacccagtttaaacatctgctgaagaacgaccagtggctcattcttggcgtgtccattgcgttaatcatgttcggcggtattgtacgtaactcggttgcggcctattacgccaaatactacctgcacggcggcaatgagcttatttctccgttcctgaccaccggtgtggtggcatccgttctggcgatgctgctggccggcaccattacccgctattacgacaaaatcaaaatgttccgctatacccagctgttgacctttgtcgccggggtcgcgatgtactttgtcgtcggcgagcagaacgtttatctggcctttgttttctttttcatcattacgcttttaggcgatatgcagttgcccgtgtactgggcctccattgccgaagcggtggactacggtgaggtcaaaacgggcacccgcgtttccgggctggcatttggcgggatcctcttcttccagaagctgggaatggggctggctggcgggttcatcggcttttcactgagcttctttggctatcaggcggacgtcgagcaatcgccgtcatcgctgctgggcattacgttaatgatgaccctaatcccttccgtatttaacctgattgttggtctgtttatgaagaaatacgtgatcaacgataagtactatgaagaaattaaacagaagctggcgcagggtgaagcggcgtaa

SEQ ID NO: 207105 - DNA, 2928 bp, Klebsiella oxytoca
atgagtcagatcattgataacccaggggcgggaacgccgaccctggcgattaccgataaccgcggactgacggtccgcactttacaatacaatcgacaaaccattaccgacgctccgcaggcgttgattacccgagtattagccgatgatagcggcctcagtactgcccagtgggatccccgtctttatatgaactggctaaatgatcccaatgtttcggcaaaccaggcgaaccaggtttctctgacagggcagacgctgcgtcgcgacagcgttgacagcggctggaacgttacgctgtacgatgccgaaggtcgcccggtatggcagcaggacgtcagtgcggtctgcagacggcaggagtttgatttaatcggccgcctgacggccagctatacccagcaaaacggcggctcggagcgggtagcggcacgctttttttacggcgataccgatgcgcagacggctactccacaggatgataacctgcgcggcaggatggtccgtcactatcatgatgctggaaaaacaacgatatccgggtatacgctcggcggcggcatggtctgctccacgacacagctcctggctagcccggagcaacaaagcgactggcggggcgacgatgaaatgacctggcaatccgcgctttcgccagagaactggaccacgacatggatgtacaacgcatcgggcacaaccctgacgcagacggacgcctgccaaaatcagcagcgcttcttttacgatgtggctggcgtgctgtgcgctagcgagttaacacagagcggcggacagccgacgccgctattgaaatcgttaacctggacggcggcgggcagaaagctggtggaggttgcgggcaatggcgtgcagaccacctggggttatgatgaaaaagatcagcgtctgatatccattcgcgcggtacgcggcgatggaagcctgcttcaggatctcacctatgggcgcgatccggtcggtaacgtggtgagtatcagtgatgggacggcggcgataagctatttccgtaaccaggcagcgtcgggagacgcctgctatcgctatgatgcgctgtaccagatgatcggcgctaccggacgggagaatgcagatatttctccccagaccgccgctttgccggatgtggtgaaggataccagcaatctggtgtcttatagccgcagctatcagtatgattctgcgggtaatttacagcagatggcccattccggggccagcagctacacgtatacgatggctatctcgcagagcaataaccgttcggtcctgaatagcgatggttccgttacgccggagcaggtagatagctattttgatgttcacggtaatttgctgcaaatgcaggccggtacgccgcttatctggaatgagcttaaccaactgcgctatgtggtaacggttgacagaggtggggcgctggagggcaacgatcgcgaagtctatcaatattgtcagggttcgcgcatccgcaaacagtcgcggacgctgaccaatagcgacagccatatctggcaggtggatgatgtgatttatcttcccggcctggaggtgcgccgcagctatgttgataacaacggcagtccgcagccagtgacggaggagttacatagcctgaagataaacgacggtagccgtgcggtcattcgggtattgcactgggtgaccgggcagccgacggatatcgaagcggatcaaattcgctactctttggataaccatatcggttcggtcaatattgaactggacggcagcggcaatattttgtccagggaggagtattatccgtttggcggcactgcggtgctggtggggaacagcagcgaagtaaaatataaatatgtgcgttattcgggaaaagagcgtgatagcgcgggcctgtattactacggccatcgttattatgcgccgtggttattccgctggataagccctgatcctgcgggaacacgcgatatgattaatgcttattgctttgtcggtaataatcccgcgacatcgtacgatgcatccgggtttgttgatattgctgatttatcgcagccgctgaaggatctgctttttggagaccatgaggtttttgggagagaactcaatagcgtacggtctggtaatgacgttatcagaggaagaacattatggagcgatccggagattagcacgttttctccggtgatttctgaggttgccgcctctgagcatcaacggttgttgcaggagtcccgcgctggcggagcggtggcggcgctgtccggtgaagagcggtttatgatccgactttatagcgaagagtcgctgccttttcaccgtatgctgcttaatggcttatcttcagaagatattgttgcaggttatcagccggaaatggccagatatttaagcatgtcgcttaaccagctaccggaatatccgggccacagctatcgcggcgcgttattagggaatggcgtgggatatgttccgtcggtccttaatagagatgcggatggtggggaagcggtggcgttaagatcgccacaagcgactgaagaacaaagagacgtgacggtttcaattcaggcgggcgattatgtgacgacacagacgtttttttccaccagcgccgagatcagggtggcttcagagtttgtgatgcgccagcgttttggtaatactttttcagccgggactgccgtttttgatattcatgcccaaagtggcaggaatattacggaactgaccgagcttgatcaggcggagattttgctgcaaccgggggcattgttcagagtcacgaacgtagaggagcgtgatttggggattcggataggccttgaagagagcagtacggcctgggaaagagcaggcactgtaagggattatcgctttggttcggttgtgccctcccgaccaacgtatccggcttag

SEQ ID NO: 207106 - DNA, 4464 bp, Klebsiella oxytoca
atgaacgatcatcacgctttttccacatttgaaacctcatttacgccgccctctttgcctcaaggaggcggaacgctgaggggaatgggggagtcgttgagccaggccggaccagatggtcaggtttcgctgactattccgctacctgtgcttgccggtagaggctttgctcccaggctggcattgaactaccacagcgccagcggcaacggaccgtttggtctcggttggggctgcgggacgatgcgtattgttcgccgcaccagtcatggtgtaccgcaatataatgatgacgaccagttcctggcgccggatggcgaggtgctggtacgtaccgtcggcacgaccaatgaaccgaaccctaccctggtaagtgaatataacggtgaagcgttatcgcagacctggacggtgacccgctaccagccgcgtattgagcactatagctccagagtcgaattctggcagggggaggacggcagccagttctggctgctgcacggcagcgacggaacgttgcatatgctggggaaaacaagggcagcgcaaatttgcgatcccgtccggtcagaatatatagcggaatggctgctggaagagtccgttaatccgcacggagagcatatctggtatcgctatcaggcggagaataccgataacctcgacctgagcggtaatgagcaaggtcgggatcacagtgccaaccgttatctcatccaggttatgtacggcaatgaaatctccagtccagggctttatttatggaacggcgatacgccctccgctcagtggctttttgccttgatattcgactatggggagcgcagcctcgatccgcaaacgccaccgacgtttgataccgtcgggacatggcaggcgcgccaggatccgttctccagctaccactatggctttgaaacgcgtacccaccgcctctgccgtcaggttttaatgttcaggatgcagggcaatcggacggcgctgatttcccggctgctactggaatacgatgaaaatccgctgttgactcagctaatcggcgcgcagcgcctggcttatcagcaagatcctaccccatcggatgcagcaaacaatgtgctggagcagctaccgccgctagatattgattattctgcgccggactaccgcggcgacaaaaacggctggcggcagatgcccgcgctgccgggcttgaacgaccggccctatcaactggtcgatttatacggcgagggggtacctggcgtgctgtatcaggatgcggcggcctggcgttaccgagcgccggtgcgcggagagggcggcggcgatgatgtggcatacgccgactggcaaacgctggcgcagatgccatcgctcggcggcgcagcttcccgactgatggatatcaacggtgacggccatctggagtggctggtggcgcagcctgcgctggccggcttttttacccaacagccggataaaagctggagcgggtttaccccttttagcgcgctgccggtggagtttttccatcctcaggctcagtttgcgtcgctggttggcagcgggctggccgatctggtgctgatcgggccgaaaagcgtgcggctgtatgcaaacgttggagtcgggtttgatgccgggctgacggtgacgcaggatgatggcgtcacgctgccggtaccagggcgcgatgcccgcgagctggtcgccttcgccgatgtgctgggctccggccagtctcacctaatccgtatccgttatgatgctgtcacctgctggcccaatctggggcgcggacgctttggcgcgccgttcaacctgccgctaccggcaccgctggacgatgcatattgtttcgatcccgcccgcctgatgctggccgatctggacggtagcggcgcggtggatattctctacgcccacgccgatcgtattgatgtgtacctgaaccagagcggcaataggttgattgccggagcgtcgctgccgctgccggacggtgtcgtctatgaccgcctgtgtcagcttgatgtggcggacgtttccggcaacggcatggccgaactggtgctgtcggtaccgcatatgacgccttgccactggcgctaccgtttcaatagcgtgaaaccctatctgctgaatacgctgaataacaatatgggagcgcagcgttccctgagctggcgcagttcggcgcaggagtggctggatgagaaacaggaagcgccgcaggcgatccctgcgctgccgttcgccgtaccggtgctggtgaaaagcaccactcttgatgagatcaccggcaataccctgagccagagctaccgctatcgccagggcgtgtatgacgggcaggagagagagtttcgcggttttggctatctggagcgcgatgacgccaatagcgatgcgctgccgacgggggacaatacgccgctggccgcgacgcagcggactaaaagctggtatcactgcgggcgcgaagaggatgaatctgcgctggcggggacgccgttcggcgccgatagccaggcggtcacgctacagcccacgcggctgactctatatcaggccggagaggatacggagctgatcgcgccggatgcgacgacgcgttactggctctatcggtcattaaaaggcacctgcctgcgcgaggaaacctacggtctggacggcagcgcgttgcaggatctgccttatcgcacgatgctacagcgtatgcaggcgcgtctggtgcagtctgcagcgacggcgtgcatcgtgacgccgttgccgctggagcaggttaacacgcagtacgagcgttttagctggcagagcgagagcgggcaggcgctgtttgacccacaggtaaggcaccaggtggcgatgcgttacgatcaatatggcgcgcgactgaatagcgtcaacgtggcctatccgcgccgcgcgccgctggacgatagcggaccaacgctggtgaatacccccgcagacgcctggcagaacagctatgactcacagcagaacgtggtgcgctataccgaatctctggcggcggtgatccacctggacgatgcgcaggcgtggcgtttgaatctaccttcgcagtcgcgtacaaatttgttgatcggcgacgttctccccgaggcggggatcagttatgaaagcctggcggcagcggatggacctttagcggtaacgcaacgccgcgatatggcgcatcagaacgaagtgatttatctggattcttatcctgccatcctggcgttgattgatcgacagcgtacggcggtactgaacgatgccgcgcttcaggcctatgagggaatgactattccggcggagtatagctttgagcttctgggctacgtctccgttcccgcggtactgtctgtatctccggaaaataacgtttgggccgtagaacatgaaaagatgagctacaacggcagcgaccggttctatctaccttccaggtatcagcatacgtcgctcagcggtgcgctaacgctgagctatgacgataacagcctgtatctcacacaaaccgaagacgtctatctcaacgttactgcaatagagtacgacgatcggttccttactccttgtcgcataaccgatatgaatggcaatgtgcaagaggtgcaactggacgcgctggggcgggtcagggccagcagctattacggtaccgagcagggagtggcgcgcggatttggcgccctggccgataaccctgtatcggtagagctggcagtcagcgctgctatcgcgatggcgctgacggaaggctatctccagcagcaggccacgattatcgccattgatgcgtttagctggatggggcaggctgatgcagcgcgttttagcgcggacgagcgtgcgcaactgctggcgctgcgttttatcaccgcggatggctatattcgcgccaaaggatggcgctgggcgcagcaggcacgctcctcgcttgcactcaggttagcagcaacgccgcgcgcgccggtaaacggcgtccagctgagcgccgataactatcccaccactttagatccgcaaagcggcgcggcgttgcagcagacgcagatcaaagtcactcatagcgatggcttcggacgtgctttacagcactgtgtacgggtgccggacggcgaagcctggcagcgaacggatgatggcgaggtggtgacggatccgctggtatccgccagcccgcgctggtcggtgtccggccgcatcgagtatgacaataaaggccagcctgtacggcagtaccagccctatttccttaacgactggcagtacgttgttgacgcctcgttacgtactcagggttatagcgatacatactattacgatgcgccgggccgggagattcgccgggtcagagcgaacggatattttcgccgcaacggctattacccctggttttccctgcttgaagatgaaaatgatacttccccggaacgggttaccgtacaaggagcgctggtatga

SEQ ID NO: 207107 - DNA, 4536 bp, Klebsiella oxytoca
atgagtattgatattgcagcatctttaaatcaacatcagcgcaacgcgttgctctcttattatcttgggcagtatgtgccgaatagcgggaatagtaaattagttgatttagtccagactccagaagatatatatgaatatttgctgattgatccgttggtgggtaattcggtgaccacttctcgagtagcacaggctatgtccagcattcagcaatatattaatggcattacgatgaatatggagccagggtataatacaggctcgctggataacgatcggcttgccttgtggaatggtggcgccagtcagtactccatttggggaggggaagttgatctggatacctatccggaaaattacctcgacccgacgctgcgccagaatcagacggcgtattttaaagcgctgattaatgatctgaatcaaaataccattactgacgataccgcgcagcaggcggtcatgaattatctgaataaattcgagcaggtagctaatctgaatgttgtgagtggttatctgaatagcactgaacagactacgggtacctattatttattaggcaaaagcaacacctcgccggtgcagtactactggcgctcgtttgatatgagccagaatgtggataacgtggtggctacccgcgcatggtcagagtggtacccgatgaacatcacgattaatgaggataagttgcagggcgccccacgtctggtatattttaataaccgcttatatctattctggtttgagaaatcaaccgctggtaatatatcgggtagcaccagcggcgaaacctatgatgagatcacggcttattcttcatactgtgattttagtaataattggtcagcaccttatactttaatgtcagtgtataatagcgacagtaatgatccttgctatgcattatttgacgcagcgtggctttgcacagcctgcggatataatcagagcggtaatgttttgactctatcgctatatgctggcgacggcgtaaaggatgatagttccgaaatcaaaggttataatgatttctctattgaaatagattattggtttaacctctcaagagtttacgctaaaagtgatagtgataatccgagtatacttgctgaatatctcttttattaccttgagaatgataattttcccggtaatcagaaaaaaattcaatcaaattatattattggtttgccagttataagccaggtgactttactccctcggcctgcatcagggcagtttattgactgttcttatgtgctccctgtacttaataaagaaaattttagcctgacttataatttagatggttcttatattcttcatggcaatattccccaggcggttgctactgatgcgtattataaaaacatttctgatgttatgctgggtgctgatggcacaactgctcttaatggagaaatgacaacggattcatgctggaatggtttgtcggaaaccagttcggatattaaatttaaaaacaccaagataacttgttctaaagattatggtagtgtaaacattttgcagctagtagatgtttatgattacaaagataccatcaatttacccaaggagtatgtattttcaagtaatgggtatgatatggcggaattgtggtttgacatattcgcgacaacttacggacagccttgtacgctcaatttctgttatgatgaaggtgattatcaatataccacacgttttgctttttcgtttaatccagcatcatcaggggatgcttctctatggacttttgctgcgtacgaaggcgctgctcaaggcacctggaaagtcacggcagatgaagtaattaataaaacgcaggctgcctttactatcaacgattcagcatggtcctttaatagaacgttgactccggatgatacacttgttcgctacgtctcgtttggatacatggatgcctcgggctatgcgatttatgatgaatacgaagtagcgctgcaatatgcagaaaccatccccgtcaccccaacgattacgactcgagccgatagcgaacttgggaccgccgtgttcctggcgtttactggcaatttcgacaatggtaccgagatctcccccattcgcctgaatacgctatttgctaaagagttgataaacaaagccaacgttagcatcgacgatctattaacctgggatactcagctaacgctggagcctgcactgatggacggcgggcctgatactccgatggattttagcggcgccaatggactctatttctgggagctttttttccatatgccctggctagtagcatatcgtctgtaccaggagaggcagtttgccgaggcgcagcagtggtataacgctattttcaacccgtcggctcgtggccgggtgagcgctaacccggattatcctgagcccgactactggagcgtacgtccgctggtggagacgtcttcttcagcagcccaggcgagcgcggtctggctaaccaccgatccggatgcgctggccgttgccgatccagtccactaccagaaagcgattttcatggcctatgtcgccaacctgatggcggctgccgatgccagctatcgtttgcaaaccagcgatggcctgagcctggcgcgcctgcaatacggtcaggtgaaagacctgcttgggatgcgcccggatctcaccatcctgaaccagtggctcccttgtactctgcaagaggctgccgacagcctgagcgccagcgaatcgctgcgccagttcgcaaaaacggacgctgcgttccctctgttttctggtcggttcagcgcggcttccaccgtcgctaccagcgacagatttatggctccgctcaatgcgcagcttctgagctactggaatacgctggattcacgactctataacctgcaccacagcctgacgattgacgggcagccgatgacggtgccgctttatgcgccgctagtgaatcccgcaaacttgatgacgcagagcattcagggcggatcgttaacctgcagcgcgaataaccttgccacgagcataccgccataccgttttagcgtgatgctgcagcgcgccaaaagcgccgcagcgacgctgggacaattagggcaaacgctgctgagctactgcgaacgcggcgatagtaccagtctgcaagagctaaaccagcagcagttgctggatatctccggctttagtattgcgctccagcagaacgcgctggatgcactggatcaggatcggcagactctgcttgccagccgcaccttaacccaggatcgactgaactattaccagaatctactgacggcgggcaatctggcggatgagaataacgccctacagcgcttgcaaggcgctatcaacgatatgaatgcctcgatggggctgattaccgccggcgcggcgatgaatatggcgccgaatatcttcggcctggcggatggcggcgatgtctggggagccgctgtcgaggccagcggcgcggtcacgcaggcgctggcgatggtggaaagtacgcaggcgcagaaattccagctttcggcggaataccgccgccgggccgatgagtggcagttccaggcagatcaggcgcaggatgaaattaatcaaatcaacgcgcagctggatgggctgactattcgccagcagggggcgcagacttctcttcaactggcccaggcacaacagaataacgtgcagtcaatgttaaccttcctgacgactcgcttcacccagtcttcactgtatacctggcttaccgggcagctatcagcgctgtactaccaggcctatgacgctgtgctgtcgctatgtcaaagcgcggaagcgtgctggcagtatgaaatgggcgatgttaccacccgctttattcagactaatgcctggaacgatagctaccgtggcctgctggtcggggagacgttgcagcttaacctgcaacagatggagtcggcatggttgacgcgcaaccagcgccgtctggagctgacaaaaaccatctcgttgcagcaactgcttggggatagcgcatttgccgatctcattaccaacggtaccgccagctttaccttgagtgaatcgctgtttgataacgactatccgggccactatttgcgtcaaattaagtttgtcacgctgacgcttccgacgctggtggggccatatcaggatgtacgtgcgacgctgacgcagaccagcagcaatacgctgcttaaagcggatatcaatggtgtgaattaccttaatgatagcagtacaggcaacgcgaataacatcgtgaccaacctgcgtgccagccagcaggtagcggtctcctcggggctgaacgatggcggcctgtttgtactgagcttcggcgatgagcgatatctgccttttgagggaaccggcgccgtctcatcatggaccctggcattcccgaataaagcaagtgatgaacagcaggcattattgaacaacctgagcgacgtgattgtgcaggtgcattacaccgcgctgtacggcggcggcagctttgaacaggcggtcgcgcagacgctggcataa

SEQ ID NO: 207108 - DNA, 3618 bp, Klebsiella oxytoca
atgaatatgcctgatggcggagcccttgctcaaatagaaaaattgctccgggtttctcccggaacgtttgtggaaaataaatatttctccatttttgatattatcagtcaatcccggcaggaatttatttctgcgaacctatcctggttgggtaatcggggaaataaagtctatgatctggcgttaggacaggcggagtatattcgtcgtttgtttagaaagaataaaacgacttcgcacgtaaaaaatacgcttcaggccacgcaaagcggagcggccatcaaaaataatacctgcaggctcaatgagcagggactcatgcagaatggccccacgtggcaaaaccagtttggtgaagactggaagacgtactgtcagtcgggggccccggaagcctatgactctccggtaagctatttgagctggctatatcagcaggcgttaatctacgagcaggaaatggtttcggctggcggtgatattattccgctttctgaacgccgcccggatctggcgatgatgacgatcgataatgacgcggtaaatcaggtcgttccgacgctgcagctggtgaatgaaatccttgaagagtcgctgtccaccgctattcctcagggcggtacgatggatagaactctggcgacaacccgttacccgactcttttgccttatcacttccctcacgatcaggtgatgctggcattgcagaatgcccaggttcctcttgagacaatcgtcagccagacggatagcggctggccctggttcctgagcgatacgttaactggtgccagaagcgtgcaagccgcagagctggcaagcaagctggcaccagaacaaatggtcattgtcaccgaagcggataacagcgctgcaggcgatatgagcggcttttataaagcggatcttggactggacacggaggattattcaccgtttgcggatgcgctaacatttgcagaacagttaacgatcaccgcttctcagcaggaatatctgctggcccgaggtccaggtggtacaaccgtagtcacatccgagaacttcctcccatcagggggtaatcagcgctcctctgattctgatgtctatggcgccagatttattaaccagggtgcaggagagggggtggttggactcgtcttcaatgatgagagcagcccagaacgcgatatgattggcggtacagatcttgttattagcgacgctggtgtgaagggtaccgatggaagattcagtaccgccatctccgtggacgcgacgcagggagcagaggtatttctcccttatgatatgagctacgatggcactgaggtcgtcgatttcacgctttctttttggttccgggtgcacagtgatattaaagatagcgctaccgtcgtgatgaataagaccgggacttattcaggcaatgctaccggcattgcgttgttaacttccttatctgaacatgatgtttcgctggaactatcggtttacggtggagaactctattcgaagatgacggaaactattcctgtcgatacgtgggtgtttttttcaatagtacatgatactaccagcaaacatcttactggttattactgcacggataatgtcaatcttaaaagtcttattgttgattatagcaaggcatctgcgagcatcgaattagaagataccacttggggattcaatggtaataaagggaatacccattatatgcattatcctgaacaggagtcggtaattgattttgatgatatttgcgtctggaataggcagctaaatgaacaggaaattaatatgctgctgactttgccaggcggcggtaatacgtctatggagcattattatccctgcgataccagcgtcgctggcgcgacaattactcatttatcagacgcgcgaatggatcgcatcaatcgtatggtgcgcttatgccgttggctagggatctcatttgaagaaaccgatcttctggtctgtgcctgtattaatgcgcaaggaaaagataatgtcgattttactatgaatgagcatactttgcggatgctaggggtattccgtcactggcagcaacaatacgctgtcactccatttcaatttgcagcggttctttctcaaatcacgccatacgcgatttctccggccgtaccgttcctcgatcaaattttcaactcgccatctctttttgacgaaccttttgctattaccggcgctacggtcgcgtataccgatgtttccggcgacagcgcgcgttccgtacggcaactgtgtgccggtctggggattagcgaagcggaattccgcgtgctggcagatatggtcgccgcgcagcagggggacgccacggcgcggaccttcccgctgaccctggacgtggtatcggccttatatcgcatgacgatggtaccgcgctggctgggtttgtcgtttgctgaaggcgtggcgctgatgagcttattgccaggcgtcgaggtgtgtctggcgggggtgcctcagttggcttttgacgatgctggaaaaccgacgtcaggcgatattcttgatgcgctgatggcactggatagcgcgcgcgactgggcgaaaactcatgctctgtcatggataaaaaactatcttatcctgcagccgacgccagctcacctggctgcgtcaagcgaggcagtgaattttgtcaacggcattaagcagcaactgcccgcaacgctgctcagcgaacagagttttgccactttgccgatgccggatcagaatgacggctggacatggatgaatacgcttggcaacgtggtcgatgccgccgggctggtgcttgccgtcgctgcggactataccacgctcctcaccatggttcaggcggatatcgccggactgccgtttgccgccaatgtggatatggcccggcttgcggactcgctcgcgacgattatctggcaggcgaaacaggcccagtacggcgttgccgatagcgcgctcgcgcagctgtttaatacccgacagtcgctctcggccttccttctgcaatgggaaaacgacactgaatatcgtctgctggtggacacgctagcaataaatagcggatatagcgtcagcgatcccacgaccatcacctgggactatttatcccacctctaccagcttggcctgcgtgcaggtacggtcgcccagtttcagctcaccccggcaacactcagcgtattcctggagcatcctgattggtttggcgtgacggatacctccctgacgctggcgctactccagcgctttagccgctatcttgattggctggggttggccggcaaagaggatgctgttttggcctatctcaactgggtcaatgccgttacgccgccacaggccagttcggccgcacaagcgctgggtgcgctgctggcgtgggacagcagcgaagtagagctggccactgctcgctttaccgacggtatagcgaagcgcgtgaatgaagtggattacgtgatgcgcctgcaaagcctggcgacggatacgggactgtcggtgacgccgctgctcaataccggcgcgctggtcgtaggctcggtgaatgacacctgggacgcctggcaatcggcaggtgaatcattagttgcggcccaaacgctagtctcagcgtaa

SEQ ID NO: 207109 - DNA, 384 bp, Klebsiella oxytoca
atgaatgtatttaaatttagtaaagccagtctggcaaaactccaaggggtgcatggtgatttaatttccattgcccagcgcgcgctgttattaacgccgattgattttagcgttactgaaggcgtcagaactcaggagcggcaaaggcagctctatgaacaacataaaacgccaacgctcaatagccgccatttaacgggacacgctattgatgtgctagcctggcacggttcaacctgctcctggtattttcctgattatgagttaattgctgtagcgtttaagcaggcagcccatgaactggggctggaagtggaatggggaggggactggaaatcacaagacggagtgcattttcagctaagctggaaaagctatccttaa

SEQ ID NO: 207110 - DNA, 285 bp, Klebsiella oxytoca
atgaagttgctcatgatgcctgtgctgataaatatctgcttttgtctgttaattattatcaggatcgcattctggagaagaaacggcaaacgctatcgtccgtttatctctctggtagcctggatgctggcggtttcctgctgtgcggtaatagtgagccttatgtcaggatattatcgcatagctgactgggcggaaacgctgattaatggattattgtgtgcagctgtttattactgttctgggaatattgcccacttatttagagtcaggatgaaatcatga

SEQ ID NO: 207111 - DNA, 375 bp, Klebsiella oxytoca
atggacgcgataggtttaaaagattcaatgcaattgacagctttattttctacaggagagaatccgctgtggatcgtcactggtgcgtttgccgggagtattatatttattgtctcagcaactgaacactcgcaatggataaagtttgcattatttacagcttccatgattaccggttttttatctgcagattgcatggcgtcgatgatgtcatacattatctcaaaatattttgaattctcattttcggcaccttcgccagtcggtgcgttagtttcatcggcgatctcagtcagggctttaatgtatgtcagtaaaaaacatgacaaatctgttttgttgttagagaaattcgttaagggaattaaaaaatga

SEQ ID NO: 207112 - DNA, 855 bp, Klebsiella oxytoca
atggaaatttttttatctaaaaaactacgctatttcatggtaataatggagacccgcaatttcagtaaagccgccgatgcgctttgcatcacccgctcaccgttaagtaaagttatttctgaactagagcagaaccttggtgatattttatttattcgcaaacataatgaactatcccccaccagcctggcctgggcatgttataacaaatgcaaaccgttttatgatagcttgcgttcaatggaagatgattataaaataaaagctaatcaaaaaccgatctcaatcatttttgacatcagtattcctgagcttttattcaggcacgtggagatgatcgctaaacttgagcagctatatgtcgaattaaaaagagaacttattacaaccgacaccctttacaaccttcagcactcagagaatcatgctataatctcttttcgagaactaggccgcagttctaacattaaatataatacatgggaagcgtgtgaagttgttctgttaagttcgcaacatgccaaaaacaataacagttgtaacgagctgcatatctggaaagataattacatcaattactttaaaggtatttattctgcaattcttgccgacatcaatattgaaccagtttttattgaacacaactttgatatttctacccttctttattctgtacgttcaggaaaaggtatggcgctaatgccatacaaaatgtcgactctttataaaatagaaggaacacgcattcaggtatttaaagattatcatatcaaatgccatctttattataatatcgataaaaatcaagggaaaactctggagggatttaaaaaagtattagcgcaatttatttaa

SEQ ID NO: 207113 - DNA, 876 bp, Klebsiella oxytoca
atgacctctgacaaaaccctaaagcaagcgatatcaaatatcactatctggcgcaaaggcgaacagcgtgcgccacataagccattattgctgctgcacgtcctctcacactatcggcagggtcatgatcgcctgtttaactatggttctgaaatctacgagcccttgttggatcttctggaacgttatggaccgcagcgccgtgaccagcgcccggacatgccgttctggcgtctgaagggcgatggcttctgggaactacaaaacgcggaactgtgctcaaccaatggtagccgccagccgccccgacgtgaactcatcgaatataatgtcgcgggtggatttgatgccgatagttttgcgttggtggcaaaaaatcacaggttaattgatacgctggcgcagcagcttctggaggcacatttcccggccagtattcaggaagacatcgctgatgagatggggtttgatattcgcacctctctccgtcaacgcgatccgaagtttcgtcagatggtgctacgtgcttacaattatcagtgcgcgatctgcggcttcaacatgcgccacgacaatgcgccaattgccctggaagctgcccatatcagatggaagcagaaccatggcccttgtgaagtacctaatggcttggcattgtgcgcaatccatcataaagcttttgatcgtggttcgattggtttggatgaaaatatgtgtgtgatggtttccggcgcagtaaatggtggcggggtggtgcagcggctgttctgggattttgcgggaaaggcgattgcgttgccaccgattaaagaaaattatcctggcgagcggtttgtggaatggcatagggaagaggtgtttagaggagagcattga

SEQ ID NO: 207114 - DNA, 1023 bp, Klebsiella oxytoca
atgctctgtatttcgctgtggtataatagttgcgcaattgataaaagggagcgttacatcgtgaaaattgttttcgaggttaatggaaagaaagtcccactaaaatctttaaaatacataagcaaaaaagatcaactcgaagtaatgaaaaactggttctttgaaaactttgaagatccggcaaatgcttgtccgtatgaaagtagagaaggtggctatgcttacatatatggcgggccgtatgatgcgagcgaagaactacaatccatcttcgatcaatatgttaaatctgagtatatcgaggaattagtagatgacttacaaacacaatgttttgactggtctggaaattcaaataatatagatgattggtacgatgatgatatctatgacgctgtaacgtcttccggcaatccgtatttaaaattcattgacaatatcgataaaataaaaaaactcgcaaaagataaaactgaacaacagcaaaaagaccacttgcttagtttgctctacacgaatgttattacagctttggaaacgctttatgttgaactattcattaactctatagagaaagatgatgtttacatagccaattgtatagaaaaaggtaagactgaatttaaagtaagcaaagatattgctgcgttgcctttcaagggtgaacccatcgagaaaattaggggagagctaatcaggtcaatcaaggaacacttgatcagtgcaagctggcatagcactaaaaaggtaatcgaccgctatgaagctacattcgatataaaagtacaaaaagactgtccgatagaagctattgaattggcaaccctcaatcgaaatcacttagtgcatcgtggtggaaaggataaagaagggaacctcgtagtgattacagaccaagctcttgaaacgctgattgaaaatgcatcgaacctggcaattatgctctacaacagtttaaatgtagcaacgaataaaactaccattttacaaccagatgacaaaccgttcattcatgaattttaa

SEQ ID NO: 207115 - DNA, 999 bp, Klebsiella oxytoca
atggatattcgcacacgaaagacaaaatttttagagtcgttagattcaactgaagtgatacgcaaagcagtaagtctcgctatagattgcattattgataataatagtaatgaagatacccccttagttattaccagctatgatgatttctgtagaatccaggtgctaaattatgtacaggaattttgcgaggctgcattccccgatatggatgaatattactttaatcctaacatacttcgcatcaacggcaagactagtgaagaagcttgtattaacttaattaaactcttaagaagtacaaaaggcatactattctggtcagatgcctcatcgtggttcgctagcctccccgacggattattccatgttgttaacattgatcaaaaaatcgttactcgcggccttaataagaaaggctctaagccaacaataatcaataaagagtacagcgtagatacactactatcagagctatttttaaatggcgcacacatggagcaaaccaacgtacgcaacgtttctgatggagacatgaagttctatgatgaatgccatgctggattaatcagaccaatacccgctccaataggcgcgtcatacgatgaagagatcacaattaattctcctgattggcaaaagctcgcgtgtgtagctttacgccgctatcagtcgaaggaatgtcatgacggaatgcaatgggatacaaccgatcatggttggactgatgtaatcgcgtatccattcatcgaagaaatacaatcaatggacaatagtggttatcgacaatgtttagttgggctagtcacaataaacaattcaaatgcaaattccccgtacctatctaccgtttggatacatccattttatcgcaggggaaggttattaagtaagttatggccaaaattacaaaagttatatggaagtaacttcgaaattgagcaacctaatgaaaatatgaaagcatttttgaaaagtgtgaaacacgcagattactaa

SEQ ID NO: 207116 - DNA, 771 bp, Klebsiella oxytoca
atggaatacgtggcttttggtgatgagagtggtacgacagggagtgaccgctgttatggcattggtttgctgtgtgtgcgtaaagacacgttgcacatcttcaatgagcgcgtccagaaattaaaagataagtacgggattgtcggtgagttgaagtggtccaagattaagaacagtgcagggcaggcaaacatctgcattgagctactggctatggtgctcaagaactcgtgctgcttccactcaattgttgtagttaagaacatttacaacaactggcagacggacagggagttggctttttaccagacgtacacaatgctcgttaagaacgttgctaagcagattaaaagtgacgttgaggtgatcatcgaccagaagattgataaatacaaaaagaacgatgaagtgacaggtattgttgctaacaacatgctggctagggcagggatgaagaagctggttaagtctgtgacgatgcacgactctaagcatcatcttggattacaggttgtcgacattctgaccggagctgtgaactctgggtacttgaagtaccttaatcctcggctagaactatcagtagctaaggagcttgcctttgaacgtatggctgctctgcttggctgggattttttccattatgatacattcccgaataaggattttaatatctggcatttcccgcaagagatgcgagctatgccgggttcaaagagtattcgacctgattacagcgttccattggttaatcgggaagagctgccctaa

SEQ ID NO: 207117 - DNA, 2457 bp, Klebsiella oxytoca
atggccaaaatgattccggcattcggacccattgataatgatagttatggagaaaaaacggtctatgccctattaaaagaagggctgtccgatgatttcaccgtaattcatagtctcccgtggttgagttcggcggcccggcatttgggtatgaaactacccccaagtggagaaatagattttcttgttctccatcgtatctatggtgttctggctttagaggtaaaaagtgggatatatcgcgtagatggccctatttttgtacatctaaaaactaataataatgtcgatgtagtgaagcaaacacgtaacaatgttcatggattagcccgttggttaggaggagcaacaacgttacgattgcgtattggttatggttttatttttcctgatagttatttcgataataacgttataaatacagcaatggttgatgcgtctgtaagaccatttagaaaaatattcgttgataaaagccaactcccggaaattgcaaagtacactattgagataatgcactattggaaatctgcattagaaaataatgatttaggaagtgaacgacttcaattaataataaaatctatatgcccgcaatttgatgggacgcctgactggggaacccgaattatttatgataatcagctctggttaagactcacacatgaacaaattaaagtcattgaactgctgtcagaatatcaacgatttgttgtgactggatggccaggaacaggaaagactttgattggaattgaattcgccaggcggttggttaaagaacaaaaaaaagttttatttattactttcaataaccgtctttctgaatacattcgacaacaaactccagtttcattatgcgatgtttttacctggcacaaactatgtcatcaggctcgtaatagattagccctgcctcccgagtctccagctggctggtttgaatcaggatgctgcgaggatttacttagtgcattaaagaaaaacaagctaaaggattatgatgctttaattattgacgaagcacaggcgttacattcttcgtggttggaaaccttatttttttggtttgaaaataaaagaattattgcattttgtgatgaaacccaaacgttctcttttgaaaaagggacgaatcacattgatcttcaacggataattaattcccaattttccttcagcttgactattgttttaagatgtcctaaagctgttactgattatttaatggctatcaggccttcatcatatcaaattacgtctcccagaaataacgaaccagatacgttaaaagaattagttgttatcgatccactttccacattgcttaatgaaatcttacgactgaaagaaagttctgtgccatctgatgagataaccgtccttgtccctacggatttagtgaaaaacttcctccagaaagacataaaaacttttgatataaatattgaaactgtatctcgttttcgtggtatggaatcacctgttgttattacactggactcctcaaatatggaggatgctcaattattttgtgcttattcaagagccacgactgcttttattgcaatttatgactccgagaaattagcatggagagaaaataatacttttttgcaacagctggttaatagaaaagaaacccagagggcaattaccgaagccaagcataactcctcatccaaagttcttatggctaattttttcataaaaggggacctgaaacttaacagtgtaaaattagcatggtcagaagatctttcttcgtggcttattgagtttgatgcagaaaattcaccagcggaaacatgggttgattacttatactctcattatacttggcctattatatattggtccgtaaactcacgaagagttgtttattacattacaaatcaacaattcgatttaaacacattaggcgtagggacaagtttatcaataaaaaattgtgccgtatgtgaaaagatcataccttttgattctgagaataattgtttgctttgcaataagaaaactgaagaatcgtcaccaaccagacatgaaattaatgaaattcgcgactttgatttaacaatctctcaggataattttaattcagctgttcaaaaagaaaagagacgattattacccataccgttagcggcggctagtgcccgaagagtggcatttgaaaaggcatatagaagtaaagtactcagcgaatcattacccggcggaaaacttctctacagaagtgcattagcattgatacaggcttgggttgcgttattaccaccagataaaaccctagtattggatgagataacagacgcattacgtaaacgctatatccatcttgagcaattagatcgatctgaattaaggaatgctttagcctgtgcactgtcaacttgctacaataaaaagcatcttattaaagttgaaaaagggaaatatttacctgttgacgactaa

SEQ ID NO: 207118 - DNA, 3135 bp, Klebsiella oxytoca
atgctgactgaagacgacttagaacagctttgcctgggctggtttgccgaacaaggctgggaaattcatcacgggccggatattgccccggatggcagtgacccgcaacgcgccagttatcatgatgtattcctgacgcccgtgttaacctcctgcctgcaaaaaatcaacccgcatctgcccgcagacgtcttcgaacaggttgtatcccgtattactcgtgctgaaagtccggatcagattgccagtaacaaagccttccatcactggctgctagaaggggtaccggttcagtaccgccgcgacgaagaacttatccacgatcacgctctgctggtggattttaaccagccgcaaaacaaccgttttatggtggtcaatcaaatgaccatcagcggaacgaaacagcctcgtcgcccggatatcatctgctttattaacggactacctctggcggttgtggagctgaaaagccccatcgacgataaagtagatatctgggatgcctaccaccagttacagacctataaagatgaaattcgcgatctgtttatcagcaatgaagcgctgattgtcagcgatggctatctggcgcgtgtgggttccctgacggccacggaagaacgttttatgccgtggaaggccatcagcaatgaaaatgataagcctctactggaatggcaactggaaactatggtgcgggggttctgtaaccgggaactgctgctcgactatattcgttacttcgttttgttcgagaacaacgatgaaaggctgattaaaaaaatagccggttatcaccagttccacgcggtgcgcgaggccgtgcaggcgacaattgtcgctgctaccggtaagcaactggccctgcgcagcaacattcagccaggcagtaagaaagcaggtgtggtctggcatacacagggttccggtaaaagcatctccatgtgttgttatgtcggcaaactgctacaacagccggagatgggcaacccaacgattgtggtcgtcaccgatcgtaacgatctggacggtcagctttacggcacattctgtcaggcgcaggaactgctcaagcaaatgccggtacaggcggatgatcgcgaagcactgcgtgaactgcttgcgacgcgtgatgctggtggcattatctttaccactgtgcagaagttctccccagaggaaggggaaaacgcccatccggttctcaatgggcgcagcaatatcgttgttatttccgatgaagcgcaccgcagccagtacggcatgaaagccaacctggaccgggaaaccggcgtctataaatacggttacgctaaacatatgcgcgacgcgctgcccaacgcctcatttcttgggtttaccggaacaccggtttcggcagaagatcgcgatacccgcgctgtatttggcgattacgtctcgatttatgatattcaggacgcggtggatgatggcgcaacggtgcctattcactacgaatcccggctggcgaaactcgatctcaatcatggagaactggcggcgctctctgaccaggttgatgaactgattgaagatgatgaactggacctgcgtgagaaaaccaaaggtgaatggagccgtctggagaaactggttggtgctaaacctcgtctccagcaggttgccgccgatctgatatctcactttgagaagcgcaataccgtaatggacggcaaggcgatgattgtcgcgatgagccgtgaaatctgcgtccatctttacgatgaaattatcgcactacgcccggagtggcacaatgacgatcctgaaaaaggacaaatcaaaatcgtgatgaccggtacagcgtccgataaggcaatgctgcaaccgcatatctacaacaagcgaactaaaaaacggctggagtcccgtttcaagaatgtgaacgatccgctgaagctggtgattgtgcgcgatatgtggctgaccggcttcgacgccccctgctgtcacactatgtatattgacaagccaatgcgcggacataacctgatgcaggccattgcccgcgtcaaccgggtatttaaagataaacccggcgggctggtggttgattacatcggaatcgccaatgaactgaaactggcgctgaaaacctataccgatgcaaatggtaaaggcgatgcgaccattaatgccgaagaagcgctggcaatcatgctggaaaagctggacatcatccacggtatgtttgccaaaacagcaacgtcagcgggttttgactacaccggctttgaagctcacgcacaaaagctgttggtgcctgttgcaaactacgtgctcggccttgaggacggtaagaagcgttttcttgataacgtactggcgattactaaagcctggtcgctttgctgtacgctggatgcggcgcagccttataaactggagattgctttcttgtctgcggtgaaggccgctatcagtaaattcaccagcgtggacaaaaaaataagccaggccgagaagaactccgcactgaaacagattctggataatgccgtaattgcgaatggcgtggatgatattttcacgctagccgggctggataagcccaatattggcttactttctgatgagtttttgcaggaagtccacgatatgccatatcgcaacctggcggtagagttgctggaaaaactgattaatgatggtatccagtcccgcactaaaaataacgtagtgcaggagaagaagtattctgaacgtcttcaggccgtgctgattaaatacaacaaccgggctattgagacggcgcaggtgattgaagagcttatacagatggcgaaggactttcagtccgcaatggcgcgtgatgatgcacttggcctgaatcctgacgagatcgccttctacgacgcactggctgaaaacgaaagcgccgtccgagagttaggggatgaggtacttaagaagctggcgatagaagtgacactaaagctgcggcaatctacaaccgtagactggcaggtacgggaaagcgttcgtgcaaggttgcgtatcctggttcgacagactctgcgtcggtataaatatccgccggataaaacagcgggtgcggtggagttaatattaaaacaagcggaagttatttcgaatcactggacgatgtaa

SEQ ID NO: 207119 - DNA, 1197 bp, Klebsiella oxytoca
atgtttaaagtcgatcagcccagcaatagcctgcaaccgctccaggaaaccaccttcactaacgctggtttcaccgaacgttaccacttgcaggagtggttggcaaagcatccacaggcgttgactcgcaacagtgatgatgaactacttatcatccagaaagagtttgccgggtttgacgacaccaaagagcggcttgatctactggcgatcgacaaagacggtaatctggtgatcattgagaacaaactcgacgattccggtcgtgatgtcgtctggcaggcgctgaaatatgcgggttactgtgcgaacctgcgcaaagaacatatcgtagagatcttccagcgttaccttgatcagaacgaaccagaagaaacgcgtcctgcggctgacgtgctcgctgaatttcttgagcacgatagcctggaagaggtgcaaattaaccagaatcgttcacagcgtatcatgatggtcgcagcaaatttccgcaaagaagcaaccaataccgcactctggttaatgcagttcaatattcgcgtacagtgctttaaggtcacaccttaccgttatggtaacgatgtgtttattgatatcaagcaggttatcccaacgccggaagcggaatcttatatgatcggtatggcgcagaaagaggctgaggagcagtccacgactggagaatccaaagctcgccaccatttacgtaaggcgttctggacccaggctctggagaaattccgcgttagctcatgttcactctacaataatatcagcccgtcaaccgaccactggttaagcgcaggttctggcatcagtggcgtttcgtacaatcttatcttcagcaaaaaagaaattagggttgagctttggattgccaaaccgtcagcacaaaccaatacattcgcatttgactggcttcatgaacgcaaatcagctatcgaaaatcgctttgagcatgaaattgtttggcaggccttaccggataagaaatcctgtcgtattacttacagaaaacccatcaatggcatcgcagatcaggaaaagtggccggagatggtcgactggttggtagaacatatgacggcatttgaaaaagccttttcaacatgtctaccggaacttaatcagttgattaagcgaacctttaatgggcatgatgaagctgaaattaccactgaagaagccgaacacgtttaa

SEQ ID NO: 207120 - DNA, 1323 bp, Klebsiella oxytoca
atgaatgctaattgggagataaaaaaactaggagatataataacattacagaggggccatgatcttccttctcaggatcggaaacatggtcaagtacccattatgggatcttcagggatcactggttatcataatcaattcaaagcgaaaggccccggggtaattatcggacgcagcggtaattccatggggcaggtttcttatatctcagaaaattattggcctttgaatacttgtctttatgttactgatttcaaaggtaactgcccagagtttatttattactttcttaaacaaataaattttgaacaatttaattctggaagcgcccagaaatctttgaatagaaatgctgtttacccttttgaggttaaattccctacttcctacaaagttcagtcaaaaattgcatcaactctttttgctttagagaataaaataaatttaaatcaagatatcaaccaaaccctcgaacaaatggcacaagccctgttcaaaagttggtttgtcgattttgaaccagttaaagccaaaattgcggtactggaagcgggcggttcacaggaagatgcagcacttgctgccatgacagcaatttctggaaaggatgctgattctttgaccgtatttgagcaagagcatcctgaaaaatatgctgaactcagggctacggcagagttgttcccgtctacaatgcaggatattgaatccgttaaaatacctgaaggttggtatttagttccattaagaaaaattgcttctttcgcatctgggaaaagtaatgtatctgagttaaccaaagatacatatatctctactgaaaatatgcttgttaacaaaatgggaatagagtgcgctacatcattaccttcagctagtacaacaccatcttttaatcctggacatattttaatttcaaacatacgcccttattttaaaaaaatctggcttgccagatttttaggggggcgttctgcggatgttttagctttcgagcataaaaaacacattacagccgaatatttatacaacattctttaccaagactcattttttgactttatgatgcaaacctcaaaaggtgtgaaaatgcccaggggagacaaaaaagccataatggaatggtcatgcatagagcctgatatacgattagttaaacttttctcaaataaagtgaaagagttttattcttatattgaaagtcataatagagaaaataccctgctctcacaattacgcgataccctcctccccaaactcctttccggcgaaatcatccttccggaagtcgaggaattagcaaaggaagctgactatgtttaa

SEQ ID NO: 207121 - DNA, 1707 bp, Klebsiella oxytoca
atggacaacgctgaacagcaatttctgaacgatctggatactaaattctggaaagccgcagataagctacgcgccaatatggatgcggccaactacaagcatgtggtactggggctaatctttctgaagtatgtttcagatgcctttgacgcccgtaagaaggaactgaaagggctgtttgaagacaagtccaacccagacaacatttacgcgctgtctcgtgacgattacgacacggaagaggcgtaccagcaggcgattgcagaagagctggaagttcaggattactacactgagaaaaacgtcttctgggtaccaaaactggctcgctgggaaacgctcaaaaccaatgctgctctacctgtaggggcgattcttgggaaagacgatagcggcaaagatatcgtcatgacgtcagtatcaaagctgattgatatcgctctggatactatcgaaaacagcaacccgaaactgaaaaacatccttaaccgtatcgggcactatcagcttggtaacgaactgttaatcagcctgattaacgttttctccgataccagttttagcgaacctaaatacaacggtgtgaagctcaatctgaagagcaaagatattctcggtcacgtttacgaatatttcctcggtcagtttgcgctggcggaaggcaaacagggcggccagtattacaccccaaaaagcatcgtgacgctgattgttgaaatgctccagccctacaatggccgcgtttatgacccagcgatgggatccggcggtttcttcgtctccagcgatcgctttatcgaagcgcatgccgatgaaaagcattacaacgccgccgagcaaaagcgcaatatctccgtttatgggcaggagtccaaccctaccacctggcgtctggctgcgatgaatatggtaattcgcggcatcgattttaactttggtaaacaaaacgccgatacgtttctgaacgaccagcatccggatctgcgtgccgattttgttatggctaacccacccttcaatatgaaagagtggtggaatgcgaagctggaagatgacgtccgctggcagtacggcacaccgccacagggtaacgccaactttgcctggatgcagcacatgatccaccatctggctccgaaaggttcgatggcactcttgctagcaaacggatcgatgagttccaataccaacagtgaaggtgaaatccgccgggcgattatcgaggcggatctggttgagtgcatggtggcgctgccgggacaactgtttaccaacacccaaatcccggcctgtatctggctgctgaccaaagacaaatcaggcggtaatggtaaggctcatcgtaaaggtgaggttctatttattgatgctcgccagattggctttatgaaagatcgcgtattacgcgacttttcgacggatgatatcaggaagattgccgatactttccatgcttggcagacggataaagattataaagatgaagctggtttctgctttgcggccacgctggacgatataaagaaaaatgattttgttctgacccctggtcgctatgtcggagcggttgaacaggacgaagatgacgagccgtttgcggagaaaatgacgcgactgacaatccagctaaaagatcagtttgaaaacagtgtaaaacttgaaacgcagattaaggcaaaccttaagggatttggttatgaatgctaa

SEQ ID NO: 207122 - DNA, 291 bp, Klebsiella oxytoca
atgaaacaagccaagaaaatacatgctatgaaagtggcggagtatcgttcatgcatcaccatgttcaaagtgtattgggacggtttacaaggatgctgtagtgatgctgagcggtatgtctggcgcgggcgagcaattacacagttaaataaagtagcatcgctcccctgtccccgagccacaccagaagacagagagaagtttgaacgggcctgtgagcgtcttcagcagtgcatcgatagaatcacatcagaaggtcagtggcatgattgcattaatcagaaaaagtaa

SEQ ID NO: 207123 - DNA, 636 bp, Klebsiella oxytoca
atgctgaaccatctctgccttgactggagtcaggccccttttaatgaaaagtatcttcaggctattatcaataccatggataatgcgctaatgcagcatcatagaaccttggccgtgcgtgttgatttacgattacctgaatatcgcgatatcggagatagtataagttgcacacctaatataacgcgagggttgctatcccgattcatccggtcagcgcagtcaaagattgacgcatttcaaaagcgccaggcaaagcagagtaaaagaattaatccatgcaaacttcgttatctctgggttaaggaaatagccgatgccagtaaaccacatttccatgttgtcctgtttgtgaataaagatatttttcgtgggcttggggattttttgcatacaggagataacttgggctcgttcattcaggatgcctggctaagtgcgttaggattagaggattaccctgaatacaggcaacttgtgcattttccagttaatcctttatacgtgctggatattaatgccgctaacttccagcaggcctgcaacgcgttaacatttcggattagttatttcgctaaagaatacactaaagtttacgacgcctacgaacgctcaatcggctacagccagcattag

SEQ ID NO: 207124 - DNA, 258 bp, Klebsiella oxytoca
atgacaataaaaactgacacaaatgagattaaagaagcgaacgcccattcagtgttgaatagccaactcgttgatatggcatttattacaatgtttacaggcatgacagataagtggatatacaaacaagtccagctaggtttattgcctaaaccaattaaactgggccgtagttcgcgctggcttaaaagcgaagtagaagagtgggtaaatagtcgaattatagcttcgcgagggagtgataaaaaacgctcttaa

SEQ ID NO: 207125 - DNA, 1593 bp, Klebsiella oxytoca
atgttaaataaaatcaaagccttattttcccttacgccagctgtcacagaaccattcgataaactccctgtttcggtgccgacggggtatttctctccggttaaggctgaagaactggtcattaccgcattacgccaggatgccctgcagaaaatccgggaaaataatgcgctgtcggcaggagtataccagcgtctttatctggcaccggtgtaccacatacttgaacggacccagaacgtgccggcggcacctgatggcgagtgggcgtatgccggaggttttggtgatttaagcctgcgttttaccgcttatgccgtcaggcttgcccgggggtatatgtttccgccaggcgcggcaccggaagaacaggccgctcagggcgttatctggcaggccgttattttctgggctgcgttgtgttatcacctgccgttactgggcagtattgaaggcgaaaccaccggcggcgttaactggcaaccgggtatatctgtgccggatgcgccttatcgcttccggtttcgtccttctccccctgacgcgcatgatgcttctgctctggcggcgctggccgccggtcagttgatacccactgaagcgataaactggctttcaggtaccccggcagcgttgtttagtcttgcctgtgcattacgcaatggttctcctgatatgcccctcatcaggacgttgctcgaccaggcggcagagaaggttggctcgccagtactccggaaagagactggtggatcttctgtggtaattgcgccgccagattcggtaacgtcacaggaggggatgttggtcgttcagacggacgataacttatcctcttctgcagtagagctggccgcttcggagctgatgacgtcactcaacgatactggtgatggggacagccagccaccgctgaacggggtaagtacagtggagtcgccggaagaactggataacgccagcccgggcctgggggatgccgatatgctgctcagtcttttttccgcagtggcggatgcagaagtcccggaggttacagatgacgccagtgtgaatacgccagccacggtagcgccggatgaaaccgtggtggtcatcgggaaagacgctcccgaagagtctgctgagacggaagagtccttccggcatagcgataccgatgccggtggtcggttgcctggcacacatgaagagcagagtcacccgactaatgtcggtgctgatgcccgacggtcgggtgaggtgtttctcgcctggctgtctgacggcgtggcatccggcaggatcaccgtcaaccagcatgattcacgggtgcattccgttgccggctttatttaccttctggtgccggatattttctttctttttctgaaagataccggaagtgacagccacagggaggagattcagacctcgtttgagaaactccagctccaccgtgttcgcagaggggaacgttttatccgggcgaaactgtactgctcagaaaacaaacaggggcggttcagcagggttaatggttatcttatcaaggctgtccgcctgaaaggggtgagacctacggaggacagcaaactccttttctttccatag

SEQ ID NO: 207126 - DNA, 558 bp, Klebsiella oxytoca
atggaaaccaaagcattcatatcaaaaataatcaatgagttagatgttgttaaagaatcacttcaggaagaggattgcgctaaactcattgctgccgtgcaaagcagcaagaaggtgttctgctatgggctgggccgtgcaggattttcaatgaaggcattcaccatgcgtcttatgcacatggggaaagaagtgtatttcctgactgaaaccatcacacccaattttggtgccggtgatttgtttatcgtttcatcggcctccggtgaaacagcccagttaatcgcccttgctaaaaaggcgcgccagttgggcggtaaggttgccgtactgacaaccaacagacagtcaacgatcactgaattttgtgatgtgaccgttcagattaatgccccttccaaaaatcagaaacaatcctctttctgctcttctcagccgatggcctctctttatgaacaggcactgcttattatttccgatgcactgataatgaaaatggcagcagaaagtggctctccagaggaagaattattccgacgtcatgcgactcttgaataa

SEQ ID NO: 207127 - DNA, 1518 bp, Klebsiella oxytoca
atgagcagcaaaataacatcactgtttaattttaaaaagcttcagaaattttcttctgctctgatgctgcctattgctatcttacccgcagccggattaatactggctattggtacctctttccatattgaactgcttgcaaactgcgggggtattatatttgctaacctcccgcttctgttctgtgtgggtatcgttattggcctgaccggcgacggctcatcatccctgtccgctattaccagttacatgatcctgaatgccacgatgggcacaaaactggggatcacacctgaatctgtggcagcaagtaatggtgattatgccctgatcctgggtgttcctacgcttcagaccggggtctttggcgggcttatcgtcgccatttttgtgtatatgctttataagcgttttcacaacatcgaactacctcagttcctgggcttctttggcgggaaacgtttcgtgccgattattacggctgtagcggccattattgtgggttatatcctgccatggctctggatcccggtacagaaagggctggctgagttatcaactctggtgacgagcggtcacaacgcaaacttcgctgcgtttatttacgccgtcggtgagcgttctctcatcccattcggtctgcaccatatctggaacgtgccgttctattacaattttggagagtacatgaccaaatccggtcagttagtgactggcgacattcctgtattttttgcccagctgcgtgacggcgtgccgctaaccgccgggctgtttatgaccggtcgtttccccatcatgatgttcgctttgcctgctgctgcgctggcgatgtatcacgaagcgaaaccagagcgtaaggcattaattaaaggcctgctgctctctggcgcattaacgacttttgtcaccggtatcacagagccactggaatactcattcctgtttgcagcgccggttctttatattattcacatcttcttatacgcctcttccttcgtgctgatgcatgtgctggatgttcatatcggccatccatttgccggtgggttaattgatttcgtactgaacggtgtcttaccaaaccgtaccccctggtatctggtcattattgccggagcaggctacgcggcgatttattattccgtgttccgtgtattaatccgcaagctgaatctcaaaactccgggccgtgaagatgaagaagtcgctgttgaactcaatctcagccgtgaagacaggccttacgaaattgttgccgcagtcggtgggttcgaaaatattgaagatgtcgatgcctgcgctacccgtcttcgcctggcactggtggatgattcaaaagtccaggataagcgcctgaaagaactgggtgccgccgggctggtgaaactgggggatggtggtgttcaggtcatctttggtggcaagtctcaaattctccgtgatgaaattaaagccgtcatgggaaagccccgccagaccactgagccaacgcttacgcctgcctgtaccaaataa

SEQ ID NO: 207128 - DNA, 1998 bp, Klebsiella oxytoca
atgaaaccacaattactggcaaatgccatccgtatgcttagtgtcgatgccattcaaaaagcgaattcaggtcacccgggtgcacctatgggaatggcagatatcgccgaagttgtctggcgtcaccatttacgccataacccaaaagacccgcaatggtttaaccgtgatcgttatgttcagtcaaacggtcatggctctatgctgctctactccctgctccatcttaccggctatgacgtcaccatggatgatattcgcgactttcgtcagctgcactcccgcacgccaggccatccggagtacgggtatacaccaggcgttgaaacgactacaggcccgctgggccagggtgtggcaaatgccgtagggatggcaattgcagaaaaagcgcttgcggctcagttcaataagcccggctttgacatcgttgaccaccatacctggctgttccttggagacgggtgcctgatggaagggatttcacacgaagcctgcggtctggccggaacgctgaaactcggcaaccttattgccgtctgggatgataacggtatttctattgatggtcatgttgagggctggttctcagaagatactgctgctcgcttccgcgcctatggctggcatgtcattgagggaatcgatggtcataatccagaagctgtcgatgcggccgtgcgtgaagcgaaagccgttacagataaacccagcctgctatgctgcaaaaccatcattggctttggttcacctaataaagccgatagccatgaatgtcatggttccgctttaggcgctgatgaagttgctctggtccgtgagcgcctggaatggccatatgcgccgtttgaaattcccgctgccatttatgatgcgtgggatgcaaccgcgaaaggttctgctgaccagaagcagtgggaagaattattcgcagcctacagtaaagagtggcctgaattagccagtgagtttgttcgccgaatgaaaggtgacctgccgactggctgggaagaggatatgaagaaatatatactcaaccttcaggctcatccggcagcgcttgccacacgtcaggtcagtcagaaatgcctgaatcatttcggtaatatgctacctgagctgatgggcggttctgctgacctttccccttcaaacctgacgcgcttccagaaatccgtcgatttcacggccgaacatccggaaggtaattatatttcctacggtgtacgtgagttcggcatgtcagcgatcatgaatggcctggcgctgcatggtggattcatcccttacggtggcactttcctgatgttcatggaatatgccaggaacgcggtgcgtatggcagcactgatgaaaatccgctcagtcttcgtctatacgcacgacacgattggtctgggggaagacgggccaacacatcaacctgttgaacagctggcttcattgcgcctgacgccaaatatggagacatggcgtggctgtgaccaggtcgaagtttcagttgcctggcagcaggctgttgaacgtaaggacgggccttctgcactggtgctcactcgtcagcctcttgagcagcaacctcgtactgcaacacagcttgaagaaattgcacgtggcggatatatcctcagcgattgcgaaggtaaaccagagttgatcctgatctctgccggttctgagattgagctggtcgtgagcgcagcaaagattctgcgtcaggaaggccgccaggtgcgtgtggtgtcaatgccatgtactgagcgctttgataagcaagatgaagcctggcaggaaacggttctgcctaaagatgtacgtaaacgcctggcagtagaagccagcattgccggtttctggcagcgttatacgggtctggacggtaaagttatcgggatgaccacatttggcgagtctgccccggcagggatcctgtttgaccactttggctttacaaaagacaacgtactggaacatgccagagcattgctacagagctaa

SEQ ID NO: 207129 - DNA, 849 bp, Klebsiella oxytoca
atgaatgacaatatttcagttaaaagtctgatacagagtaactacccgactcttcactccgctgaaaaaaaagtggcggattacattcttaatcactccgacgctattgtgaactacagcgtatcggagctctccgataagagtaaagccagtgaagccacaatcgttcgtacctgtaaaaaaataggttatcagggttactatcatttgaaaattgccctggcaaaagaggtgattaaccccgacgaaggctatccttcagagacggatttttctgacattgcatcactggcgacattcctgctcaagaagcaggcggaagatcttattcagtcagctcagttctttgatgaaaaaatcctgaagcgcgttttggcgatgatttctgaatgcgacacgctttacttcttcggcgcggggaactcaaacccactggcggtctatggggcttataagtttgggcagtttggtattaaaaccattgttcatgtcagcccggaaatgcaactcaatgccgcctatgccatggggaaacgcgatgtggcgtttggtatttccaactcgggaagcacgaatctcatgctggacatctttaatgttgtgaaacaacgtggggcaaagtctgtctgcgtcactaactacattaaatctccactatccaaaatatcgacctgccagttaaccacggcagtcagtgataagattttctttgaagcctttgactcaactcgtgtaccggccatggggatgatcgatatgctggtcctgctctttatgcatcaggataagactcgttatgagttgtaccgcagcagagaagagtttctggggtcaaaattcaaaggataa

SEQ ID NO: 207130 - DNA, 1269 bp, Klebsiella oxytoca
atgaacgataaaataaatccaggttctttgctgaaaagtatgttcctggcggccatagagtctgcacagcctcatcacagtattccgaagtacctcccaaaagacagaaagggaaagctgatggtcattggggcagggaaagcttcggcagctatggcaaaagctgtggaagacaactgggaaggtgaactcagtgggctggttatcacccgatacggatattcagttccttgtgagcatattgaaattgttgaggcagctcaccctgtcccggatgaggcagggctgaccgcaacaaaacgccttctttccctggtcagccatctcgaagagcaggacactgtactgtgtctgatttcaggcggtggttcgtctttactgactttgccattcgaaggtatcagtcttgatgaaaaacaggctatcaatcggaagttgttgaaatcaggtgcaacgatcggtgagatgaactgtgttcgccgccacctctcggccataaaaggtggccgtcttgccgcagcctgttctccggcaaagctgatcaccttgatgatttcggatgtgccaggtgatgatccccgtgatattgcttccgggccaacggttgccgattcctctacgtgcgcggatgcactggacataattaaccgatacaacatcaagttgcctgattatgtcatggatttacttatcgctggcgacacggaaagtattaagcccggtgatatgtgtctgaaaaacagcgagatatacctgatatccacacctcaacttgccctggaaaccgccgctgacatggcaacaaagcagggtctgtcggcttatattctcggagacagtcttgaaggtgagtcgcgggatgtcggaaaagtgatggctggtattgcccgccaggttgcgcttcataaccagccgttcagcagaccgtgtgtgatcctttcaggcggggaaacaacagttacggtcagaggaaacgggcgcggtggtcgtaatgtagaatttcttctttcgctggggctgcaactcaatggcctggaaggtgtttatgcacttgcaggagatacggatggcgttgatggtcaggaggaaatcgccggtgcatggatttccccggacacgttaaagcgagccgagcaagcaggccttaatgcccgacaggccctcgacaataatgatgctcatggattttttgaagcaacaggggattctattattacaggacccactcgcaccaatgttaacgatttcagatgcctgttgattctctga

SEQ ID NO: 207131 - DNA, 792 bp, Klebsiella oxytoca
atgctacataccttccagcataacgggttgaattttaattactacgacaaccaggccgatgggccagtcatcgtatttcagcacggactgacaggggatcacggccagacacgttccactttcattgatgagcattgccgtcttatcacactgaattgtcgtggacatggcggttctgacctgggacctgtttcagagctgaacatcagtaattttacagatgacgttatggcactggtggatcatctgaagctggaaagcgtatcggtggcaggaatttctcttggagcagcaatgagcgccgcacttgcggcgcgttatccggatagaattaaatcagtcaccctggttcgtcctgcattctttacgaagggcatgccggacagccaacaagtccacagtgtcgtggcgaactacattgagatttatggcgcggataaaggcctggagaaattcagggatactgagatttttgaggagctgtctctccagtctccagataatgtcagttcactggtcagtatgttcaaaattgatccagaacgagttattccactgctcagaaggatgacgacatgcgacacctgttttgatgcagagcttataaggaagtcaggcgttccattccgtgtggttggcacgttctacgatgttattcatccaatttccaaagcagagaaaatttgcgaagcattagaaattgagtgcgtagatatagcctatcccaaaatgctaaatagaaagcgctataacgaagatgttaccgaaatcattaaaagtaatattttctaa

SEQ ID NO: 207132 - DNA, 828 bp, Klebsiella oxytoca
atgaataaaggcgttttttcgaaaactttcgataccaccagtgtggatcaaaattttgcattaataagccagcttgggtatcaggcaacacagtttaattttgccagtgcagggcttaaagccctgccggataacgtcccgcttgaggttgttgagcaaatccgacaggcggcaaagaaacacaacgttcagctggaagcgatatcagcgacattcaacatgacgcacccggatcctgcggtgattgagcatggtatgcgctgcctggatgcaatttgtgcggcagcagaaatgctggaatgtccattggtcacgctctgtaccggcacgatggacccggaagaccagtggcgttttcatccagataataacaatcctgaagcctgggcaagtctggtgacctccatgcgtaaagcactcgctatcgctgcgaaatacggcgtggcgctgggtatcgaacctgaactggcaaatgtggtgaactcagccgcaaaagctcgccagctgatagatgaaatggggagtccgttgctgcgagtgatattcgatccggcgaacctgtttgaagaagccacgcttgcggaacaacaccagattattagtgatgctctgggcttgttgagcaatgatatcgcgattgctcatgctaaagaccgggccccggatggttcattcaccaccgccggtcgaggtgtactggattacgatttttatctgacacatctgcgtaatacaggttttgacggttgtgttgtgactcatggtctggcagcagacgaagctggcgaagtctccgtcatgcttgatacctacctgcaaccggcctaa

SEQ ID NO: 207133 - DNA, 1077 bp, Klebsiella oxytoca
atgacagttgaacagaaaaaattacgagtaggtgttctgggctgcggccccatttctcaggccgggcattttgaagcctgttcaaaagccagtaacgcggagctttacgctatctgcgacagcgcagatgacttgcgtagccgtatgcaggcaatctggcagccgacggtcgcttattctgactatcagcaaatgctggatgacgagaacgtcgatgccgtcattattgcaaccgcagatgccttccatattcaactggcgatgatggcaattaacgcaggtaaacatgtcctgtgtgaaaaaccgctcggtattaccatcgacgagtgtgaagaactggtggcggtcgtcaacaaaaccgaccgactcttccagcttggacacatgaaacgcttcgacggcggaatccaggctgcgcgtgattttatccagtcggaaatggggcaactggtcgcttataaaggttggtactgcgataacagccagcgctacctgaccattaatgccgttcagccgcaagtgattctgagcgagtctaaacgtaaaccgaaaattgcgccaaaggccgatcttcagcaatacaatctgttgtcacatggcagccacctgctggatacggctatgcacctggcgggtgatattaccgaaattgaatcccattacctcaaacgcgcaggtcatcaatgctggttaatgagtgttgcctttgctgacggtacccttgggcagctcgatttgacgctgggtgttcatatggactggcatgaaggtttccagatttatggggaaaacggcagtgttgtcggcaaaacctataacccatggttctataaatccagcgacgtagaaatcttcagcaaagcgaccgggaacttcacccgtcctctggcagctgacggtcagttctaccgccgccaactcgaagcctttgcagactcgattttgaacgaaacgccaatcatccgcgcagcaaccctggaagaaggtttgcgtacagtgagaaccatggtggctatccaggaatcaacacgaaccggtaaatctgtacgtgttgctgatgcaagagggtctgtataa

SEQ ID NO: 207134 - DNA, 1689 bp, Klebsiella oxytoca
atgtcaattaaatcatccagactgaacgacctctacattcgcctacaacggaggttccatccagaaaaagatgtctttgtgaaggtgtctgatatcgctgaggttctgggctgtacgtctcgcaatgtcagactggtactgacggaaatggcagatcacggctggattcagtggtttccggcctctggacgtggcaagcagtcccggcttgtttttctgcgttcatccgagcaaatctcacaaaatgagatcagggaaatgcttgaaagcggcaggctggctgaaatgctgacccttgtcgaaggggataccgccgagctggaaaatcagatttatcaacacctggggacggtgattgagggggagagtaagattgtccgcgttccctggtaccggagcctggacaggcttgagccctggaagccccaacgacgaactgagcggcatttgctgagacaatgcttctcagggctgactcgttatgacgatgaattaaaaagagtggttcctgacctggcgcaccactgggtcaagaatgacaccgcaacccaatgggacttttatctgaggtcgggactgaaattctctgatggctcacctctacaggcatctgacattgagaaatgcctcaacgccatgtgtcggtcacctgtgttttcacgtatttattccgggattgaaaagatacaggttattgatagacaaaggctaatatttaccctaaaaaccccggatatccatttcgcagatttgctttcacatacttcagctttgatttacggaatgaataaagggaaggttattttttcggggcattggctggttaaaagtcatgatgattttaaccttgtcatgaaggtaaacccctggtatcacggactcaggcccgttatcgatgaagtgaacattatgcgaatcgagtccgatattctcgatatgggccgaattcaggtcttctatcaaggaatgagcagcggggaaagtgaagtttcacaagcaaggattgaacggggctcgtgttttttggtggtcgacgggaatggacgatttgctgaggaagaagaccgggtctttcttaatcatgtccttcagccagtggacatcctcaaaaattcgtctcaccgtaaaaaaatgaacctcgccctttcagttgctcaggggctgctgcctggttggtatcaccgtatcctcgatattgttcctcctatacgccacaaaatgtaccgtgaattgaccctcgccacattcgagcaaccggaactggcgaaacatgcagaagggatagtcagcattcttgagcgctacgggattaaatgccgggttgtcactcgttcgtttcaggagttctttagcacgccgccagcggatattgatttatggctaaccaattttgttctggatgatgccaatgattgttcactaaacaactggcttcagtctgatcctattctggagcgatgcggaaacggctggaagaaagagaagagccaggtggcaaaggaaatacgcagcggtgaaatagcttgtgaaaaagcgctggaaaagttggtgcgtcaattcaccttctcacgctggtttatcccattggtttatcatcgtgtcgatcacgagcaaattcgccacaattctgcattcagtaatgaactcggttgggtcaatttcagtgatgcctggtttgatatccggtga

SEQ ID NO: 207135 - DNA, 588 bp, Klebsiella oxytoca
atgaatgtttataagttagagcatcagtattaccgctggcatacgttttatggtgtgcgtacaacgttgacatttcacgaactgaatgtcctgtgcgcatatctgcaattgttacattttgaacttccccgtattgatggcgcagaagataccatcgcagaggataatggcgagaaattacttaaaaccatctttaatgctgagtctgtttatgaagaggaaaaatattcacaaacgctggattttcatgataactggaatgaatactgtggcggccgtttgggtgaatatatgcatgagattattcaggttgccagaccagatacgtacaaaaaattgctgcaaaatatgatagctgaatgccgggatgcgatcagtcgatatcgcgaaggaaagttctggctggaaaaccctgacaaatggattagcgatgttgaaagtaatattcatcggctccatcaccttgttgaaggggacgcagtaaagcctgagtggtgctggcagacgatgggtggtgtttcgtgtacaggacgtgtttatgtgcgtaatgataatcaacccgacgtaccgtctccgtatgatgactga

SEQ ID NO: 207136 - DNA, 492 bp, Klebsiella oxytoca
atgctggaagaagccacaaagaacaatacagagcaactggtgaaactggttaatggtgccgtaaaacccacggcaaatgaactggcgaagctgaaaacgggtggtttgccggtaacggccaatgttattaaggcactgcaacgtgacccggataataccgcactgacagttcgtctcgccagtgagcttgccatgtctgatacggtcgaaaccgctttgttgatgcgccggatgctgacaacaggtatgagtgagccaaatgctcaggatcaacctattgcactggaagatggtgttcgccggattgatgcactcgatcgcgaaatcatggcattgaagaatgaaatggacctgaagcgagaactggcgcggaactctgtactgaccatcatcgagcgggacaacgaacgagtcggcacaaacccaatgattcagcagacggacaatgccgacagccggttccagaaacttgatactcctgatgcagagtaa

SEQ ID NO: 207137 - DNA, 243 bp, Klebsiella oxytoca
atgcctgttatactcagggtcaacggcttcaggttctttttttactcaaatgagggcaatccgctcgaacctgcacatattcatgtgatgaaggcaggtaatgaagcaaagttctggctggttccctctgttgctctggccagcaatgatggattcgacgccagagtattaagagagctggccggggttgttgaagataatcaaacgttgtttctggaggcctggaatgactatttcagctaa

SEQ ID NO: 207138 - DNA, 546 bp, Klebsiella oxytoca
atggcttcacgtggaattaacaaagtcattctggttggaaatttaggccaggatcccgaagtgcgctatatgcccaacagtaacgctgtgaccacgctgtcgattgcgacttcagagagttggcgcgataagcaaaccggcgaaatgaaagagcagaccgaatggcaccgtgttgtgctgttcggcaaactggcggaagtggccagcgaatacctgcgtaaaggctcacaggtgtatattgaaggccagttacgtacccgcagatggcaggatcagcatggtcaggatcgttattctaccgaagtggtggtcaacgtgaacggtagcatgcagatgctggggagtcgtcagcagtcggggagttcctcctctcaacaccagggatgggggcaacctcagcaacctgtatcaagtgaccagccacctcaggtggggccgtcatcatccggaagttcggctgttggaatgccgatggattttgacgacgacatcccctttgtcgggctgggttacggtataaaccgctctgcgatttatgctatttga

SEQ ID NO: 207139 - DNA, 147 bp, Klebsiella oxytoca
atgattaaaaagtatacggtgctggcactgccagcagtggttaaaaagcgtacggtattggcactgccaacagtggtcaaaaagtatacggtgctggcactgccagcagtggtcaaaaagcgtgcggtacatactggcaatggataa

SEQ ID NO: 207140 - DNA, 381 bp, Klebsiella oxytoca
atgaaccagaatctaatctggcgggctgtcgcttattcaattaacacctgtagattccaggacgaagttcatgttttcgtcgatgcgccggatcaggaaacagcgaaagagcggatttacgagcggctggctgaagagtgggaaattagcagagcgagtcagtgggatgataagcctgcacgtatcgaatttcataatctctgtgatgagaaagaattacgcgatatggccctggggacgcgggtaccggcaggtatgccgttgcttgagagtggctgggggggagggagagcaatttatgatacgaagcctctgattctggttgcatccccacgtctgcgtgaagtgctggaaagtgcgttgcgggaggtgacggcatga

SEQ ID NO: 207141 - DNA, 786 bp, Klebsiella oxytoca
atgcgttcggcgtacgaaaatttgaaacaagaagtaaaccaactcgtccaacaaggccaagatatttatctttccatgtttctagagtgcggaaagatggataaagatgaaaaggaggaatatgaagctcagggaacaaaatttgtcgatgtatcatttgaataccaatcctggtatacaaaatcaacacgagtaattagccaaatcatacctgaacgtcttgatgagtttacaaagctgtataaaggtgatgaacgaagaaaagaagtaacatatataaactattcaatatacgattatatgttagggctacagagcacctatagaggggaagtaaaaagaagtaaaaaagatgccattccgaaaatggaaactcaatggcttattttatcctcagcagctgaaaagtttgatagttctttatttgacatcaaagaaattttacaagctgatcttttcgatagtgagttagatactgcaaaggaattaaacaaaaaaggttttattcgtgctgcaggagcagttaccggtgttgtacttgagaaacacttatctcatatttgcgaactgcataaaataaaaattaaaaaggcaaacccatcgatatcagagtacaatcaaaaccttaaggataataacattattgatatccctaattggaggttcatacaacgcttaggtgatctaaggaatctgtgtgatcatcataaagaaaaagaaccaactaagtcggatgttgatgagttaattagtggtactgaaaagataataaaaactgtattctaa

SEQ ID NO: 207142 - DNA, 714 bp, Klebsiella oxytoca
atggaactcacttatgatcaaaaggttttgctgaacaatgccgcaaaaaggtctttcagagacatggccgatcaagattatctaaccgcacgtgtctgctttaaaaataatcttccattccaatttttatggatgtctcaacaagcaattgagaaatatataaaatgcattcttcttttcaacagagttccagtcttgaaaattggacataatcttgttaaaggtatagatgctattaatgccattccgtatctgaaactagatttaagtgataaaagtatcgatttcataaaatacctaaatgaccaaggtccaaacagatatttccaaaaagtcatgtacacaaggggattagaaatcattaccttagatagagccgtatgggaattgcggcgatactgtcgcttgttagactaccaattaaaaacacctaaaggtgaagtgatagatatgcttgaagtagaattacggacaattcggcacacaaggaacgttccgccacataaacacaaaattgtcggtggatatttagagaaacgattaaaagataataaatacaatcatggtagtattttaacctggaaaaatttctttttcggaaagactaaaaaaaatacaataaaaattggtcgttctatgcaaacgaacttccctacccaacacttacatcctgaaagcctggagttttttggtaaattttttaaggttacttaa

SEQ ID NO: 207143 - DNA, 1374 bp, Klebsiella oxytoca
atgacagatgcagtgatgacggtcgaaacggtatctgatgccttgtttacctgcgtataccgctgggcgcatgggaagcctatgaaagctagtgaggttgccgaagctatccaccagcacaaggaaccaatgactcgctacggtgctttggcttcccggttaggccaactgcagtccatgacctatgagaaattatgcgaggcaggttttctggataccgatcgcgatcgggaaattatagtccggcgcttggttgtatccgagattattggagaagaagaacttaacgactggctgcgcgatattgaacggatccaacgtctgttttctgggaaccgtaaacaggagaagaaaacgcgcctaccgttgtcgtggggatcagacggatttgatgtgcgtcaggactttattatcaagcattacctgccgtcacagtctctatgcgctatatacggccccagcggctcatacaaaagctttctggctatttcgtgggcttgtcacattgcagcgggtaaaacgtggggtggtaataacgttgcgcgtggcgcggtattgtatgtcgttggtgaaggtggtgtaggtgttccgcgccgggttaaagcgtgggaaacggttaacgggccactacccaagagcatatgtttggtaaaccgtcctgtttttcctgtcaggaaagaagaggtaacagaggttcttgccgcggtgaaacaggttgagcatgaaacaggtatgcctgtgcggctggtggtgatcgatactctggccagatgttttggtggtaatgacgaaaatgatgcgcgtgatatgggggcatttattgaaggctgcgacaccatcaaacagaaaactggagctacggtgctagtggtccatcactcaggcaaggatgaggcgaagggcgcgcgtggctccagttcattccgggcggcgcttgatgcggaattccatgttaaacgtgaaggtgaagcgcgggcgttgatattgtcctgtaccaagatgaaagattcagaagaaccagagcgccatgcttatgatctgcgtcaggtagacctgtataccgatgatgacggcgacgaagtggcgtctctggttgtatacgacacaccacgtgaagcgagggagattgatccggcactggttggagcaccaaagttaagcgataaccatatggctgtgtggcaggccatacgcagcagaacagctaaaggagaaccaagtacacgggctgttattcgcgacgacctgaaagcggcaggcatggatactagcaaacacttttcccactggcttaccaagttgattgatcttggtatggtcgtaaaagagggcgaaaatctgtcaattcgttcattgcgggaagtggcggaataa

SEQ ID NO: 207144 - DNA, 369 bp, Klebsiella oxytoca
atgatcagcaacgtgaaatttaatgggctggctggtcgtgttgagcaactggtgggcaaggtggaagaactggaaaattgtatcaaggcgctggcagatagtcagtgtggcgatatacctccgggcatgtctccggtttccacgctggcggccgagttcggcataagcactaagaaagccgaggaactggcgaaaagctccggtgtgttgttggttaagcataaaggcggcggctatctggcccatgacgagaaattcagggaggcggcgctgctggtgctgcgtaaggcaacccggcgccgtggttcggcttactggttccatccgttgatcggcaaattccagatgagcggggggatcccgaaatga

SEQ ID NO: 207145 - DNA, 225 bp, Klebsiella oxytoca
atgattaatacataccgcactaaaagcgatcttctgacattagctcaagagatcgccgcgcttctgtcatgcgcttcttatttggcaacgatcagaggggatgaagagcgtctccatgtaatgagtttaactggccttgcttaccgccttgctgatgaactggccaatgagctggatatctcggatctcgaccagattaagtcttgcaaggatggcgcccaatga

SEQ ID NO: 207146 - DNA, 273 bp, Klebsiella oxytoca
atggctgaattacagcatacccaaactcacccaaaatttacatggctctttctggcaacccctaagagccatccagactgttcgccggtagttctgcgttttgatactgatactgaggagaatgcccgcgccgctttccccggctgggaaatggtattcgccgccaaaattcgggcagaagcaccatgtcgggtcgcgttctttgactacaacacccgccgcggttgggcttttgatagcgcctcagatagagaggtagttggccatgattaa

SEQ ID NO: 207147 - DNA, 816 bp, Klebsiella oxytoca
atggcacataaaacaaaggcggccatgccgggccgccaatgcaataacactaaacatattcaggataccaggcttgctgctggtggtcaaagcttaggcgctcctgagattacaggaactgcgccattggcgcggttagggggtatgtccaataatggctacaccccctttgggtatacgaacttctccgcacacctgcaaactacccaggcattggggtgtacggcgttggcgcataccccagataaactccgtagtttcgaccgttacctaaattctgggtatcgatgcaatgatcgttgcaacgtccagcattggcggaagtgtcagccttttggttctgatttcaaactgaatgaggcattagccctatcgtttgaatttgggtcatgggtaacttttatgtcaccagacacaagccctttaagcccccagtatgcaaatagcccgaagataaacactaaaataacaatccatttattcggcatagtacacctccttttctggccttatggtttttgctcaataccacgctgttgtagctctttgcggatgatgcgcttaatccaagcggctaatgattcatcaccatcctgctgttgggcttgctccattagttcacgtaactcagggtcaagtctgaattggaatggtggattaccacgtctttcatttttgtgtgttgacacgtcaattacacccgatgtaatgtgtttatgtgtaatgacacattacgtacaagcgataaaaaaagcaacgccctggactgttagagcagtaccaaggcgtctaaccacaaaccgttatacgaggtaa

SEQ ID NO: 207148 - DNA, 204 bp, Klebsiella oxytoca; identical to SEQ ID NO: 109369

SEQ ID NO: 207149 - DNA, 612 bp, Klebsiella oxytoca
atgaaatttaaaaagactactcctctggtcagggataaatggtcttactctgaggctgagatacatgaaaagatagcagcagactctgcgcgagctgcgatgaaatttgctagtggaagtattagtgggttggaattattgaatgatactcagcgccttgagttggtcagggaaatggattcatgggattattcagaagctttaaagggcggcagggctaatgaagctataaaccgaatggtctttatatttcagatgttggggctaaaagagagtgcgttttttttgggtgttatagcatgtcatgcggttggattacgtcaatttgacgatgtgctcgaagaattaaaaggtaagaaatttatttcccaagtaaataaaaagaaagccagtaaaccaagaaacaaatactattatgaggtgatggaggtcattaggttgacatgggagaaatatcccgcagtcagcccaacaggaatacaggaaaaattgtccgtccattaccacggaaaggtaagtcgtggggctttgggtaactgggtgaacaggcatgaagcacggccggcaaagcctgaaaagtatcagcgttttgacttggttttcccccaatag

SEQ ID NO: 207150 - DNA, 1434 bp, Klebsiella oxytoca
gtgtttgtggaaacattcaaatttacgaaaactaagctagaaagcttgccacctgccgaacgtggtcaggttgagtacggcgatgccattgttaatggtctgcgcatccgtattggtaccagtggcgtgaaaagcttctgtatctcccgcaagagaaacggcaaattcattcgtgccacccttggccggttccccgacctgaccattgataatgccagggcaaaagccctcgagctgctgggggatgttgccactaccggcaaaaacccgaatgccgtaaagcgaattaatgataaagcctcggtgacgctccatgaggcgctggaaacgtacattagcagccgcgctcaccggctcagcagcagctcagcaaaacaataccgctcgactctggagaacttctccggcgactggatgaaacagcctatcggctctatatctcgcgaacgtgttgaaaaccgccataaggccgttacggatggaaccgcatggtttggcccggacaaatctaccctaagggctggtgttggttctggtagcaaagcacaggctgacttgtgggctcgtgtgctgcgggcaatttaccgatttgctcatgatcactatcgggatgatgaaggaaagactctactaccagatcctcctacccaggttctcagcacaaaaagacagtggcacggcacggtcaggaaaacagatcgcattcgtactaatgagctggccagatggtttaaagcgctggtggcagtccgtgacagagcagaggaggggcgcgatgatattgctgcggctgtatgcgatgccgtagaaatggatatttttaccgggttgcgtaagtcggagattctgggattaacctgggatcgcgtgaatattggtgcccggtacttctggatcgacacctcgaagaacggcgacccgttggagttgcctatcaccgaaactctgcgaaaacttttccgccggcgcatgaagatgaagacgggagaggagctttatgtgtttcccggcattaacggtgagatcaaagaataccggcatgttatcgaccgtatcagtgcggccaccgttccagaccctaatccggatatggtgaagccaattcctttcaagtggcatgatggccgccggacgttcggcacggtcgctgagctggtgggcgttggtaactatattctgaagcggttgctgaaccaccgcacgatgagaagtgctgatgttatccagggttatctccatttcagcgctgatgaactgatggagccagcatcgaggattgaacgggccatacttgagcacgctggactcattgaacgaaaaaagggattggatgcgcagcttgtatccgtactgggaagtctcagtgatgaagaaaaacgaaaattaatattttcaatactgcaaaacaataaaggtgaagccaatgaaatttaa

SEQ ID NO: 207151 - DNA, 177 bp, Klebsiella oxytoca
atggccgccaggcatattaagacgttactggtcacagttgatgtattgaaagacaagcgtgagtatctgatcccactgactgaaaagcgcagggtatttgagttccgggaggagtggagcaataactttcagcggcagcaggaaaacaacgttgtgaactcgttcggaaggagataa

SEQ ID NO: 207152 - DNA, 951 bp, Klebsiella oxytoca
atgaataaattacatgtagatgacttatcaataggtgaactaagtcagtcaaaatatgatattgcattattttcttgtggctacgaagaacgctgtattgacgtagctacacgattgcatagagacaatatagataatgttattgtcttagcgtttgaccaacataaggaagatccagtccgtatcgatagtttgaattacttttcagaaagctggactggcttcaaattacttgaaatttcacaaagagaaatttctgaaatacaaaaggtgctaagtgaaataatcaaaaaaattaatgttactgaattaaaaatattaattgactacacttctatgtctcgagcttggtatgcagcgattttaaactatttagtcaatttttgtgaattaagagtaactgttgatttgacatatgcaactgcagtgtatagaaatttagatctaaacgttgaactaggtgagttacgcataattccggggtgcgagggtatttcattaaccaaaaggcataatgcagcaatattcatgttgggttttgatagatatggtcctcaacgtttgtataacttactgaacccaaacaaatgctttggtatcatggctgcaccagctgcaacctatgattatgaaaatacttgtttagaaaaaaacaaagactttatttcacactaccttggtggtgaagataaacttataaaattaccaatcaatagtattgcaacttgttatgataacatgtcgcaaatgctctctcccctaagatctgattataacgtatccatcattccctttgggccaaaaccacatattttagccgcgatattatgtagttttaattatcccaatgttacttgcttatattctgaatatattcgaaatgaaactacaaaagtcgaatcttctggagattttgtaatatctcgcttgcatatcaagaaaaatgagtaa

SEQ ID NO: 207153 - DNA, 1488 bp, Klebsiella oxytoca
atgaaaatgacacgcttagaagctattaaggcatggggtagagcaagccgtgaaggtaagcctattcccgatgatgttcgaaaagttctgatcagcactcaaaatgatagcctgcacgatttccctatagaagcccctacagctaaagttagagttagtaaagagcaagtaaaacggaatatgaacggtaagaagccgttagctacatctggtactatccgtagttcgggaggtgctttaactcctgaacaaatggaaatatacaacaaaaaacgcaagttagataatcaaaggcgtaaaaacaaccctcaactttattcaaagctaatgcaagattttattgcatctggcttatctaaaaaacaagccactaaaaaagctagagcagttattttaagtacaaatctagacaaaccaaataacgataaagaaccttctgctgtcagaacaaaccgaatcattatatccaatactttacttaatgaggagatgtttaaagctgatccctggcacatagcaaaagttaagcaagatgcgatcaatttatttaatgtcgaacaaagacgaatcgacacagcacttttaaggcgtcctatttcatgtattgaatgcaaaattgactttaaatcatttggtggatttgtagatcatactaaagatgttcatcatgctagcgtaagtacacctaagttaattgtagaaaatgaagtttctattgacactgtggatattgtcattgagccatctatatttcgacctaacgaaccagtagagccggttgtttctattcccattaccaaaacgccagaatcatttagtgataagtggataaggttgtttgcagagaaaggttacagtgccgcaatggttgaagcgtttaaacgtgatgcaactaaagagaatatgacggcattacagatacatgattttcttagtgtctgtaaaccctataaagcccctgtagaaacacctgtaagtcctctagaagcgattattatccctgaacaagcaagtaccattacagaggccagagaaacgcttgtagaagcacctgtagcatctgttgctaatgattcctcctatgctgttaccctcgttgattcttttgagcaagctttgtttgctgatcgcattgttcgtacccgtaccaatcagaatgattttaaagaacgtgtagccgctaactttggttatcgttgcgccattactaatagcggagaagcattagaagcagctcacattgagccagtaggaacggggaacaataacacttctaatggggtgcttatgcttgcttgtttgcatcgtcttttcgacgctggattgatggctatcaatcctgattctcttacagtgcatttcaaggccgactgtacatactttgctaaaagaacgttggaaggtaaaaaactaaatgatcacccagttactctgaacaaatcaggattgttagaacgctggcttatctttaatgctgatagaatttaa

SEQ ID NO: 207154 - DNA, 843 bp, Klebsiella oxytoca
atgaagaaaaacactggagaatgtgtagataaaaaatgtaaaaaacctatttcagagcatggggaagcaaataaaaagcgtttatgcgaagaacactatgaactacaaaaagaaaaggcccggattaagttagaaaaacgtataagcaagatagctgacagagttatatccagtcataaactgtcaaaaatcgaagcattaattagcaacaataatgttaatgaagagatctccagaagaaaaataaacaaacaatggatatcagaaaatacaaaaaggaaaagtgatgtaaaagaaatcctcgaatctcgagaatggaaaaacacacaagaactaattcgaagaagaagagtcacttgcgtagataaacaatttatggattatgtacaggatgtgtgtcatttatatttactaaagctttttcatagtagagaatatctcaacaaagataactcatacaaaaaaaaccatatatcttcgcttggagatattagccctgttgtcactttaaaacttgaggtagccttctctttcaacccttactctgacgttagcataagcacggatgatatcattttgattccacagagaatccgaagaatgctttccatggaaaaattatttcttaagaaaaaaacacaaaaaaataaatcccagaatcatgagagcaagaaaataaagagtaaaattaaaaaaagaagcgatggtatctaccacagaattctgcgagaaaatgaacctgaagaggttagtaagtttatggataagatgagagaacaattaaaagagcttccttctacaatatttataagatccccccccctttctatacagccccattga

SEQ ID NO: 207155 - DNA, 342 bp, Klebsiella oxytoca
atgaaaatcttacctgcaacaactcagcgggcggctaagccgtgcccatctcccgtgacggtctggaagatgctgcttacccgtctgctggaacaacattatggacttaccctgactgacacgccattctgcgatgaaacagtcattcaggaacatattaacgccggtatcacactggctgatgccgttaactttctggtagaaaagtacgagctggttcgtatcgatcgcagagggtttagctgtcaggaacaatcgccttatctgcgatctgtagatattttgcgggcgagacaggcaatgggtctgttacgacaaggccataatctttcgacacgctga

SEQ ID NO: 207156 - DNA, 1233 bp, Klebsiella oxytoca
atgaaaataataatcattagtgatttacatgttggcgacgcggctgtttcaaatgagtttgcagtaggaagctctaacaacgctgtaaaaaatcagttcctaaatgaattacggcagctttctaatcaagaggatataagtgctgactatcttgtggtcgcgggtgacatcaccaatagagcaaccagagaagaatttgaacttgcatctacacgcttgaaagaaattgcggagatagtgggagtagagcaagaaaaagtcttctttgttccagggaaccacgatggtaactgggctgaagaagaacgctcaatgacctcaaaagaaagtattaatatgacaattgatcgcaaatatagcaacttgcggttcaatgacttttttaaaaaatgtttagatcgcgctcgttttggctgttattacaatgaaccatattttgctatttggagtgatgatcacataaatattattggcgtgaacagttcggtttttgaccactatgacagaaagcctcatcacggtgttattcgcaaacaggatttaaccgaactggatagaaagcttcaagaactgcagattgcacatagcgggaagattaatctgctagtcgtacatcaccatccaattcagcagccagatttaccttttgacgccgctgaccatagtatcttacaaaacgcagctatcctgatggaaattgcgtctaagcataatgttaattttattgtgcatggacataaacatatacctaggcttgcacagtactctgatgactatcagcatcctattaatatattgtgcgcaggcagtttttctgcgcgtttagatgataggtggttccaaggggtaccaaatactattcatcaaattgaaattgataaaatttgtgatgtaaacaaaacccctttaggaaaggtagtaagttggtcacacaacacaggacatgggtggacaaaagatgagtccattaacggaatacctcacaaagagttttttggtaatcgcatgttacctgtcgaactaaaaaagcagctaaaagaatctattgagcgttttttcgagacacagacacatgttaagtggagtgaactatctaaccattatgctgatataatatatacttcgagaaaacttcttgaaaagaccattatggatttatcggatgaagttggttttacaatatttaaaactccaggacaagatgagttattcattttgctaaagggaaaatga

SEQ ID NO: 207157 - DNA, 618 bp, Klebsiella oxytoca
gtgattcggattccgacagcgactctgactccgacagcgattcggacagtgattccgactccgacagcgattcggactctgacagtgactcggattcggacagtgactcagattcggacagtgattctgactctgacagcgatgccgattcagacagcgattcggactctgacagtgactcggattcggacagtgactcggattcagacagtgactcggactccgacagcgactccgattccgactctgacagtgactcggattccgacagcgattcggatagcgacagcgactcggattcggacagtgattcggactccgacagcgactcggactccgacagcgattcggattccgacagcgattccgactccgacagcgactcggattcggacagtgattcggattccgacagtgattccgactctgacagcgactccgattcagacagcgactcggattcggacagtgattcggactctgacagcgattcggattccgacagcgactcggactctgacagcgattctgatactgaagcacccactgcagcacagaacatcacagttaatgacaatgttggttccatcaccggtgtgcttcattccggtgatgtga

SEQ ID NO: 207158 - DNA, 222 bp, Klebsiella oxytoca
atgacaaacatgatctcatatcagggacttgttcgcaccttccctaacgtaaacgcagcgcagcgcttcgatgaaatactgcttaactatcgcactgggggtgaaaaagataccgatggagtcattaattttgtcactggctcctctataaagaaaaccacccttaaaactctcacgccagatgaatatcgggtgctgaagcagttcctgacggttatctga

SEQ ID NO: 207159 - DNA, 180 bp, Klebsiella oxytoca
atgaatgtcattcagccccgcatgctctctgtatttgattttgacggtacgttaacgcggcatgacagctttatcccttttctgcggtttgcctttggcaatcgggctttttcccgtcgtatcgtcacaatggctcttcccacgttactgattagaagtgagataaatgaacagggataa

SEQ ID NO: 207160 - DNA, 657 bp, Klebsiella oxytoca
atgaacaaccgcaagataaccattaccagagaacgccttgaatggctctcacagatttcagaccgtgacgatatagaagacgttgacggtggggaaattcgcgaattggctagcagagaattggccgcaatggacagtaagcctgtgattgctgattgcgacccggaagtttttgggaaaggagtaagcgtatgcctgatctccatccccaaagaaactgcagaggtcatttgcaaaaatatcaccgcagcgactggttgtaaggtggactggcactactttggtggccgtgtgcatatcaaggcacttcccccatctctgcagacagcgccggaacgtgagcaggtacgccgcgagcacgccgagtggtcacaagctacgttcggcgatgttggcccaattggtccgctgaggcacctcagcaaagaagcgctggaagcggcagcggacccacatgaccctcttgaatgggctgatatgcagtttttgttgtgggatgcgcagcggcgcatggggatttctgacgagttcatcaccagagcaatgatagaaaagctggcgataaacaaggctcggcagtggcctgagccgaaagacggtgagccgcgcatgcacgttaagcaggaggcagacaatgacccgaagccagctgattaa

SEQ ID NO: 207161 - DNA, 183 bp, Klebsiella oxytoca
gtgaaaactatcatcgtaacactggagatcgatgttcctgataatgccaccgataaggatatttcagactgggttgatgttgaatatggccagtgcggaagtcgaaaactggataacccatgcatggccaattatggcaatgcttctgaattgctcgaccactcctggaaatatgaggactaa

SEQ ID NO: 207162 - DNA, 138 bp, Klebsiella oxytoca
atgaagaaaaaactcatggctgaagcctcccggtttcagtcgtcgcgggagcgtaaagaattttggtgtttaatcctgggtactttaacagccgtattaacgctcttctttatttttaatctggcctatatggcctga

SEQ ID NO: 207163 - DNA, 126 bp, Klebsiella oxytoca
atgaaattaaccatcggcaacattcgtttattgctcgtgctgggctgtatcgtcatctgggtagctgttgcatttattttttaccccgccgttatttcaggctgggattactttcataagccgtaa

SEQ ID NO: 207164 - DNA, 720 bp, Klebsiella oxytoca
atgagtgatactgaaaaatatctggccaaaattaaaaaactcctgaatctggcccgtcgcagctccaatcctcatgaagccgcaacggctctgaatcaggcgcaggcgctgatgcgtaagcataagctgagccagaatgatgtcgatctgatggatatcaccagcaaggccagtaagggggcgccatctcatgctcagaatatccctcgctatatggcgtatctcggtcaattgatttgcgaagcgatgggcgttcgctgctattactcttttcagcgcaattatatgaacggccagcgacaaaataccgtgattttttatggtcccgatgaacgtcctgaaatcgccgcttacgccttcgacgttctttcccgacagatggtcaaggcacgccgtggctatatttcctcgctgcgtaagaacattaaaccggtgactaaaacggcccgtgctgaccagttctgtgaggggtgggctgagggagcatatcaggccgtagagccatttggtgtaacggacactgaaaaaacactgatgacgtctttcctttcaaaactgaagaaagaacaaggtgcagcagaactcaaatcccgtgaagctaaaaaatgtcgtggcgatcaggacgccgctgaggcgggatttaatgaaggtttaaaagcccgtttaaatcacgctgtttccggtaaagattcatccctttctctggagtacaaaccatga

SEQ ID NO: 207165 - DNA, 294 bp, Klebsiella oxytoca
atgaacgaaaacgattctgaacatcccaacaagctgttatacgaaggacttgaagggattatggcttgcttgcaaatactgattctttgtctggcgaagtctggtcaacttgatgtccaggaatacactcgccttctggctgagtggcggctaaatgaggcaccacaggactcgctaactgaagctctgctggaccggatgctgttaatgcttgttgaggaaccggatgtactgttacgccgactgagcttgcagttggttccaggaaatgatgacgggcagcgaactgaataa

SEQ ID NO: 207166 - DNA, 483 bp, Klebsiella oxytoca
atgagtcagcaaaaatcccccgataccgaagacgagctgagcgtgctgctctcgacccgcaatatcgccattgcgggtcgggggctggttatccgcgaatacaccctgatggatatgctgcagctgggcgacaaactggatgcgctcaccgacagcctgtcggaggtcatgcgtacaccgtggccaccgctggaagagatcgaggcagtgctgcgaaaacacgccggtgatatcccggaactcattgcctgtaccgtggatcaacccatccagtgggtggcgcagctacctgccagtgacggtcaaaccctgattgactggtggtggacccagaaccgacgtttttttatgaacgctgtcgtccggctggaaaccatcagggcaacacgggcgaaattgtcggcttcggcagcatcttcgcaaccctcatccgggcaggacacgatccggacaggctcggaacctacaccctccgccagctga

SEQ ID NO: 207167 - DNA, 2148 bp, Klebsiella oxytoca
atgtcaaatttgcaggatagtcctgtctgggtagatggtatttatcaacttacagatgagacaccagtactgggtaaacaagatggggtatccggggatggccctgcaaaccttcaggctcagcagctggcgaaccgtacccgatttctttatgagttactgctggttttacagcagatggcttatgcctctacacaactatacccagacgatgctaccgcattagcgtcaacccagtccggtgactactatcgacttttaaacgatgagggtagtgattatacctattctattttccagaataattccggtcaggctttattcgtcacctacgatacccttaatacaggtgtaataacgcgtcttgaagaattaatccttctgaacgtgaatgatattatgcagactggggcctctactcctcttgaaggatttcctgatgttgcctgggcatggattgataaagtgggtaagtcgactggcgaaactctcagcgatggtacaactaatctggcagcgttactgcttggcgataaaattgagtttgtgacagacaataattccgggattatatgccagcttaggggaggctccacgccactgtttagtctgtcggcatccggtgcggtgacatttggtgatgttgtcacgtggttatccgacgaagaatttttcgccggaatgaaaagagcctggatggatgctgaaggtaaaatttacaaagtcgagtacccggacggctccatcgcagattacacctcagatactggcagcggtgacagtgactcagcccaatatccggcagtggtatccataaatggaaatatcgtatcggttgataaaaacacgattacacaaatcaccagtgataccggtgtttcaaatatcggccctgttgcacacaaggattttacccgtttcatttcagatatgagcggctcatatatggtccaccgggcgacccatgatggcaagtatcgcgcccgggaatcgttgggcctgctgattcatggtatttgtgttggccagtcattatctcctggaggttcaaccgtaagtcaggagccggttacaacgacagctcaggcagattacggcattctggcatttgctacgggccctaaagtcgattttagataccagacattagatcctgaattattagaatctgtcattccatgccgtgaaaatacgggcgttcgtcccgggcaggagtcgccagcaagcggtatggcctggcaaatacacgaattgaccggccacaccgtactggtttcaacagcgggcagctcgggtacagatattgccggtatttctgccggaacggcggcatttcagggtgccactgccatgattcaggccggggccgcaatggctgaaaagctgggtctggaatatgtgccggttttggttctgatccacggtaatgctaatgctgccgccggaacatcgatgtcatcttatcagtcgtcaatggaaagcctgcgtctttcttatcagtcagtcatcaggaccgctatgaaagacgatgactatagcctgcatatgtttttgggccagctctcaaatatcattccgtatggaggaactgccgggaccacgcgaggtaatacgattggtattgcacaatatcagcaggctcgggataacgaatatacgcacattgcgagtgcgcaatatgcccgaccatattcagacggggaacacctgacatcatcgggctaccggactgagggtgaggtaataggtgctgttatcggtaactggctgaatgacagcacgtacacagcgctcatgccggatgaaagtgccgttgtgcagtcaggagacaccctgacgatcccgctaaaagggggcaaagaaagtccggcttccgacaccgcgcgtgtggctgaccccggcaatctggggttcgttctgaccggggcgacaattgcttcagtgactcttagcggaaagaatctcgtgattacaaaaactgatacaacaccggccacgcgcgtgacgtatgccgctacgggtatcgcaggacagaaccctggagccctgacaggctcgcgaggttgtattcgtgactcgcagaacggtaattcactgtctggcttgcctctttacaacgacctgtgcgtgtttgcaattgacttataa

SEQ ID NO: 207168 - DNA, 756 bp, Klebsiella oxytoca
atgacgactcagatttatcaaaacaaaagtattatcgctactcgttacctgaagaaatatccgtttcccaacgatatcacgcagctcccggcgctgatccccgggattattttgcagtcagattttgatgttaatgaccctgcatcattaacgagaaaccgggtaggtgtggccatgtccgtagtcggcgcaccggtgctgggtgattatggagtgactctttctgaggccaatcacctcgattccaacattgatatttcagcctacaacgccagtgacctgacggagatttcaatctcagctcatcctggcgctgtcgccgctattattggacgtattcagataaacgcaccacagcgctcacgcgggattcagacgacggccacagcatggcgggcgaaatggctaacggccgcaggagccgcacagcaggctgacctgaccccttccacccctgcaactgatggcgaaatggcggtcgctcgtttcgtgcgggataacggcagcggctccatgctgaccaaaatggatttaccccgtacaggccagtcagttacaggtacggctgctacaacgccgtatgcaatgccttcatcaaaattcctgctgggagcgtcggcagatggggccacagtcggcacggtctttacacgtgcgtctcttctgatcgccaggtcaataactgacgcagagttagcaatgatttacatgtactacgcaaactactatcagttgaaaggcaaaaaaatcaattag

SEQ ID NO: 207169 - DNA, 195 bp, Klebsiella oxytoca
atgggtagctatattgcagattatctggccacaaagaacggcctggtgatttattcaggcactctggcagttgagtctgaagctaatgatggggccataaaatccgctgttgctgctgaactgatgaacatcaacagtcaatatgggggtgggataccagattcagtgacagtaagctcatggtctgaagcttag

SEQ ID NO: 207170 - DNA, 729 bp, Klebsiella oxytoca
atgatctaccttcacaacgcagattgcttcgacgtattcccgaaaatcgccagcggtaccgttgacctggtatgtgctgatatcccatacggtaccactcagtgccgctgggattctgttctcgacttggctctgatgtgggagcaactctaccgcatcgctaagcccagcgccgctattgtgctgttttccgctcagccgttcaccagcgtgctgattaacagcaatctgcgggactggcggtcggagtggatttgggagaagccacacgctacaggtttcctgaatgcgaaaaaacaacctcttcgtgcacatgaaaatattgaggttttttacagaaagcagccgacatacaacccacagatgacgcatgggcacgccagaaaaactgcaacaagaggcacgccgaatactgatgtctatggcgaggcgttgaaaaaagtcacttacgattcaacaagccgctatccgcgagatgtgcagaaattctctagtgataagcaaaaacaagctcttcattcaacgcaaaagcctttggcgcttgtgaaatacctgattgaaacctacagcaatcatggcgatacagtactggacttcactatgggtagcgggactgctggcgttgcgtgtcagcaatcagggcgccggtttataggcgtagaaaaagatccggaaatattttgcaccgcattcgagcgcatggtgattaaacgggagcgtgcagcatga

SEQ ID NO: 207171 - DNA, 405 bp, Klebsiella oxytoca
atgaacatagccaagtcgatctttgaatttattgagaagaatccaggcaaaatgctgcgcgatatcactgcggcatttcctgaaaccaaaccggtaacagtgaagagcgctgttcatcgcctgtactacgacggggaacttgccagcgttgaagttactggtgggctttcgggggagattcttgcccttgaagcgacagccaaaaagctggaagagaaacgctattaccgccgtgcggcgacggtatggcagcaactttgtgacagcaactgtacggctaaagcaagagagcggtacctgcgtcttaagaatgcttctattcgaaacgccaaaaacatgaatgattccgccgggtcatgctatctggcaggaaattactgcggaggtgacttgtgctccgattga

SEQ ID NO: 207172 - DNA, 216 bp, Klebsiella oxytoca
atgggtctgaaccatagctttttcaacagactttcttattgcttcaatctgctcaaggcccggcgctgtatcgaagttagctacgatgacaatgggattttcaggattgttgcgctggatgccataatcagaatccgccagataacggattgcgcattcctgcccttcttttgtcagaaaggtaaagtggttctcccttcgatgcagggcgcgtaa

SEQ ID NO: 207173 - DNA, 336 bp, Klebsiella oxytoca
atggtggtcgcggtcgacatcgaccagaagccgccgatggcgattcccagcagcaggcgtccaagcagcaaaaactccagcgaaccggcgaaggccaccatcatgctggagataatttgcaaaacggagaagaacatcagcacccagcggcggtcaatatttcgcgtcgcggtggtgatcagcagcccggtaactaacgccaccagcgccgtcgcggtcaccgcctgccccgccataccttcgctaacgcccaggcttgccgccatcggcgttaacaaactggcaggaagaaactcggcgacaatcaggccaaacacccccagcgccagcgcatag

SEQ ID NO: 207174 - DNA, 336 bp, Klebsiella oxytoca
atggcctcgatatcgctgtcggaatccgaatcactgtcagagtcggagtcactgtcagagtcagaatcggaatcactgtcagaatcggaatcgctgtccgaatcagaatcgctgtcggagtccgagtcgctgtcggagtcgctatcagaatccgaatcgctgtctgaatccgagtcagagtcactgtcagaatctgagtcactgtcagaatcggagtcgctgtcagagtccgagtcgctgtccgaatccgagtcgctgtccgaatccgagtcgctgtctgagtccgagtggattggcccctatatttccatacactttttatcacttaacccatga

SEQ ID NO: 207175 - DNA, 267 bp, Klebsiella oxytoca
atgaagaagcgtttttccgacgaacagatcatctgtattcttcgcgaggccgaagccggcgtttctgcccgtgagctctgccgtaagcacgccatttcagatgccacgttttacacatggcgtaagaagtatggcggtatggaggtgcctgaggttaagcgcctgaagtcgcttgaggaagagaacgccagactcaagaagctgcttgctgaagccatgctggataaggaggcgcttcaggtggctcttgggcgaagtactgactga

SEQ ID NO: 207176 - DNA, 402 bp, Klebsiella oxytoca
atggacgcactggccacaggtcgcaggatcaagtgcctgacctgcgtggatgatttcacaaaggaatgcctgacggtcactgttgccttcgggatttcaggcgtgcaggtcatgcgaattctggacagcattgcactgtttcgcggctatccggctacgataagaactgaccaggggccggagtttacctgcagagcacttgaccagtgggcttatgagcatggggtggagctgccgcttatccagccggacaggccaacgcagaacggatttattgaaagttttaacggacgctttcgtgatgaatgcctgaatgagcactggttcagcgatattgttcacgccaggaagatcattaatgacttgcgactggattataacgagtgtcgaccacattcatga

SEQ ID NO: 207177 - DNA, 156 bp, Klebsiella oxytoca; identical to SEQ ID NO: 196268

SEQ ID NO: 207178 - DNA, 264 bp, Klebsiella oxytoca; identical to SEQ ID NO: 103077

SEQ ID NO: 207179 - DNA, 1155 bp, Klebsiella oxytoca
atgaagggtatgcggaagattcgcaggggtaagaactttgctggtgtggtccaatacgcattgaaaccgggagcacatcataaatgcgatccagtcgtaatcgggggcaatatgctgggtgacaccgcccatgaaatgattgcagagttcgatagcaccaagcatcttcgccaggatgtcgcaaaaccagtttggcacaactcgcttcgcttacctgatggtgaatcattatcgaatgaccaatgggcaaggatagctgacgactacatgaagagaatgggattcagtgatactcatgttcgttgctatgtgcttcatgacgatccggctggtcagcacatacacattatcgcaagtcgcatagacctcaatggagggaagctctacttgggtaggaatgaaaaccttatcagcacacggatcattagtgaactcgaaatcgctcacggtctgacagtgaccaagccagccccttccattacaccaaagcaacagaagcgaagaaaagtttcccgtaatgaacagatgcttgcagaacggactggccttccctcccctaaagaagctctacaacagatacttgataaaagtttggcagatacacctgatcttttaacttttataaaacgactggaagaagctgaagtcggctggacggctaacattgcttctaccggtaagatgaacggcttctcattcgaataccgcgatatcgctttcaaggcatccaaacttggaaaggcatactcttgggtaaatcttcaaaagcagcttaactacaacccagatcacttagaagctctgcgaacaacaaagggagttatccctgctcctgctcctgctcctgctcctgctcctgctcctgcaatagttttgaaaaccgctgagagaaaggaaagtatcggtaaaaaaattgcagaactggaactacggctcagagaagacaaacggaacgaaatcgtagaaaagatccttcaaaagaatgcagccaaacagcaaaagcatctcaggctcaccggctggattccctttttacaacggctcatagagcttctcagaaaatatggaaagagcatcctccacaaggttcctacaaacttctcagaagtctattcaacacatcatctgaaacctacaagaaaaattcgtttatag

SEQ ID NO: 207180 - DNA, 231 bp, Klebsiella oxytoca; identical to SEQ ID NO: 120247

SEQ ID NO: 207181 - DNA, 1404 bp, Klebsiella oxytoca
atgaatgaaaaatcaattgatgaaatattagctgaaagacaactaaaagaatttaacgaatcgaaatttggtcagtttttcaataatcaaaaactaaaagaacaagaactaacataccttaacaataaagcattagacatagtgaatgaagaagatttattcgaaataatgtcattaatacctcaaccattcattacagaagaaaataaaaatgttgatgttttaagccttatatataataactttttagaaaatacagaaataccattaacacttcctattttttcgtttttaagttttttaagtgctttttgtgttaaaaatgaaatcacatatacaattccattgagcgacgaaaaatcgccgcttgatacttggatcacgattttagcaccttctggaagtgcgaaaactttttcaaactcacaaataaaaaaggttataccagtaggtattgacggaaaaaaagttattgagtcaaatttcgtaaaacctaacggccctgcgaaatttatcgaagagctttcaaatcttcctgaaactaaaaacggcgaaaatcaatatggtttttggattgaagatgaagtttcacaaatgtttaaacaagtagaacaaatcggatctccattatctgaaataaaagaatatttgttaaaatcatatgaccatgaaaaattaacaagaaaaagcaaaaaagaaacaatagaaactaaaaatatagttttaaccctgttatttataaatacatttgaaagttatgcgaataacatttcaaatgaatcaatgacagatggtttaatgagaagatttaatctaatttatacagaaaaagacagtgaaagagatttcactgattactctttatataatttgaaaaaaataagagatgaaacattacaggataaaatatccgaattattcaactcaataaaaccagatcaaaatttcacattttcagataattgctttaaattatatcaaaaatatttcaagattttttggcatagaaaatataaaactattttaccagagaaagaaaatttttacagaacttatatgatgcaaagctggaaatttgctgtattttatcatttgattttaaagagagaaggaacggaaattcagggcgattgtttagtgtttggtatgaaaatatctttattattcgctaacagtatgaaaaagttttttgatttcaaattaaataaaaaactaacaccaaagaaaaaagagaaaataaaaattgatttcacaaaatacattgaatatttaaatgaaaatacagatattactttgagaacattttgcagaaaatttaaccttaaaaaagccgattcaatatcaattttgaaaagtcttgaatgtaataattatcaacacaaacttattgaggaactggagtaa

SEQ ID NO: 207182 - DNA, 438 bp, Klebsiella oxytoca
atgagcaaaatttcagaaatgataaaacaaaaccaagagaagaagaaccagcaaaatttgatctatcaagagaaattgaaacagctaattctcaacaacaattcattcgttcaagagttgcagaagttggaagaaatcaacttcaattcagaaaatcgcttgatagaactcaagaacgatctggagtatgtagaagatctctacattcaattattcacaatattagaagatacgtcagaacgttttcaatcaatacaagacagaatgagagaagacaaaaaatcgaacacagacaaaaaatcttccttgaaaagctcaaaacccagcaagaaaaaaacaatcaaagaagtgtcgtcagaagtagatttaaaccgtattagaaccgttctgaacactcttctaactcactacgataaaaccttaaccgtgaacaagtaa

SEQ ID NO: 207183 - DNA, 315 bp, Klebsiella oxytoca
atgaacagggcagagattacaaaacttatagaacagaatcaacaatcgatcacagagcagatcagcagtatgtcgaaaaccaactcagacagcatagagaaaattttgatacagagcttgaaaaaagatacagcagaaatagaactcgctttaagccaacacagagcaaagaccagaaaaatgctgaatacagagttgaaaaagcaaatgaccgtaaaaatgttagatctgaaataccagacaataataatgttcctattaggaatgaacctgatattgatttttttcataataataaaactatcgaggatgtaa

SEQ ID NO: 207184 - DNA, 306 bp, Klebsiella oxytoca
atgagtcacgagtttttaatccagagaaatgacaacagcaatgaacaaggctatttccaaggatatgccgaaggcatattctattcagcctttaattgccaaaggttcaatagaggcgtttctggttctaacgaacaagaaactttcaccacagcagaaacaaaatcagcattagaaaaagtcttaaattctagcgagatagcaaactatcccgatcctgatcgtataagtagtattaaagatttttatttcaatattgtattaaatgctaaaaagaaagatatttttacagtgagatttttctaa

SEQ ID NO: 207185 - DNA, 132 bp, Klebsiella oxytoca
atgttatatcaggaaatgactcgtattcaccctcccaatttttatctcctgggattttttttaactctctccagtattttataccttcaactttgtgcgattctcgtgcaggggtatatatatgaagagtga

SEQ ID NO: 207186 - DNA, 618 bp, Klebsiella oxytoca; identical to SEQ ID NO: 196299

SEQ ID NO: 207187 - DNA, 270 bp, Klebsiella oxytoca; identical to SEQ ID NO: 145692

SEQ ID NO: 207188 - DNA, 603 bp, Klebsiella oxytoca
atggaattcggatattgttcaaccatcggttcatgtaactggttagcaagtggatttaataggtatgaatgctctgttttcgtaacaaatgataccttgacgactgaagtattagatattttgagcataatttctaaaggaaaatctagagtatctaacaacttaagcaaatctattaaaatcatcacaaaaaatgagcatcatgattttgttttagatgcaagagacaaagcaacaaaatcaatatttattgcgagtcatagaattagtaataatgcagaaagacctattttaactcccttgataacatcaatgacagccaatagcagtcttaatattaacatgtattactcatctcttagcggaggtatcaattcacagcaacttgatgacatgagtaactctttaagaaaaaatggaattactttagagaagaagaaagatcctatttctcatgcaaaaatattatcatgggataatgacaacattttgatcacgagtcttaattggctttcagcctcagcttacggaaacccatatgatgagcttggcatctttatagaaagaaaagatatattttctttaatttcgcctaattactga

SEQ ID NO: 207189 - DNA, 126 bp, Klebsiella oxytoca
atgctgctaaacgcggagttcaagttgatatcttatggggccaagaagaacccgatgatgagagaagtatcggaagttataaccaatttcttgagggccttaagtcttatagagaagaaattataa

SEQ ID NO: 207190 - DNA, 756 bp, Klebsiella oxytoca
  misc_feature (734)..(743): n is a, c, g, or t
atgaaattgggttgggttgaattagttgaattgaattctaaatacaacttcaggattaccagcaaaggaaggagtgttgctaatcgtgaggaactcccttatgaaagagagccactggaatctactcggaagtttttaatagatccaatcacagcaaaatgttatcgagtaaatgcaagaaatcaaaactatcagatatatcctacatcaagagcaaatgaattacttaagaataaacactcgatatcaacagaactcaaaattaaaaaccccaaacattcaccgttcacatcagacattctaaattgtgttgaagatactgacgaagaggttatagggtatgaggaaagagctaatgatagaccttattatcaaaatagaacttttgctatagcacaagttgatgaagcagataacataacgggtgttccatctgatatctcaaaagaattagccgcagatattatcgctgcagctaatatgaagcgaagtgaaataaatactaatatagactctcttagcaagaactcaaaaataagcacttataataccgagtcttttgaaaatagatttgaagaacactatattaatgaaactgaattccgaataatatcaggttcagacagccatcgagatcatcttatcgcgatgatcgataaatctgttagtagaatcattatccattcaacttttatacacttaaaaaactttgaatcaatctttcagaaattaannnnnnnnnncagaattaactga

SEQ ID NO: 207191 - DNA, 750 bp, Klebsiella oxytoca
atgtaccacatcgataatttaagtgcggttgctgagatgccgtccacgctccccgtgatgtttacccagccccggtggtttaccgaagggggcgaaggtattgagcctacttatcccggcgcagactggttcaatattattcaggctgagatgctgaatgtcttatccctcgccggtatcacgccgaataaaaacgagctggatcagtttgctcaggccattcgtttaatgtccactgactatatgatgccggttggcattccctacccgtggccaggttcgaccgcgcctgtcgggttcggcctgatggtcggccagtcgtttgacggagtgacgtaccctaaactcgcggcagcgtatccgtctttagtgctccccgatatgcgtggacagactattaaaggcttaccgtcatccggtcgtgcgctgctgagtcttgaagcggacagcgtgaaatcgcacgcacataacgcctcttcgaccgcaaccgatctcggcactaaagagacccttgagagcggtctacacgaccattacggtgtccccagtcgtgacaatccgtgggaaatcggtggggacatcagccaacgattcaacccgtcgaatctgggatataccgacccggcagggattcataaacacctgatagagctgggggcgcatcttcataccatcattgttgatgcttttggtagcgcagagaacaccgtgaaaaacatcgcatttaactacattgtgaggctcgcttaa

SEQ ID NO: 207192 - DNA, 450 bp, Klebsiella oxytoca
gtgaacgcggacttgctgctgcaggagatgcgcccggagacaacggtccagttgctgccggaatgggaaacctatctgggactcccggagtgcaatatccccaatgacgattttctggttcgccgtgccgctgtggttgagaagtatcaccgtaaaggtggtctggcgccgtggcagattgaaaacgtcgccgccgcgctgggcttcaccatcgaagtgaagcaggtattaccgcatcactgcctgcgtaattgtatggccagaattcattctaaacgctaccggtttttgctggtcgtgacggtaaaagatacgccggttacccgcttcactgtcattgatgatgtgttgacgccattaattgaatatcacacccagatgctggaatgcgtattaacgaaatatcgactcgccggaaccgggtacgaatatatatttgaggtgaattaa

SEQ ID NO: 207193 - DNA, 297 bp, Klebsiella oxytoca
gtgttcgattccgccgtccaacacaatcctaaaaaagcggtccagctcctgcaggatgcggtcggcgtcaccgctgatggcattatcggcccaaaaacccgcaccgcagtagcctctgcagatgctgaatggctcctgactcgctgcttcctgcgtcgctcccgttattacgccgacatcatcaaatcaaatgcctctcagggtaaatacctcaatggctggtttaaccgactggatttactggcgaacgcctgtcaggaggtcattggcggtcaggtctcggttccccggagctga

SEQ ID NO: 207194 - DNA, 141 bp, Klebsiella oxytoca
atgactatcaagatcatgaaatgctatgtctgcaatcattccataatccacgaaattttcttggcagtaatcgaggacgatctgcttcttctggccgtcgtccagctccttgggaatggctatgtccagataacggcatag

SEQ ID NO: 207195 - DNA, 534 bp, Klebsiella oxytoca
ttgaagtatgccgctgccgttgaaatggctatggctaaaaaactcaaagcagatctggggtttgctggattgattacaaaaaacccactcaatgatcactggtcgccgttctggtcaggtgctgacctttacgacctggattatttagctgattttgtggacttagaaaagcctaaaatacaagagaaaaaaagcgaggcttatggtctaggtcgcaatgttaatttgtttgaagacttacgacaatatgcttacagaacggttttaaatttcaaaaaaatatctactttcgagaaattcgaaaacgaactactattaaaagcgcagggtttaaatactttttgcaatccactaaatccgttacaatacaaagagttaaaagcaacagcaagaagcatagcccgttggacctggaaaaattttgatagccatacattttcactaatacaatcttcaagaggtgcgaaaaataaaaacaaacccaagaagagtaatgttaaagaaatgcttggttttataggaggtgaaaaatga

SEQ ID NO: 207196 - DNA, 651 bp, Klebsiella oxytoca
gtggttgcgctgctctggcagctgtgggttctgccttccatgcgtccggagagcgtcggcagcttcgctaccctgtttaaggtgctgcgtcggccaggtatgattggcggcatgctcgcgacaatcctgattttcagcggccacttcgccttctttacctatctgcgtccgttcctcgaaaccgtggcgcaggccagcgtcgaaggggtttctctgatcctgctcggttttggggtagcgaactttatcggcacctcgattgccggacatctgttggcccgaagcctgcgcctgacgctggcgctggtgccgctggcaatgagcgtgctggcgctgatgatggtaacgttcggtcacgtcgcgctgctggacggtctgctggtggcgatgtggggctttgcttttggtctggtgccggtgggctggtcgacctggcttgccaccacggtgccggatgaagctgaaagcgcgggcggcctgctggtggcgtctattcagctggcgattagcgccggtgcggctggcggcggtgcggtattcgatctcaacggcgcgagcggcgtttttgtcggcagcggcgtgctgctggtcagcgccatggtgatagtgctgtttgcggtaagagtcaagccagtcgtgagcgaggagtag

SEQ ID NO: 207197 - DNA, 621 bp, Klebsiella oxytoca
atgcgtcagaatgcgctgctgcttgagcgaaaatcgacaataccgctctcaaagcgggcgcatacagggaaagtggccgttggagaaagtaaccggcggtggtgctctgacggcttcgagttcagctgtgataacggtgaaaaactgcgggtcacgttcgcgctggactgttgtgatcgcgaggcactgcactgggcggccagtaccggtggctatgacagtgaaaccgtgcaggacgtcatgctgggtgcagtggaacgtcgcttcggtaacagcctgccagcatcccctgttgagtggctgacagacaacggttcagcctaccgttctcatcagacgcgtcagttcgccagaatggtaggactggagcctaaacatacggcggtacgtagcccggaaagcaacgggatggcggagagcttcgtgaaaacgatgaagcgtgattacatcagcatcatgccgaagcccgacgggttaacagcggtaaagaaccttgcggaggccttcgaacattacaacgaatggcatccgcatagtgcactgggatatcgttccccacgggaatatctgcggcgacgaaccagtcatgggttaagtgataaaaagtgtatggaaatatag

SEQ ID NO: 207198 - DNA, 252 bp, Klebsiella oxytoca
atgtctgccgtgaacgtcattcagctcctgctggccaaaacctacgtcaaacgtgaggagctggagctgatgcgtacccgactgcagagcattgagaacactatcgcggggctacccagtcaaaaagacctgcaccagctgcagctagaaatgagtaatttgcggggtgacctccgcgaactgggcccggcgattcgccaggtgaaacatgtcagcgatctgcttctggaaaatgagctgaaggaaaaataa

SEQ ID NO: 207199 - DNA, 543 bp, Klebsiella oxytoca
atgagcatcactatcgaaaaaatggatgttttgtctttcaccattaccggcgctgaacgcttagatccagtccgggtgatgattgaaaactatgagccaggaaagggaagaattactgtcacctgctacggccaagcatggactggcgcatggtttgcgatgggtggtggttctgttcaggagttcattaagcgtgtcagcaacgactacctgatcgggtgtttagctccccggcttgaaagctcggtagacgatgataacgacgccaaccttgaattcgttaaatcgcaaatcatcaagcttcgccgcgaacaggaaattgataggggtgatgcccgcgaaatgtggacagaggccgaaaatgcggaggatgtgaaggcgaactgctgtgattttatcgttggggacaagcttttgaatttgtttggcgacgacccctggtatgccggatggccgtctgtacccaatccgaaatatcaatatctcgatcgcatcctgaatgcagttcgtgtcggcctggtagaaatggagcgtgcagcatga

SEQ ID NO: 207200 - DNA, 594 bp, Klebsiella oxytoca
atgaaattcgaagaatggttatcgcaacaaggcggggtaattgaggtcgattgtggctgtgttaccacggaggcgttttaccactggatgcgtgtggcttatgaggctggcaccctcaccaatgaggataccaagcagactggcaactctccggtaatcggcattgacctggcggccggtccagaccgtactgtcgaggttcgctacgttgcgcctcctggttacgtgatggtgccgaaggagatgactgacgctattggagaggctatagccatgcatgcgaactgttgtggtggtatagcgcttgatatttacgaagccatgctcgaagccgccccgcatgatacccccgctctgaactcgctacagagcgtcgatagtgttgtaggtagatgggttccggtaagcgagcggatgccggaagatggccagcacataatcatattttgcgatgacgcattcgttttatctgctcaataccgggatggcgaattttttgacgttgttcgtgacggtgatgagttttttgaaactaccagcaggtgcgtcactcactggatgccacttccagccgccccgcaggaggtaaggtga

SEQ ID NO: 207201 - DNA, 204 bp, Klebsiella oxytoca
atgcgcaccattgaggaaattggcaggcatgcagcattgctgaagtggaagcgtcagtttggcccatttgagaaatgcccggtctgctacgggcttctttcttcctgcgagctgtgccacggtagcggcaaggtgattcaggaagatatcgactcttggaatgacccaattgccaagattagacgggaggcgactgatgcctaa

SEQ ID NO: 207202 - DNA, 513 bp, Klebsiella oxytoca
atgaattgggaatttactagtgccgactggaacctggttattgcagcagttacggcatttggtggcttggctgcggcatatgcagcattcttaagtagacagacagcaactaaatctcttcaactgcaaagcagaatgaatgcttatgagtcattaaagaactgcgcagagagggctaacggatatgctaaagggaagcaaggttctgattggacatttcatgatggagcaaacattgtcagaagcctgcgacaggcgatgaaaatcatacagggttatagtgagtacggtgatgacaaggaaagggaagaattaaaagaatactttataaatcaaattaatatggagctatttgaagagttgaaccaccaaaatgcgcctggagctttctttaaagggacaggggattcgtctgttgaagttaatatttacgagcaatgggaagatattgtcgcttttttcaacttaatggttgccacagatgctgatcttgcagattcaagatctgaataa

SEQ ID NO: 207203 - DNA, 483 bp, Klebsiella oxytoca
atgagcccagactcatggagtgctatcgctggttgcgcctctgccgtcgctgctggcatcagtctttttgttacatggaaaggaattcattttcagaagcaagcattcagagaaacactaagaagaaatattcaggatgcactcacttatcaggccgaaagggcaaatttatcttctacggggaaaagtgatgctgaatggactttcccgcaatttgcgaacattattctcgccatcgatacggcgagaaacatggtatctcgtttggataaaaacgcaggaatgagcaaggaagaagcgggcgaatatttcttagaacggctgaaccacaatatcgtaaactcatttagaaagggatcaccgcctgatggggcctttcaaagcaaaggtcctatatcggagattcgtgaattagttacgctatggaatgctaatgcccattttctggggtttagagatgtgaattttagccctgacctttga

SEQ ID NO: 207204 - DNA, 462 bp, Klebsiella oxytoca
atgagtcgcctaaccgccatcgccagcgctatgattatctgcctgatggtaatccttgggtggctggctaatcactactacgacaacgctaccaggttcaaagagcagcgcgataaagccactgaaaagctcagtctggcgagcgccaccatcactgacatgcagaaccggcagcgtgacattgctgcactggatgccaaatacaccggagaactggcagatgctaaagccactatcgatcagcttgagcgtgatgttgcttctggcaagcgtaggctgcagctcaacgccagatgtaccgcgaacggagcgaccgcaaccggcggcctgggcgatgcttccggcccccgacttactgactccgctgaacgggattatttcaccctcagagagcgaatcatcacagtgacgaagcaggttggttatttgcaggactatatcaaacaacagtgtatgaaataa

SEQ ID NO: 207205 - DNA, 246 bp, Klebsiella oxytoca
atgacaactccatatcgcattgttgaagagtatgttttttataaagaaggtctctcaccagttgttcatgggagggtaactgtttcgtatggggcgccacaggaggaatggacctgggaaaccaattatgtggataaaagtcatcgcatgactcatgttcattctgttgagcaagctcgagttgcactatttaactatgttaataatctcaacgttgaagagtgtgtcgcggctgaatactattga

SEQ ID NO: 207206 - DNA, 207 bp, Klebsiella oxytoca
atgtccgacatctaccaaatcaccctcactacccaaacaggcgaaaccttcaccggaaagatgaccaggagtcagcctgagctggttaacggctttgtaccgcttgcgaccgagacgggacattggttgtatttcgctccggccgatgtaaagtgcgtggagttcacgccggtaccagcagaggaacaaaccaatggtgtcagttga

SEQ ID NO: 207207 - DNA, 168 bp, Klebsiella oxytoca
atggtgtcagttgaaatcaaaagcaggtggtgggttcctgtctatttcaggacgctgacagtgttctgcttgatgatgcgttgcgagcctgattaccaaaaggtgggtaactttctcgttaagcatggcattagccagaagctgaagtatgagcctataaagaaataa

SEQ ID NO: 207208 - DNA, 279 bp, Klebsiella oxytoca
atggctaacgatgacgagcgcaggccatacccgccagttaacttcatctactcagaacgctggcagccatataccaggctgatccccgctaacgaagtgcatgagtggataaatcgccaaatcctcagcgataccggcagcatccataaccctgaccacgaacacctgcttgaggctgatctctgcttcatatgggcgtcagactctttcgcgaacaaagggcgctacgttctcggccaggccgaacaagtaatgcttcgcgccggatggactgtttaa

SEQ ID NO: 207209 - DNA, 252 bp, Klebsiella oxytoca
atgttcgaatggatacaagaaaaacatgtaatttctttgggctgtggttttttgtctgttgtcttttggttgatttctgtttttgtgaaggccaaggaaaaccctaacgttgttaaattaacaatgggcaaaggagaaaaaccagtagatctgcataatttggttttaactttgcagcttcaaaccaaattcaatgggttagccgcgtttttcgctgccctagctattcttggtcagattggcggcgtgtaa

SEQ ID NO: 207210 - DNA, 534 bp, Klebsiella oxytoca
atggcactcaccgacaaacaagatatgttctgtcgcgagtacctcatcgatttaaacgccacgcaagcggctattcgggcggggtacagcgcaaagacagctaaccgcaccgcgtccgaaaacatgtcaaaacctgacatccagtcaaggattgctgaactaaaagcgcaacgcaatgatctggtaggcataaatgcgacatacgtcctgaatcgtctcgttgagatagaccagatggacgtgctcgacatccttaacagcactggcgagctaaagccggtggcggaatggcccaaagtatggcgcacgacgctatcaggtatggaagtcatggaaatggcatccgatggaaatgaagcgccgctgctcaagaaaattaaatggcctgacaaggtgaggaaccttgaactgcttggtaaacatattgatgtcagtgccttcaaagagactgtcgatcacaaatcatccgacggcagcatgacgccgaagccaaccgtcatccagttactacccgttgagcctaaacatgagtga

SEQ ID NO: 207211 - DNA, 1248 bp, Klebsiella oxytoca
atgagtgaagcagttcaattgccgatccccgcgaaacttgcgccactgttcactgccgtggataagcgttaccggtgctcgcatgggggacgtggtagcgccaagacgcgcacattcgcactgatgaccgccgtgaaggcgtatcagtcgatgatgaatggtgaaagcggcgtggtgctctgcgcgcgcgagttcatgaactctctggaagagtccagcatgcaggaagttaaacaggcgatcctgtctgtgccatggctggcggctaactttgatatcggcgagaagtacatccgcacaatcgacaagagcgttaactatgttttctgcggtctacggcataacctcgacagcatcaagtcgaaagcacgcatccttctttgctgggttgatgaagctgaatcagtcagcgagatagcctggcagaagttgagccctaccgttcgtgaagaaggctcagagatttgggtgacatggaacccagagcgatacggtagcgccacggataagcgctttcggaaagaggctggcgacgactgcattaccgttgagatgaactacacggataacccgtggttcccggacgtgctcgaaggtgagcgtcagaacgatcagcgccgcctcgacccagcaacatacgcatgggtatgggaaggagcttatctagaaaactctgataagcaggtcttggctggcaaatatcgtatcgctgagttttcagagaacctatggaaagaagcagagcgcctatatttcggtgctgacttcggcttcgccaaagacccgaacacgctgactcgttcgttcatcctgcacaaccggctttacatcgagtacgaggcatacgggcagcagactgagctcgaccacatgccggatctgtacgacacaattcccggatcgcgtgactggcccatcaaggccgactccgctcgacccgagacgattagctatctcaagcggcagggcttcaacatctcagctgcagagaaatggcagggtagcgtcgaggacggcatcgcacatcttcgcggattcgacgaaatcattatccatccgcgttgcaaaaacgtagcgcgtgaggcccgtatgtggtcgtacaaaacagaccgcatcactggcgaggtattgccgaaactggcagacggtttcgaacactgctgggatgccattcggtacagccttgacggacacattaaacgtaagagccagatggccggcatgatgatcccaaaaaggttacgataa

SEQ ID NO: 207212 - DNA, 417 bp, Klebsiella oxytoca
atggaatggtcagtgttttggtctgcagtttcggccgtgtttaccggctttacagtattgatagctgtttgggcaatgttccgatggcggaagcaagaggaattgaaagccaaactgaatttcaaaatggccgtagctaattactcatttcaattaacgcaaatgcctgaaacgctcaataatcctgtggtaaggcatgcgaacttggatagcaccaagagactcaacgaattgcttgctgcctgcaacaatgcctggatgatatgcgaagggttattggacgataatgcagaagtgaaagagaattggagctttatattcaaccataataagttgtacttcagtggtgatctggactctgcgattcttggccaggcatgtataggaatattgcagaataaatttgtattcgattag

SEQ ID NO: 207213 - DNA, 519 bp, Klebsiella oxytoca
atgaatgacgatcaagcaactaacgccgcggacccttttgatatatttgattttaaagacccttttagtcttttaggcggcattgacgcaaacaatgttattgccttttttgggttaatatcccgcgttgaatatgctgccatggtgcaaggttttgtaaacggaggggcggggcagaggatgaaggtcgactggctcaagtttgcaaagagtatgaatggaaaactccttgctctgggatctgaaaaggttactcaaagtgttaactatttgcgtatagaaccccctttgcaatacatgaacactgctaagtgggagcatagagtatatgaggctggtttggttcccgatgcatttgcaatcctcgcagctaaggacgtaagaaataacttgttccacgggataaagcttaacaatccagaacatgcaaggaacaatgatctgattgaagcagcttctgttgtcttccgtggttgcttgatggcatgcccagagctcaacgcctattacaattcataa

SEQ ID NO: 207214 - DNA, 699 bp, Klebsiella oxytoca
atgaaaaaacttgagataacttcagggttctgggagcgtgtttccaaagcgagagcgctcaactcattgacacaaaaagaattagctgagcttgttggtgtttctcaaaggcagatagctgcgtatgaaaatgtagaatcacaaccaagagaaagaactttaatgaaattagctcaggctctgggaacaacacctgagtggctagctactggcgaaggtgaaagcaggattaaatcaagaatatctcctgctgatacagccaaaaagattccagttctaaatgaagatcaggttttttttcatattgttagcctggccaaaggcgagcaatatgctagatatcaccctacaaccttagagctctcacagctagcattcgcactgatgatgaatgacgaggcaatgtccaagttgttcccaacaggatcggttgttatatttgagccatgcattaccgcgaaaagcggtgattatgttttggcggttcatgcggaaaagcctgcaatttttcgacaacttcttacgggaatggactcggcacttctttcccctcttgactcccgttatccctccgacaaatggaacgagaaagacacattcctcattccggcagtagctgtagaaacataccttcccgcaagggagaggttatgggatcgagatggttacgaaagtctatcccaacaacaaagtgaataa

SEQ ID NO: 207215 - DNA, 699 bp, Klebsiella oxytoca
atgagaggttttattgcgctcagccttttaatggcatcaggcgtggctgtggctaatgaaaatcttgtttgtgagtatgcagtcggggatttttcttcacctccaactcttctcactaaaggcagcgcaaatgtgatattcaacggaaaatcttttacagcatataggccaggaggctcttatgtagtaagcccaccactgactgaaaagaaagatggtatgattttcattgatgataaaactaaggtatttgccgctagccaggacaaatctaactttgcggtatctgaccgaataaagaaaactacagagcagtgggctaaatgctcagttgatgtcgccaaagatggccaagatagaacaaaatcagacgtcaaagagcaaatgaaacgaattgcatccattccgtggggcggtaaagaggcacataaatttttcctcaaggagactcatcttttcatgcttcttgaatgtggatgggctggtagtgtagggttttcaactggctataaaccgcttgttatgattggagaatcgtattaccagggagacaggtcatcatttaaaaatggagagtattctataaccttcaatggtggttcaatgagagttgcatacaaccctcaaaaggttagtggatatatttcagatgcacacagttttactccatgctcagcagtgcgcttaggagaagattga

SEQ ID NO: 207216 - DNA, 3381 bp, Klebsiella oxytoca
atggcagagaacgctggcggaatttactacgaattagacattgagtatcaaaagcttcttgttggtcagcaaaaaataaatcagagattagaccagcttgaaaccggctttgataatacaactaaggccgtaaccaacactgatcgttcaatgtcaaagctttctcgcgtggctgtttcattggctgcggcgctttcagttgagcaggttgctcaatatgctgatgcatgggcagcagtaagtaataaacttgctaactcagttaggcccggcgaacaacttgctgagattacagagcgtgtattcaatattacacaacaaactcgtagtagcttagatgcaacagcatcactatatgcccgtttagagagagctacgcgacagtatggaactagcgctaatgatcttgccagacttacaactatcataaataaaggctttgtcgtttccggcgcaacggcgcaagaagcagaaaatgcaatcattcaattatcacagggtcttgcatctggagctcttcgtggggaagagttcaattctgtaaacgaacaaggtaatcgcctgatcgtagcacttgctgactcgctaggtgttagtgcgggtaaaatgcgcgaactggcagcgcagggcaagttaacaacagatgtagtggttaatggtcttttgtcccaaggggcgcaaataggtgatgaatttgccaaaactaccacaacaataagtcaggcgcttcaggttgcaggtaataacatcactaaattcttcggagaaaatgccagcgtaaaggcaggggtgtcaatattcaatgatgctgttatcggccttagtgaaaatattgatatccttggaatagctctaacggcagtatctgcggtaatgggcggaagatatgttggggcgttaactcttgccacgcaggcgaaattatctggtgcatcagcagcaataaaacaacaggtagctgaatataatgccgccaaagctaccattgccagcgcggaagcagaaatcaaaaatgcccaggcaatcattgcatctgagcaggtcaaggccaggcagttagccactcaggccgctattaataaacaatatggtttagccgtttcctatcaggctgagtatgcagcaatacagcggaacataacagcagctgataatgctgcaacagcagcaaaggaaaggcttgcggcggcaactcagcgggcatctgtagcaaacagaacttacgctgcatcggcaacccttgccaagaatgctctttcattaattggtggccctgccggcgcagcaatgttggcggctgcagctgtttactacttctaccaaaaagcgcaacaagcgaagcaggaaagcatcgactttgctgattcgcttgatgggctcacagtgaaaatgaaggaaatgagttccgctcagatttccgcggctatagcaaaaacggaacagtcgatcatcgatcagcgcgatgctttagcggacctgcgcaccgaatatgaacaactggagcagaaaaaaacctttattgaacaagcagctcaaatacgcggcgctactgcggttgcaggtgacttgtcggaggttaacagagatttagcgattcaggccggaaaggttgatgaggccgaaacgaagttaagtcggacaacaagttctcttgggttacttcgagctcaggcgaacggtcaatttcgggaagggatagatttacttagaagggatggtcaggaagctggcgtagtggctggcttaatgaataatcttggagatgcgataaatttcgcatcacgagcgaaggagaaatttaattcttccagccttaaggttgaacgacccaaaaatgttcaggactacttagataagttacaggagcaggtcactcttcagagtgaacttaacgacagaaaacgagcgcaattaaaggctgaacaggacatcagaaatcttggtggttcggaggccgacgttaatcttgccagggatagagcagctgcagaatatgatgcccaacaggcgcagcaaaacaacaagaaggctaccaaggaatcagcatcagaaaccaagaagcttgccgcgcaacaggaatcagtagcccaaaaactcgccaacctgcgccagcaatcagagctagcggctagctcaacggaagagttaagccgggaacaggcgatgctaagggccgaacagtcactcggtaaatcagcatcagtcgatcaggttcagcaggctagaaattacgcggctgctgtttgggatacggcggcagcaattaaggcgcgcaatgccgttcctgagcttaaagaaaatgcagactacaatgcacagaaatcgcaacttgaaaccctcaaggatgcgaaagatgcgcaaggcaatctgatcatctctcagcagcaatacaatcaggctagcgagcagcttgagcaacagcaccaagttaatctggcaaaaattcgggctgggcaagtagtgactcctcagcaacaggctcaaggagagattgatccagttcagcggcttgctaaccagcacgcccaggagctcgcgcttatccagcagttcgagacgcagaaggggcagataacccagcgcgggattgaactgatgaatgctgccaacacacagtacgagcagcagaggaccgcagctcaatgggaaatgctcagccagcagagcctcggctataacatgctgacgagtgcagtggacgcctttagcgggaatgcctcaaacgcaattactggactgcttactggcacaatgtcagcacaggaggcgatgcggtcacttgggaataccattctgaacagtgtgatcaacagcatcgtgcaggttggcgtcgaagcgctgaaaaattacattctcggacagacgctcggggctgcatctgtcgcttcttctgttggaatggcggcaacgacggcttcggcatgggcgcctgctgctgcactggcatcactcgcaacactgggaacaaacgctgcgccggcatctgcaggcatcacatcaactgtaggacttgcgagcggtcttgctctggctggcgcgcgctataatggcgggccggtatcggctggcagcatgtatcaggtcggcgagaaaggtaagccggagatttaccaggccagcactggcaagcagtacatgatcccgggtgacaatggaagggtcatcagcaataaggatatgaatggcggcggcgggctgaatgttcaggtggtcattaacaatcaggcatccaacgctgagccacaatatatgggagcaactcagagtgacggcaattatgtgctggaattcctgatttctgatgcggaacgcaatggcccttacatcagtactctacaatcgacgcttgggttatctcgtaaagcaaatggagcattttga

SEQ ID NO: 207217 - DNA, 2250 bp, Klebsiella oxytoca
atggcagaagttccactcccgacaccgacgcaggttccggtaccaagcaccgatatccgcaatgcggtatttgcaggcgcgaagcttgacgaagaggttaccggtactggtgaattctataccgatcgcctcggtgtgcagcgcctgaccaatacggggcgcacaaatctatttaatttatcccaacaggacagagaaagccggttcaatgcatttatccagaactcggggtatgaagtaatcggtgattacactgctggtccgttgacgctcaccgattataaccagctcattcgctataacaacgagttgtataaactcaccgcagcgacagatatcccgtttaccgcggctggtaatactgacgaaacatggaccggtaccgacgctgcgcattttgtatctgtcggtgatgcagcgcttcgccaaaacctgggttcaggcgaagagggtatggggacctggttaagtttccatgttcagaaagggatggttaagcagaccctgaatgattttttgaacaattctgtaaaatttgtcactccttttatgttcaaaagcctcgcaactgacggtaactggagtgcagctatagttgcagctgatgctaaagctgctgaacttggtttacccctgatgggtttcggccaggtattttctgtcagctctttggctctgatttcagaccacatcgaaggagtgcgatttactcccgcagacggatataccggcgcgggaccgacgtttaaaatcaatcaggttaccggaaatctttatttcaaaggcagctgtaagggctttacgtccgtgggggctaaattcattcgtggtaactattctggtattccgcaattaaccctcgatgcatgcgaattttcgaataatggaagcctgctacgcaccacctgcgttaacgccgtgaataccgcatctgattttattattccggtagtggatgcaacggggtttgtggttggggattacatctggattggcgattccaaatgcatgattgcggggatttcaggcaacaccattacgcttgtcaataatggcagtgcgccaacactgtattcaggcggaacaggaacaggcagttataaagcggggcagttttttacccgtgatggtgatggaaagaacggtgcaacgattggcgaaggtggcacagaggctggctggggtctcaccatacagaatggtattaaactgatgaataatggctggttcggcctgtttcattacgtcagggccaaaggcggaacggtatcaatcaaaggaaatattgaaggtggaaataacggttactgcgctatggggctggcctatgtccaggggggggaaatctccgggttcaagttttacgggaacgggaataatggccttgatattttcgagactactggtgatttatccatttctgatggactcacttatagcaatggtgttgatggcgtttttgcctgtggtaatgataccgggccaaaaatatccagagtcaagagtcgaaataacttacgcataggtatactggcgtacggacgtaacgtagccccggttggtttcaacatcacagattgcgagtgtactgataacggactctatgatgtttgttatacaggggttcgctccttaaactttgcagctaacaccatcggaggggccagtacggcattaaaaattgagggacggaatggattgcttaatccggacggcgtgactgtttctgagaatatttttgctaaagaatcgttaatagaagatattaacgccaatatcggcggctataacgatgggggagttagcggagctatctctgttctgaataaccgctacaacggcagaaacccgaaacataccatcagcaactttaaccgctcacagagtcgctttgtgcctgttggccgcgtgagcttcacttccagttataccgcagccgccggagcaacaatcagcgtaccgctggtattctacaaaccaaatgctacgagtaatatcgatgtgctgggtggccaggtggaaattcagatctgttcaaatccttcattactaaccatagggacggtaaccagtgcagtgcgtactgcaggtgtggagctaaataatggagcaacaacaaatgggaaaatcctggcaatggcagctttcggtacgctctcgtacaacttcacactgacaacggcagggacagtttaccttaacgtccgctcgcaatatggcgacggcgtcattcaattaacctggacataa

SEQ ID NO: 207218 - DNA, 864 bp, Klebsiella oxytoca
atgaaaagagggattgttacaacgacaggtgttttcgtcaaagaatcagatgcgttaataataaaacggatgatttccccattggagctaaattacttcgcactttattgggacgaaatcgtcatgccagaaaatgaccaagcgaatttctcatatgaacctgtgaatgaattactatcttgtggtattttaaaacgtttatactttgattgtggtgggttttcaagtgacacatatgcatctgaaatagtagatttgcaattcgctgcgcttgatgtattaaggcgtgaggagaactcaactgattggcgtcttcaccaaattggaggtgaacttctttatcctgaaaataaatcaatgaatttggtatgtaaggagtcgattaggcttgagttattagaggtgctacctgttcccagtacaaatatccacatccacgaaatcctagaatttaaggagagacgagcgcctgaacttatcgcattgcattcttattgtgatgatttgtaccttgaagtgttaaactctgctgaccctaacttacaaagagctaagagttttttcaaattaaaaaaagcgatagaggatttagataagctaaataaacaggagtggcagagcccgataaaattcaatatggatatatcaagtgagtttgatatatccaatataagagcgggatatgctgcattacttagtgcgactcaatcctctatgccgataactacagccattattggcggcgcgctatctattgctgaaggttttgtaaaattgaaggttgaactaagaagcgttagaaaaaataatggtgtaaatcatatgatgtatttatctaatgctaggcgagagggggttatttaa

SEQ ID NO: 207219 - DNA, 165 bp, Klebsiella oxytoca
atgcgtgaagtgaatttttttctatctagcaatcgctttggtggtatttattttttaatgagccttggctcggccataacctatttttaccctagtgagtcctggtatcttataccgtctatagcggttgttattggttttcagaaagtggtcggggaggagtag

SEQ ID NO: 207220 - DNA, 1113 bp, Klebsiella oxytoca
atggatgtcaatgaacttagagaaattcttatccagcataatggtcttcaaaatactgatgaagtttatacgttttattatgatgaaacgaataatatccgaaagctatatttaaaaggttctggctttaacgttaaaaaagcggataatttcatccttgcgggaatactacataaagggttaagcactgacagtgattattcaactctatttcaaatgcttaatcttcaaaaaaacatccatgagctaaaactcaagcatattgctaagggtggttttttggatatgcttaaatctgataagcttttaactattctaaaatggctcatcgaaaataagttctatatccattattttaatcttaatatcacatactggtctgttattgatattattgattctattattggtgagttacatcatcctttttatatcatgaatcacatgtcacttaagagcgatttttatgagattgcaaacagcaattctgatgctttcctgaatgctctacatgaatttaactacccagatattccagaaaaaaaaactcatgagttttgcctgtggcttatcgattttacatgcatgcacagttgtatactgtcggattttcgagcgaatgtactagaaagtttggttaaagaatctctgaaaatcgaagagctaccgttcatatcaggatttcatggtcgagaactgatcaataactttatggtattttatttaagaaacctgtatctatttaaaaattctattcacatttttgatgaagaaaaaagcattcaggatgaagttaaaaatttcccgttaactgaaaatggcataccaatacagaaccatgaatttgttaaatcccacaactcagaggctgtccaactatctgatgttatcgcaggctttttggggaagtatttttcatacttaaaagatgtgagtgacgagcaattagtacttgataaggcaggcttaactagcaagcaatatgagacgttttctgcgttaaaacacattattgatgtttctgatgatgttagtagcggattttttaatgtagttagcagcgagggagagcaacgaagaaataaccgatttttacatggtttaaaatcgtaa

SEQ ID NO: 207221 - DNA, 477 bp, Klebsiella oxytoca
atgcgtatagccgtaccgcagtttggcgctattaatacggcttttttgcgcgtcttttttggtttcacaggcctcgcggttattttatttatctttaaatcttcttttgactttaaagataaatttaagtcctcagtgattcttggcgtcattaattctggattacctttcctgatgtattgcctggcggccaaatggttaccggctgggtattcagccattctgaatgcaacaacgccgttgatgggggcggtggttgggtttgcattttttgcagagaaattaaccttcagaaaatgggctggcatgctcctgggcattgtcggaatcatcgcgatcgccacaattggtaaacccctgtcagcggagaaacaaattgccggcattattgcctgcctcatcgcgaccagttgctatgcgatcgccggttttctgacgcgtagctggatttcaaataatgatgaaggcgctcagtga

SEQ ID NO: 207222 - DNA, 2970 bp, Klebsiella oxytoca
atggtaatttcagcagcatttcaaacaagagcaaggacaattgatcatctagggcgtgagcaaatagctgattgtccaaccgcaatttccgagctttggaaaaatgcatatgatgcttacgctcgtaatgtttctctaaatatatttgacggcaatacacctgtggcaactttagttgatgatgggcatggtatgtcgttagatgacattatcaataagtggcttacagtaggaacagaatccaaggccacaaaaaaagatattccatatgaagatagaaacggaatagatcatattagagcaaagcaaggtcagaaaggcatcgggcgtctttcttgtgcggccttgggctcattaatgcttttagtttccaaaaagaaagatagccctcttgtagcttgcctgctcgattggcgtatatttgaaaacccatatttgatgcttaatgatataaagatacccattatggaatgcagtgataacaatgaattaatcactgttataccggaaatgttcgatgctttgatgggaaatctatggggtgatggtgatgatatattacgagataaccgtattgaacaagcttgggaaaattattctgaattagaaagaaatgaaaataattatattacaaaagaagctatcgagaatactgtaattaatgctttttttgaggaaaggcattttcaatcttggcctgtgtggaataataaaaccactcacggcacagccatgtttatagctggaattcatgacgatttaatagctcagctatcaacagatgctggttcagaagctcaaggtgcagaggttcgggctaaagaacgctttcttcaaacattaaatagctttgttaatccatttaaaagagaaggcgaagaacagattactgatttcaatacaagtgttgtcgcatggaatggtaatctgcaacgatttattatcgatgaagttagaaactttgatatttcaaattttgaccagctagaacatatagttgaaggaagtattgatgaaagtggattattttccgggaaagtgaaagccttcggagaatggtttgataatattacagtcaaacctaaatctgcatataagaccagaaaagatactcgctttggtcctttctttttaagattaggcacatttgaaattataagaagaaatagtacattatcagatgaacagcatgcgaccttcgaccgtatccgcgagcagtttggtggagtaatggtttttcgtgatgatttacgtgttatgccatacggacgtgaagataatgacttttttgaaatcgagaaaagacgttcaaaaaatgctggtttatatatgttcagtaatagggcatgttttggtggtgtatatataacgaaagaacataaccccaacctacgagataaagcaggtagagaaggtataattgacaataaagcatctaagttatttagagagatagtcgaaaacattttaatagaaattgcaaaaagatttattggccgcgcatcaaatatacgagatgaaaagctagaggaaataaatgctaaacatgctgctttgaaagcagacgaagatagaaaaaaattattacgtaaagagcaaagaagaatcaaaacatcgattcaaagagatcgtatttctttagaacatttaagaaatgaattttatgaaatatcacagcttctaagcgacaagaataattttaaagaactagaggagctattacagctcaaagaaaacatcgacgtattggatggtaccctaaaaaacctatctttaggtacagtaccaagaaatttagggagtatagagaaagactaccgtcagtaccgcgatttagagattgatgctaaaagtcttttaaagcagattaataactctgtatactcagcacttgatcattttactgttaaagatgattattcaattgctgagaaagactttcgtagcaaagcagccatattacatgcaaaaataagaaaattttccaataaaggacgtaatatattaaaagaagagacgttgcgtttcgaagagacaacaaacaatacaaataaagctttccatgaaaaaacatctcaatatttatccgatctacaagaaaatagaacttcactcaagaaaacacttgaaaatttagatcttgcttatcagattcaagacattgaaataagtcaaacctacgccccatatattaccgcattagaaagcttaagagaggaaattgatttagaaggcctcgcgatctcttcagtcaacgaaaatacacggttgaagaaacaggtagagcaagtgaatgcactcgctcaacttggaataactgtggagataattggtcatgaaatcgaaggtttcgatatgactattgagcgaggtataaatagactgtcatcaacaaacctcgatgaatatcagaaaaatgctttatcaagtattacccaagcacatcaatcattaagcgattcttggcgttttttaagcccattaaaattatcaggagataaggtaagagctttcttgagtggaaaagatatttttgattatgttaatcattttttcaaaagtaaatttgaaaaagattcaattgaattttcttgctctactaatttcctggatatttcattatatgatcaaccagccagaatttatcctgtgttcattaatttagtaaacaactcacgatattgggttaaagaaactaaagaagagcgtcgaattattaggttagatgtacttgatggtttgatatatgttagtgataatgggccaggggttgatcctgatgacgtgtccgaacttttcactatatttttctccaagaaacaaagaggtggtcgcggggttggcctttatctctgcaaacaaaatttagcagtgagtggccatagtattttctacgaaacaagaacagagaaaaaaatactaaatggtgctaattttgtaattaatttcaaaggaattaaaaatgcttga

SEQ ID NO: 207223 - DNA, 624 bp, Klebsiella oxytoca
atgtctggcgatattaaagcagtatttgatagcaatttaattgcaactcaggcaggtaccgttcaggtatttcattttgacatgacttcccgtgagtttatcggtaccgaggaaacttatattcatattggggttggcctgcctgcattttcatgccttgaagaacctccggtacaaagtgaatatcaggtagctattcgttctgacgataattcggcctggtctgttactgaggattatcggggtatcactgtctatgacattcagacgctggccagtcgcgttattaccgaccccggccctatacccgatactgtaacgcgctcagtaccattaacgccatacgacaaatgggacggttctgcctgggtaacagacgcagatgcgcagcatgcggctgatgttgccgttgctgacatgcagaaaacagagctgattactcaggcatcggcgcatatttccattcttcaagatgcagtggctcttaatatggcaactgaagaagaaaaaacacgtctgtcctctttacaagcatatcgcgtattgcttaaccgggttgatacatcccttgcgccgaatattgcttggcctgttacgacgttcagggagaatgatgatgtctaa

SEQ ID NO: 207224 - DNA, 2103 bp, Klebsiella oxytoca
atgtctaatttacctgaacaaccggcatgggaatctggtatacatcaacttgaagagtcagaaagagctaaagctggtcctggtggcatattgaaccttcaggcgtcacaacttgccaataggactaactggctgcgtattctggtagagtcagccagtgattaccgtgaatatacgttctataaaactgtatcagacccggatggtacaatcacaggtttagctaatacaccaagtggtaaaatatttcgtgttgctgagggagttggcagcagtttgtcttttaattattacctcaatgatgccggggtagcactgaaaattgcatccatgcctggcatgggtgcaataactaataccgtccgtttttttacagccttgcctgatgctcaaaatgatgtcctttacggcaatattctgaatggttctaaatgctgggtaacaagcactgaagatatcaccctggcagacgagtacattaacaacggtggtacgctcgaggcgaccgggaggcagatgccgtctcaggaggcctttgaaaagatcgctatttttctctctttaatgaacccatctgtttacaagggaaatggccctgtatttccgtggcagacggacctcgccgggaaagtgctgctgggctatgacagtgagaaagaatgcgttattggtgccggacttcttacaatcgacaaaattaatgagctgatccaggttcagataaaaacggcgctgcagcaacttggcatggctatgtacaaaggcgatggacctgtatttccctggtataccgatgcgaccggcaataaagtgctgctgggctacgataaagatctgcaacgtgtggtcggtgctttttctcccaatactaaccaggtagtcagggcccccctcatcccgcttgctgaacatcttcgccccattgtgaaggcgatgaacattatgcagggttacgggcaatccctgagcgtaggagctatgggcacaccagtgatctcggtcactcagccatactcaaacctgacattttcgaccggcccgcgcggtttcaaccatatttacacagcactggcaccgttggtggaagacagccgcactgcgccggatggtggcactaaccgtggcgagacgttttgttccggcgcggcgaactacgcgacaacgctcgcggccatcgagaacggcgtggacccgtccgaccacgtcattttcgcagcgaccgccggtaagggcggcaccaaaattgcagacctggttaaaggcacagcctggtataactcgaacttcctgccgcaaatcaacggcgcatacgcgctaaacaatgattctgcagttcacgtcgtcccctggttgcagggtgagaccgataatgaccagtcaccaccgacaacctatccggtttatcgtgggcatcttgagggcctgcaggtcagcgttgagggggatataaaggctatcaacggacagctgtcgccggttcacttcctgacgtatcagtgttcctacaaagtcagaaccagtacagccgttgcgctggcgcagctggatttagcgaacgaaaacgagaagtttcacctgacgacgccgtgctaccacctgccgtttgcgtcagatggcacccacctgacaaacgtgggctacaaatggctaagcggctatatcggtagagcctacaagacactggtacacgacaagtgcgcaccgcagtacctcaagccggtgtccgctactctgcgcggacgtgtcatcacgctgctgactgaaccgcctgtgtcgcccgtcgttatcgacacgtcgaagctggcacccacaaccgacaacggctttcgcgtcaaaggcatcgccagcaacgccacgcagaccatcgaatccatgatgaccgcaggcaaacaggtcttcatcacgctggctgaggagccgaccgaatccgtgtcgctgcgctacgcgctcgactacctgggcaccgggctgaacatcgtcaatggcgcatccggcaacctgcgagacagtgagccttcaaccattaacattcttggcgtcgagcgagcgttatttaacgtttgcccgcacttcgaactgaacgtaatcaaggtaggtgaataa

SEQ ID NO: 207225 - DNA, 762 bp, Klebsiella oxytoca
atgttaggcttctttcagacacctgttatttattcaggaaatgatttacctgttattcctgaaagcgacatcgaacgatttgaggtcgtttatgaggctgatgcgtatgagcattgggctctgaatgggactgatatgtcgctgacggggttaataaacaggcgattgctgacaatgacaggaggggtaaccggagaggccggaaacttcacgatgaatgtaaatacgagtgcaaaacgagggctgagaagtgataaagccgatagccttatacaaacacaatgtgctgttattcgtgttgattctactcccacggcctctgcgtcggcatcaatactatttggctcattgaatcagagctcaggctctgcggtttatattgatgaaaacccatttattcgccgccagttccgcccgacaataagtgttacaggagagaaacaggcaaacggtcttgcaaacaaatggttgtttgttgccttttctgaagatggaacttctacaacgatgaaatcgatcgtcctggtgggaggtgaaacgccctctgtcgttgaaaaggtgtatgcgcaagcaaaaaccgttggcactaataatgttagccttggaccaatcgactatagctcaagcgttctcggctatcctgtaaagctggatgtggccgaatatattgtatacgacaaggcgctttcgggaattgagatgctttccgtttacatcagatcaaaaaaacgtctttccagtcgaggaattaccattgagtaa

SEQ ID NO: 207226 - DNA, 276 bp, Klebsiella oxytoca
atgagcagaacgattttttgtactttcctgcagcgtgaagccgagggccaggattttcagctgtactcgggcgagctgggcaaacgcatctataacgaaatctccaaagaagcctgggcccagtggcagcataagcagacgatgctgatcaacgagaaaaaactcagcatgatgaacccggagcatcgcaaactgctggagcaggagatggttcagttcctgtttgaaggtaaagacgtgcacatcgaaggctacacgccgccagaaaaacagtaa

SEQ ID NO: 207227 - DNA, 1056 bp, Klebsiella oxytoca
atgatccgcacatatggtgaactgtgcgaaacgtaccttaaagcaaagaagcttgaagtgtcatctgcgtcatatcgcagtatatcttcacggttagaaacactgaaaaccgttgtcggaaacaatacctacattgccgacatccagcacactgatctgctgaattatcgaaatcatttactgaccggggaatcagtatcgccccactccccctggctgaataaaactggccgcgcagtatcgaccgttaacgggctgatgaacactcttacggagatgcttaagctggcccaacgcagcaacttcatcagccacatgccacacaaaggcataaaaatgctgaagcgctcgcgcaaagaaccagatccgctgctgcacgacgagtactacgccttcataaaggcactgccaccagccgcagcattgttatggacaattgcgatccacacaggactccgccacggtgaactatcagcacttgcatgggaagatatcgacctcgaacgaggagagatccacgtttgtcgaaacaaaaccaatgaagggctattcgtgccacctaaaacagaagctggtaatcggacagttacccttttgcaacctgctctggacgcgcttcgtcttcagttccagaaaaccggggcgctcagcaaaacagagatcaccttcaaccaccgggaatatggtttaactgagcagcagaatttacggtttgtctttatccctgatacacgttcccggacaaagggtaaaagctacagcaagtcttccctgggatacagctgggacgccgggttaaagaaagccggcataagggctcgccggccatatcagtcgaggcatactttcgcctgctggttgttaaccgcaggagcgaacccgtcattcattgccagccaactcgggcatgaaaatgccaagatggtttatgagatttactcgaaatggatcgggggaatggatcgcaatcaggtcgagatgctgaacagcactttgcctaccgttgtgtcccatgggtgccccaaagacaaagtgaagaaaattaatttcaagtag

SEQ ID NO: 207228 - DNA, 219 bp, Klebsiella oxytoca
atgaccgcagaaattattgacgccgcacaggaatacatcgacagatttactcaggctggagtagaccgttgccgcattaaccacaacgcagtatcagcgacacactgctgttactgcggggaagagataccagaacagcgccgggaagcggtggcgggctgtcagcgctgcgctgactgtcaggaagagtttgaagaacgtggtaagcatcggaggtga

SEQ ID NO: 207229 - DNA, 798 bp, Klebsiella oxytoca
atgagttcactttaccagctttacaagcataaaggaaagaacggcacaggaacttcagtaaacaaaacatacatagttccagtgtctgaattgtacgttgagcctggtttcaatgttcgagaaatcgaccaggatcacgtcgatgaattccgcgatgcgtttatcgatggtgaatatgttccgccgctggctgtccaggtcaccgagcggggcatcaaaattatcgatggccatcatcgttattacggagctctggcagcgacggaagccggtcatcccattcttcgcatcgaatgcaaggattttgtaggcacagatgccgatcgaatcgctttcatggtcacatcttcgcaaggtaagccgctaacccccatcgagagaggtaacgcttaccagcgcctggtaaatcagggttgggagcatgctgaaatcgcgaagaaggttaagcgctcagtctctgatgtggtgatgcatatcgaacttgtcagttgcgatgatcccctgcttgaaatggttcgtgctggtgaagtggctgcaacaactgctgtcgcgttatcccgcgaacacggcaccatggcggcttctatagccgctcgtcagatggacaaagccagagcgtcgggaaaggcaaaactcactcgcagcgcggcgctgccgcagtttagcgcagcaaaggctcgccagtttatccagatagttgctgatcaggtcgatctcgctctgccaactgaggcatccgccatcctggacaactatcgcgaattcctgaaagaggctggctgggagagtgaagcatga

SEQ ID NO: 207230 - DNA, 756 bp, Klebsiella oxytoca
atgactgatatcaccgaactggcgcagagcctgaaagaggcagcagagaaagcgactcctggtcaatgggtggcatttaccgatacagcgacaaaaacattcgcggtgcataccccgaatgataagcgctgcgaaaatatcattaagtgggcaggttttgattgccagaagaacgcaaaagcgaacgcagagttcatcgccctagctaacccagccaacgccctcgcgctggtagaggcgctggagaaggcgcaacaaacaatcaacgagatggatgatcgcattcgtaagcagaatcgtcacgtctgtgagctatttgatgatggtaaagcgcttcgtgagcgcatcgccgagctggaagacgcagagcaaaaactttgtgctgcgaatgtgactcttgatgctcgcgcggaattgtctgaacgccagttagccgagctggagtcccgcaccgtcaccgctgccgctgctgacgtgctggcagagcgccagcggcaggttacggcggagggatgggctccggagcatgatgacgaacattccaatggagaaatggctttggctgcaagttcttatgcgctttacgcgcacaaaaagccaattgcaccagcaattccatatacctggccgtgggagtctaagtggttcaagcagcaaggtgctcgccgcgacctggtgaaagccgcagcgttaattctggcggaaattgaacgtctcgaccgcgccgccggcgtcgacgtcagagaggctgagtag

SEQ ID NO: 207231 - DNA, 300 bp, Klebsiella oxytoca
atgactatagccattgagcgcctaaaagaagtcaccagggactttggccggcgccacattgcctaccagatggcaagggagttgatagagatttatcgcggaaacggtccattagtctggaatgtgttgagcgatttcccccctgaaattaacggcaaatatctggtgatgaccagctattttgatgttcgaaccgcctgctatgactgcgaatcaggggagtggagagcatcagatggtgtaattacaggcgttatcaagtggatggatttaccttctgctctgcaggaggtggaatag

SEQ ID NO: 207232 - DNA, 318 bp, Klebsiella oxytoca
atggctgagttgcgtgtagaaggctttgcgataatcatcgatagtattgcgcctgaagatatcggcaaatgcgtgcaaacagttagcctcattccaccattagggcgctttaattcgccacaggggcgaccgacgctaaacagttctaaaattgcctcgtggtttattactggagatgtgacagcgaaactgggaaaggaatctcctgcatgggccggaaaggggtgggctctttacctaccacagtatctaatgccgatagaaggcgatgatttcaataacgaagatgagcgccagaaggagcgggagcatgcctaa

SEQ ID NO: 207233 - DNA, 582 bp, Klebsiella oxytoca
atgtttgagaatgaaatttggaagccggtgccggggtatgaaggccggtttgaggttagctctcttgctcgcgtccgtagtttgtctcgcaaagttactacgtgcgggagcgataagaagacgtggaccactaggactatcgctgggcgcattcttaagggatgcacatcatcccaatacatcagggtatcactttctaataaacacgaaatgctacatcggttcgtggcgctcgcgtttgtgccaaatcctaataactacccgcacgttaaccatatcgatggaaataagcacaacaatctgccagagaatcttgagtggtgcacgcatgccatgaacatgaagcacgccaatgaaaccgggctatccaacaagaataaaatgcctgtaattgcagagagagatgggtttggatactggtttccatcaatgcaatcgaccaagaagtacggatgcaacccggcgttagtccacgcgtcgatcaacgggaagcagggtgagcacagggggatgcagtggagttattgctctgccacatccaactgtgaataccagcagctgcgcgataagcaggaggcgtga

SEQ ID NO: 207234 - DNA, 1818 bp, Klebsiella oxytoca
atggtagctaagtcaatcgtcgacattgacgtaaatgacgacaagtttgtcgctttcatggaaaggtttcgcgaataccagagcgcgctggaggatttgccggaagcctggcgcgtggcagctgtcgggattggcgagggcagcaaagagaccgagagggccaaaggtgaggcaaaggggttaggcgctgagtttaacgccgttgctgaagccattctgaccattaacaccggtctcgatcgtcttaataataatctcgacgattcgaagaaaaagcaggatgagttcaacaaaagcacccgctctggaaagggattcatcagcgacgccacgaaggatgcaaaatcgctggccgctcacattaaagatgcgacagtcagccttctttcgtggggtagtatcgtcggggtcttttctggcgttctcggcgtcggcggcctgttcggtcttaacaggctggcggccacgaccggcgcgcagcggtttacctctctgggcctgggtacgagcatcggcgcgctggactcaaccgccattaactaccagaaagcactgagcaaccccaccggtacgctcggcgcgattcgcgatacccagatggacctgtcgaagcgctggacgtttcaggcgatgggtatcaacaacccggaccaggacccggccaaactgctcccgcagatgatccgcaacgcgcgcgatatcttcgtgcagaacggcagcacgctgcagggggcgcaggcgcacggcctgaccaacttctttaccctggacgacctgaaccgcttcaaaaatatgagcgatgaagaaatcaccgccatggagaagcgcgcacagcaagatgcgcgaatgctgcaaattaccgaccagcaggcgcgccagtggcaggattttaacgtgcagctcgactacagcagccagagtatccgaaacacgtttgtgcgcggactggggccgcttacgccgcaactgagtaaactgtctgatgcgctgtcaggtgcgatcgataccgttctgaaatctccagagcttggtaaatggattgacgctctggcgggaggcattgaaaaatttgggaattacctggcatccccggaattttcgacagatgtaaacgagttcatgtcgaagattgagaaaatgggaagcattataggtaaggttattgactggatatcagggaaaaccagcatcaccacttcggatattacctccggttctactatcaccaacccaggtttgcgaacagatccgcaaacaggaaacacatataccccaggtagtgatgatgatccgcatgtctgggggtggttaaaaggtgtaaaacgattctttgaaaatggaactgtcaaggcagttgacccaaccccagctaatacctcagaccggaacaggacaattgctgacaggttcaataaccctgggaatctgcgctgggcggaaggatatggaactgaaaataccagaagtgggaaatttgcggttttccccacgcttgatgaaggcgtgctggcggcgacaaagcagcttcaaatttatggcgccaaaggaattaatacggtaggtgatattgcaagaaaatgggctcctccaaatgaaaataatactgctgagtatattcggcatgtggttaaaactactggatttaatgagaatcagatactgaatctcaatgatcctcaggttattgcgaaactcatttctgctatgtcgcaaaaagaaggggctggtagcagagtttctgagggtacagtaattcagatctataacaataccggcggaaatgcagtcgttacctccgcgcaactgggggccaggtaa

SEQ ID NO: 207235 - DNA, 366 bp, Klebsiella oxytoca
atggagatgaatgaaataattaatgaaataaatcaggacggtctaaaacccactgattcaaatatatataatatttgctatgcatcatctcttcttatggttaatgctgctaaagacgcagcgtcaggcacctacaatggcgatctggcgctaggcagggttctccttatacctcacgatgaatacagggccatggtgaaagaactgattaaaagtgatgctgtatttggtataaacaaaaatccagatgactttgatagggattttcaaatgaaatgcagggccagtcctgatatttacattaaaaaatacaatgaaattttcaggaaaaaaatgaatgagacagataaaaataatcagtggtaa

SEQ ID NO: 207236 - DNA, 2136 bp, Klebsiella oxytoca
atggtactaacccttttggctacaaacaacgcagaaagcacgctggcttctgctatcagcgcaaccgacacgtcgctgatcgttagcgctggaactggtgccgagttccctgatgctgtggcaggtgagagctacttcaagctaactcttaccgatgccgctacaggctcacaggttgagatcgtgaacgtgacagccaaggctggagacatcttcacgattgagcgcgcgcaggaaggaacgctggcccgtgcatgggcggccaatgacttcgcggcaaatatgatgaccgctgacacgctgaatgtgatcgcgcagtacacgcagcaggctggtgaatcagctgcacaggctgctgagtatgcagataacgcttctgactacgcacagaataagttcacgttctataagacctcaagcgatcccgatggcaccattgcagggttagcagcaacgactgacggccagtctttctgggtagcccaggggccggatgcgctttctgctgcatggcagtatcaaaacaaagcaggcgtggccgtattgcaggcaaagcaaccaggcacagctgctgtaaccgggacaatccgagaatttcctacgctggcggccgcacagtctgatgctgatgcaggtaatatcctcaatggtgctaaatgctgggtaacaaactctacagatagcgacctggcagatgagtacatcaacagtgcaggcacgttgacagcaacaggtctaaaaatgccgtctgtcgcgactattgctaatgagttagataagcgtattcctcagggagatttcaaagcaactatgttcccactgtgctatgacccagacggaaacgtaccggcctggtttgatgagtcgagacttgatgctcccgatttaggcccagtacttcgcgctgtcgttcagggcattcccaatgcttgggcgcagtattatcttcgccagtttgatttgagcccaactttatttccggcttggtttgatccgtatggtaatgttccggcctggtttgatgagtcgagacttgatgtcgcaggtattggccctaatcttcagtcgttaatcactgatttagtagggactaacaaaaaagaatcatttattgaaggtgatcagtataagttcaatttcaagcgcgggagaatagctaacggggtatcagcaagtcttaacatcgcatttactggtgattcatggacagagaagaacacaattcctcaggccgtaataaatatccttggtggacaatacaaggaccccggttggattagttgctcaaatagaactgacggcgttatggcaggaattactttggcggtcagcaactttactaaatatgatggtgacaatgagaataacaatgcaccacctcagtacggctctggacccgacgggaacgcctactggaataacaatactgtagggactctgacctggtctaatgtgacggccacagatctgtcattattttattatgacgggacgggtaattttactatcaccattgacggcgggacgccgattagtattgcaggaacaaatagtgggacgatgaaaaagtatgatatcaccggactctcagagactgcacatacagtggttataaccagttctggctctggtgttgtatctatactggggatgtatgggaaaaatagcgcgaaatcttccggtataaccgtatcccgtatgggaaatggaggcgcaatggctagtgattatctccactggcaagactggatcacccccattgcatcaaaccttgatatcgatatattgttcattattctcggtactaatgactttcgaaaaagcgcaggaattccagagtacacaaatgggatacaacttataattgataaatataaggctgctacaccagggatttgcatttgtctggtttcgccagcgcagagcaatgctactggagcgccagcgctatcagagtacgacgaagcgatgagaaagctggctgctgataataacatcaatatgatcagcctgtatcagttgttccctaaaacctatgataactctggcggggcatgggcggacagccttcaccttagcacctttggtgcatatatctttgccagaaaatttaaaaacgaattctaccaggagtaa

SEQ ID NO: 207237 - DNA, 444 bp, Klebsiella oxytoca
gtggataacttttctgaatcgactcagaaaacaatcacgccggaagcaaacattcctgatgctaccgaagatggaatcctggctaccgatgacgatttcgatctcgcgatgtggttctggtcgaccatcatcgagctgtacgaacgcgccgccgaattcgacggaaccctggcaaaaccgagagagccaaactttgtcgcatgggctcaagaggttcgcatccttcgccaggagcacggctgtaaccacgaccaaatccgcaccatgattgagcgcattcagcgcgatcagttctggtgcccaaaagttcaaaccatgaagacattacgcaacaaatggccagagctggcgctgaagctgtgcccggtaaatctcgcaaccggcggcaacctcggttttagcggcaaggttcaggcagatattcctaagggtttcaggggctaa

SEQ ID NO: 207238 - DNA, 240 bp, Klebsiella oxytoca
atgacagctctatcattaacagttcaggtgatggcaaaagagcgcgggatgtctatttctgcgctcgccgacaaaatgggagtgaaccgaaaaacactttactcctgcattcacggtaacccgcggttatcgagtcttcaaagtatcgctgatgcgctaaacgtcaggctgtctgacatcctggcgattgccgaggatgtcgaagatgccgccccgcaggaggtgccagatggaaaatga

SEQ ID NO: 207239 - DNA, 270 bp, Klebsiella oxytoca
atgtctgacatcgaagagcgcatcgctgatcttgaaggaatcgtcagcgatctgcagattagcgagcacgcatcaagaatcgctatcaccattcttagttcagttgtgaataatttctcaaactccccagggttattagctcaaggctatgcagaagcagccgagaagtccggccctttagagtttgatttccctacgccagaaggttacgaagaagagcttcaccggcgtgtgatttcacttctctcaaattttgaagaaactgattga

SEQ ID NO: 207240 - DNA, 1782 bp, Klebsiella oxytoca
atgagtaatgcattcgatttcgagctgattgcggacgacagggtcagcgccaccattgatgaaatcaacgaagccattaaaaacctgctccctcaactggataagacgcaggaaaagcttaacctcggcggtgatgagacggttgatagcctcggcggtgttggtagtcaactggataaaatggcccgtagtgcacgggataacgtccagtttatcggagatatcattcctccactgaagatcgtcggcgagctggcaggtaaagtggctacctttggtgcggccggcgttgttggatacggcataaaaaaggtcgccgacggcttcagggacgcggcaaaagaggcttatgacctcgaaacccatgcacaaaatactgctatgagtgctagggagttttcgaagctttccggggctttacgcattcttggtacagacagcgagacagcggccgcgtcgattgaaagcgtctttaaatcgctgaatgaagcggcaagtgggtccaatgccggggtggcgggcgctatggcgcaaattggcgccgaaattgtcaaaaataaagatggctctcttgatcttcttaaaacgcttgagtccatttctggtgcgcttcagaaatggagcccatcccaacaaaaatccttcgctaatgctgtcgggctaacccctgatatgttgacactgttacgtgaaggatcgaagtatgccggacttctggctaaagcagagaagtttggtctgacggttgatcccggtctgaataaacagctttcagacgtcaacgtgacgatgaatgagttgggcgctgcctgggatggcttaattaacaaggcagaaaaaaaagttctgaaatttgtcatgtctgatggttccgttaagaacggactggaaggcgttactgatttgctcaccaatggtgattttactgctctgtctcacgctgtgggctttattaataccgatgaggctgaaaagctacgtcgcatccagggcaataaagacctttataataaactgagtcgtagtgaacgtggggcggtcgatgccgggtttatgaccgatgccgtccgtaaacgctacgatgaagaatatggcgcgacggatgcggcagagcgtctacgtggtgatatgtcggtgattatgccgcaaaaagtaccggggaataatccggtcccttaccgtcagaataccggaggcggccagtatgacgacgccctcaatgccgcgggtaaaaagcacggcgtagatccacgacttttgaaggctattatgatgcaggagtctggtggagaccctaacattataagcgacgctggtgcgcttggattgatgcagttgatgcctttcaacctgaaggcgtatggggttacaaactggagagacccgaaccaaaacattgatggcggtgcgggtattttggctgaaaatcttcaaaaggcagggggcgatatctccatggctcttcgctactatcacggcggttatgacaggagtcgatgggggcgcgttaatgctgcatatcccggcgcggtcctagctcgctatcaaaaaattatcgacagcgataatcaggatagcgtcaatcagagtccggcccctgggattatccagccttcatccggggcgggggcagtgtcagtaagcgatattaccaagtcgttcaaaagcgtcatggaggataacaagcttaagctcgaaatcaccatggtcaatgagaagggggaccggaaggtttttgaaagccagaatggtgggcggataacgctacctatgagctattag

SEQ ID NO: 207241 - DNA, 834 bp, Klebsiella oxytoca
atgtcaattaaagaaatcatgtccgactcgatttttctaagaaaagaaggaagatatcttggcgcattcgctcttctgtgtgccgctataggtggttcttctaggaagatgtatccggaaagatataatagacataaacaaaccggagttaccgataaagatgcatttacaaactgccttaacattgccataacaaaatcattaaatggtaactacaccgaagaaataagtaaaagtgtaatattttcctttcattacaaagggaagagtgtaaattttggcaccgtgatttatgagtttttccgctgcaatttaattcatgaagcaagtttacctgaaggaattgaaatattagaaaaattcaatgacagcactccagtgttgtacatcgaaggtttgcgttttgtcattaacgataaattactctgccttggaattgaatggctcgattttttatcggattgcattattcatctaaaggttaacctcaaggatttcaacatggaaaacaaatactgcattataaagcctcctcatactgcggaagagtttaacgatttcgcaagaaaaaaactgggtgatttatgccatggcattataacatatatcggcgggtacatcacccactgcatgcttgcggggaaaacagatttttccgaccacactcaaatcgaagaagatttcatcatgtttgatgagaaaaacatacttggagggccaatgatctttgtccttaaaaactccggagttttagatcaccagggaaaattgacacaaggtggagtggatattattgattacatgtcaaataaatatcaagttgtaatagagtaa

SEQ ID NO: 207242 - DNA, 240 bp, Klebsiella oxytoca
atgtatttatggaagataattattaacttcttaaaaaacaataaaatacattattttcaacgggttactaaaaccgatatttggacaaatgcggacaaatacggacatttgattgccccaaatcgtgccccaaacgcctttttgccccaaaatctgccccaaaaaatagcccagaaaagagctatagagactactctgaaatcgcctcaggagtcagtagttgactggcttgtgcgctga

SEQ ID NO: 207243 - DNA, 141 bp, Klebsiella oxytoca
atggtattgcgcatgacggtttactgcatgatactgaacacaagacagcataccctgttgcaggaagaggtttccgaaaggtggataaggggtctgaggtccaaccatgcgaaaaaccacgttaagaaagcaaccttctga

SEQ ID NO: 207244 - DNA, 426 bp, Klebsiella oxytoca
atgaaaatcaggcatgagcgcattcgcgaggcaatgaatgcctgggcgctttatccaggtggccgtaaaacgcctgtatctgcgattgtcgatgcttacttctccatgggtatgacaaccccagagctttacgacgacagccaccctgacgcgctgagccgcaatatccagaagatttaccgttggattgaaagtgattcgcctgcatcaatcgaaaagattgcgcagcttctccccgcgattgaacgtgctatgccgccgttactactggcgcgggtgcgtagttactactctgaaactttccgcgaacttcttcaccgcaaacaacgtgtcgacgacgaaatggaggcgctgttcggagcaatgattgctatctctgaccggattgctgatggcggctcttccggtaacacgctgattcactaa

SEQ ID NO: 207245 - DNA, 273 bp, Klebsiella oxytoca
atgagtgtttatgtgaaaaagaagatcgctgagaaattttctcagtcagagttggcgctgttgttagaaacaacgcagcaaaatatttcccgctggctaaatgccaaaatgccagccgaaagagtcattcctatttgcaaattaatgggttgggaagtgaccccccatgaattgcgcccagacctgcacccaacgcctattagtggaatacctgaaggcgtcatcgtgccacaacgtcagtcagccgaggtgaatcatgaaaatcaggcatga

SEQ ID NO: 207246 - DNA, 405 bp, Klebsiella oxytoca
atgaagatgaagactctcgatatcagcgcataccgtattaagcggcttctcagtgagactggatggagtcaggcggagcttgggaaaaaagtaggtgtttcgcaacaaacagttcagcgctgggctactgggaaagtgagtccaaaccctgacaactttgatagtctttccgaggtttcggggtacgccccctactggttcatgctcccacccgacgaaggcgatcaggtggtgaccccggacgcaatgaagttaggccctatgcagctggacctgcttaaaaccttcaatgcgttcccggaagaagatcagcaacaaatgctctacgaaatgaaagagcgcaaagagacaatggataagaccgttgcccggtggcttgcagcccagaagggcaataaatcctga

SEQ ID NO: 207247 - DNA, 255 bp, Klebsiella oxytoca
gtgggaagaaaggaaaagctaaaatcaaagctagacgggctacccaaaaatttcacctgggatgaactcgttacacttatgagccagtatggcttcagattgatgaatgctaagcgtgggtcgggacgaaagttctataataaagacatcgataggcttgcaatttttcacgaaccgcaccccgaaaacacgcttaaaaaatacgttttagaagaagttaaacagttgcttgaagagattgatgatcatgaataa

SEQ ID NO: 207248 - DNA, 462 bp, Klebsiella oxytoca
atgaataacctgatgaaatataaaggttactacggaagctcaaatatttcgttcgaagatggtgtcattcatgggaaaatcgaatgcataaatgacctcatcacttacgaaggagctactgttgatgaattacgctccgcttttgaagaggcagtagacgattaccttgccacctgtaacgaaatcggcaagtcgccggacaaaacgatgagtggcacgttcaacattcgaatcggtgaggacctacataaaaaagcctatttagcagccgttgcaaaaaaaatcaccctaaatgattttgtcaaacaatctttggctgaagccgttaatgatagaaaagagatacattaccactttgaaaaaccaagtgaagttagtgaaacagtgtccttctcttactctagaaaacgaaccggcataacatcgtcttgggagatagtgaaacatggagcacaccactaa

SEQ ID NO: 207249 - DNA, 426 bp, Klebsiella oxytoca
atgttagaaagaatacgattcaaaggatttgatattgaggggtcatccttgtacatcaaagatgatgacagtattgagggtggaaaatttaatgttacatttactgaacaaaaaatcatccctcaactcgacgaagacggtaacttcctctttatcgaagtaacaccttcaatgattggttatcctcatgataagactgactctgaaaatgatgaggacatcatctttaaagcagaggttaagcttgcattgacgttcgagtgttaccttaaggaggagattaaccaggaattgcataacaagcacaagtggttttttgaaaattacatctacgtttgcacgaaacttgctttagaaaaaatattaaaagatacagcgctggaaacgataagcctgccatggtctccctcttatactgatgagtaa

SEQ ID NO: 207250 - DNA, 342 bp, Klebsiella oxytoca
atgaatcagttttatgttcacgttcgacttttcgaagccacatccgaacagaccaaaaaatttgaagaattcatgcttaactttctgtaccagaaaacaactaaagagcatgacgatagctgttataggttgcttccgggaggttggatacttaacagcacaatggattgtgacaatatcgttaagcaaacatcctctattgctaatctcgctggcgttaatgcggatatctttgtctgtaaatttgaacaaagcgcatgcttacttccgtcagccgctttagttggtaacgatttcgtttatcacgatctgactcctaagcctttcaagctcgattcttaa

SEQ ID NO: 207251 - DNA, 741 bp, Klebsiella oxytoca
  misc_feature (670)..(679): n is a, c, g, or t
atgtggggtttttactccgtggaggtttgcgtgctgtctgtatccaccgcgctggaaagcctgtatcgctgcctggatgaagcgttcccgccatcgcccggcacgcgaattttcgatatccccttcgcgctgaatggcgcatttgatccccttctgtggtgcacgcatcagccgcagtggccgcagttctactggcagcagcgcagcggcgatgaagagctggccgcgctgggggcggtgcaaatctttgcttcccttgagcaggcgcacgcttttttgcgccagcaggggcgtgacgatctgcgaatttgcggccttaacgcctttcatcctcagcagggtctgttgatcttgccgaggctggagtggcgtcggctgggcggcagcgccacgctacgcctggtgttatatagcgagacctcgctccgcgacgatgcccgtgcggcacgtgaatttctcgattcgctggtggcgaaacaggcgcaggctaccgcgatgccctctctgctgagcgaacagcatttcccggcttatccgcagtggcgagagctgattgcgcaggcgacgcaggcgatagcggcgggggagatggataaagtggtgctggctcgcgccaccgatttgcacttcgccgccccgttaaacgccggagcgattatggcggccagcnnnnnnnnnnggggagacccgcgctctggaagtccagccgccgcagcaaccttaactgcttccacttcctga

SEQ ID NO: 207252 - DNA, 1092 bp, Klebsiella oxytoca
gtgcaattttttttgatttttggtgcaaaaaaaagcgccgcgctacacgcgccgggccagcataccgggtacgaatattcgcgcagcggcaacccgacccgtcacgcgctggagacggcgattgccgacctggaaagcggcacgcgcggctacgcctttgcttccggccttgcggccatctcaaccgtgctggagctgctggataaagacagccacctggtcgccgtcgacgacgtctacggcggcacataccggctgattgaaaacgttcgccgccgcagcgccggcctgcgggtgagctgggtgaagcccgacgatctggcggccatcgaagcggccattcggcccgacacgcgcatgatctgggttgaaacgccgaccaacccgctgcttaagctggccgacctcagcgccatcgccgccattgcgcggcggcataatattatcagcgtcaccgacaacaccttcgcctcgccggctatccatcgtccgctggagctgggctttgatatcgtggtgcattcggcgaccaaataccttaacggccactccgatgtggtcgccgggctggcggtggtcggcgacaacgccgcgctggcggaaaagctgggctacctgcaaaacgcggtcggcggcgtcctcgacccgttcagcagcttcctgacgctgcgcggtattcgtacccttgcgctgcgtatggagcgccacagcaacaatgcgctgctgcttgccgagtggctggagcagcagccgcaggtcgaaagggtctggttcccgtggctggcctcgcatccgcatcatcagctggcgcgcaggcagatggcgcttcccggcggaatgatctccgtggtggtcaaaggcgacgatggctacgccgagcggattattcgtaagctgaagctgtttaccctcgcggagagcctcggcggcgtggaaagcctggtgagccagccgtttagcatgactcacgcgtcgatcccgctggagcagcgtttagccaacggcattactccgcagctgattcgtctgtcggtagggattgaggatccgcaggatctgatcgccgactggcgccacgcgctgcgcgactaa

SEQ ID NO: 207253 - DNA, 222 bp, Klebsiella oxytoca
atgacaaatttgcataccctgagcgtacatagcggcacatttaccgatgaacacggcgcggtgatgccgcctatttatgccacctccacctttgctcagcccgcgtgtggggaggtgatcgtttatgcatggatggatcgtcgccgagaaaacagcgagaagccttacgggacaaggcttggggccggacaagccgtatctgcacggctggtcggaaaatga

SEQ ID NO: 207254 - DNA, 381 bp, Klebsiella oxytoca
atgatcaacattgataaatacctgaccgtccgctggcagatgggcggccgcacttttcctgttctcgactgctacggcattgtacatgaggttcgccgggacctcggattgcctgaatggcctgcgtttgaaggtgtgataaaggatggcgatgaaatgcatattgcctgcaataacttccgtcaaaacgtagtgcggtgcgaaccctgcccgggtgcggttgccgcctgctatatgggtggggtaatcggtcatctcggcatcgtggttgagctgagcggcctgctttatgtgatggaatgcaatccccggcgcaacgtgaccattcttcccctggcgcgttttgagcgtcagtttctgaaagtggagtattaccagtga

SEQ ID NO: 207255 - DNA, 1059 bp, Klebsiella oxytoca
atgacgccagcagcttactacaacgaaatcgatccctatgcagcgcagtggctgcgcaatcttatcgccggtggtcacatcgcaccgggcgaagttgacgaacggagtattgaagatgtcacacctgacgacctcagaggatttacccagtgccactttttcgccgtgattggtggatggtcatatgctctgcgtctggccgggtggccggataacagaccgatttggacaggaagttgcccatgccagcctttctccacgactggcaaaggcgctgggtttagtgacgacagacatttgtggcctgcgtttggctggcttatcaagcagtgccgacctcagcgcatcgctggtgaacaagttgcaggaggtcgtgcggatccatggttcgaccttgtacaaaatgacgtggaaagaatgggctacgccttcgggcttacgccgttcccggctgcgggtgtcgggtcgccgaacgagcgagagcgggcctactgggtggccgacgacaacctgcaatacgaatccacagccagaaacgaagcgcggactgcagaacctgtccggagcggtgaaattatctggctgggtaacgccaacaacgcgcgactggaaagacacgtccgggatgacagcgcaacgggatgggaaagacaggctggaccaactgccgcgccaggctttcatgacgggatggccaacccccacggccacaaacaacgaccgcgggccgatgccggagagggcgttatcgatgtaccgggaggacggttcgaaagtccagcagaggattcaggacttcgcagcgatatgcggcccctggaggttaacggtttttggcgagatgcggactggcttttttgtcgagatggcaaatggcgtccagttgaacccggcacattcccgctggttgatggggctgccgcacgcctgggacgagtcgagcccggggtggcaagagtggcaagcagcaaccgcgtcggccgcctgaagggttacggcaacgctataaacgcccaggctgcagcggctttcattcgcgcttacatggaggtcgcatga

SEQ ID NO: 207256 - DNA, 456 bp, Klebsiella oxytoca
atgactgatatcaccgaactggcgcagagcctgaaagcggcagcagagaaagcaatcgcagaagaaggttcaacttggtggagcgaagagcaactggcgagcgactatggtcttgcgctgcataggacggacgctaagttcatcgcgttagctagtcacgagaacgtgctggcgctggtagaagcgctggagaaggcgcagcagcgaatttccgaaataagcgatcagaagtcgacctgggtcgcatgggccgaggatgcatcaggtatggtcgatatgctgcgacttcgcatcgccgagctggagtcccgcaccgtgaagctgccagagttatgcgtgggggttgttcaggatggacatgcggtaatggtgccatatccagcaggacactggtttaacaagacagcgattttggagatgctggccgccgctggcatcaaggtggaggctgagtga

SEQ ID NO: 207257 - DNA, 348 bp, Klebsiella oxytoca
atgagcaagtaccgcaaaggcgcaatttatttccgcaagatgaagtccagcgacaggtctaacgactttcgtaccagcatgcgcatggctctattcagtgacaaaaaagcctggaaacgccccgaagaagttaagccagttgttcttgttcagcacggtgtgaagcatgttgtaagcgtgttcatgaacatggatgacgccactggctgtcttatcagcggagcgtttgaaaagcgggcgcgtaattcacggcacaatccgctccggggaatgcgttacaccaaaggcgatatgaaaaaggcttttcgtaaatgggcattcaagcacaaacaggagcgtgccgcatga

SEQ ID NO: 207258 - DNA, 501 bp, Klebsiella oxytoca
gtgatcatagcgacggctgcagtgatgatgctatatgtatacctgtatatttgtcgttcatcttccttagatgaaaaagagaaattatctaaaataatcatcactttcctagaagatgatgcggcaccgggtaacatgaaaacccttgcttatttatcctacgtaattgctggtaaatggtggtttttccccatcatctgtctgataacgcctttagttatattatttacaaaagaaaaaggaattgatgccgcagataagaaggtgcatgagggtggcgcagttacgttccaagatgtaatgaattcagttgtagctgtaagcatgaagcgtaaccctttaacatccattttttttgcagcctctgcggcattgctagcggctatagcaatctgtttaagaatgatttttggtagtttaaaaagcattccaagcatcaatgctagtattctttctacggtaaatttcatacacaccttaagaaaaaaatcccacatttaa

SEQ ID NO: 207259 - DNA, 177 bp, Klebsiella oxytoca
atgagaccgccaatcacaaaggaagaagtagatttactgatgcaggatatggatatgctggcagagcagcatctgctggggctggaggctttcgaagctttgagactgctggagatgcgcagacagaccggaaagctggaggctataaagcgattgatatcttacgggaatgaatag

SEQ ID NO: 207260 - DNA, 375 bp, Klebsiella oxytoca
atggaattcaaagatctccccctgaaggtgcaggaaatcgcagtacagtgcctggccgataaaatcagtcacacaacgggttttgcggaaggttcagggaaattcgagcctacgaaagacctggtccttcaggtgaaagaggctttcatcaagctttacgcctctccagcagcatcttcatttcaatgcgattgcggccagaaaggtaaaaatcagcaagtcagcattaacgtcatgactcgcacagtcacccctcttccatgcactggagacggagtggaccgtgtttatcacgacgcgatggttaaggctttaagaatcgagcttgatgggcttcggcgtaagatcgtgatgaacgaaatcgttgccaactaa

SEQ ID NO: 207261 - DNA, 342 bp, Klebsiella oxytoca
atgaatcagttttatgttcacgttcgcttatttgaagctacagccgaacagaccaaaaaatttgaagaatttatgctgaattttctgtaccagaaaacaataaaagactctgacgacagctgttggagactggttccagaaggctataccctcaaaagcacaatgaactgccaacaaatcgttgatcaaacatttgcaattgctaacagtgctggcgttaacgcgtatgtctttgtctgcaaatttgaacaaagtgcgtccttgcttccatcagcccacttagttggcaacgatttcgttcatcacgatcttacgccgaagcccatcaagctcgattcttaa

SEQ ID NO: 207262 - DNA, 720 bp, Klebsiella oxytoca
atgaaagaacgtggaatgatttttaacggggaaatggtgcgggccatcctcgacggccggaagacgcagacacggcgtcccattcaatggaaacagactcggttcactgaaattggtgagcgtgaagatggtagccgctggccatggagtgaagacgcagagcatgcttgcgatttctggcacccatgtccgttcggcaccgtcggcgaccgcatctgggtgcgcgagacgtggggagtcgtcagccacgaacttgatgaggatggtcgaatccaaccatggacgccagaccgaccggctaaagccattaacgaaatgccgtttggcaatggctattactctggccacgccatttatgcagctgatggtgattttacctggggtgatgacgatggttatgaagatggtcgttcgtgctggaagccatcaatccacatgccgcgctgggccagccgtatcacgttggaggttactaacgttggagtacagcgcctacagtcaatcagcccgaacgatgccgcgcgtgaagggctggttaaattacctgccactggccggtattgcataaatcagggggatcaatatttcggcggtgcaagccaagatgcgcgcgaagtattttcttggctttgggagtcaatctatggcgctgatagttggaaggctaacccatgggtttgggttatcgagttcaaacgcgttgaaggcggtgcggcatga

SEQ ID NO: 207263 - DNA, 198 bp, Klebsiella oxytoca
atgtcagatgagcatttaattactgtcggcgaacttcttgaccgcttaaaacattacccacgagacactaagatttcgtttagtgggttagatttttatcgcctgaaacagcgaggtgaaaatctaatccaggtagaattcaaccaggttgtttatcgcgactctgaaggccgcgtggtggttgaaaaccttgaataa

SEQ ID NO: 207264 - DNA, 768 bp, Klebsiella oxytoca
atgatcgagcgcggaatgatttttaacgctgagatggtgcgggccattctcgacggtcggaagacgcagacacggcggattatgaaggtgcagccatccgaagacttcacgcccatgaatatggcgcttgaaaccgattataaggcgcgctggtacacaccaggcattgtcgacaaggacggttatttgcagccagccagtaaagaggtttttggcgtctccaatgaaaatgaagggtattcatgcccgttcggctccgtcggcgaccgcatctgggtgcgcgagacgtggggagtcgtcagccacgaacttgatgaggatggtcgaatccaaccatggaagccagaccgaccggctacagccattcacgaaatgccgtttggcaatggctattactctggtcacgccatttatgcagctgatggtgattttacctggggagatgacgatggttatgaagatggccgttcgtgctggaaaccttccattcatatgccgagagcagccagccgcattctgctggaaatcaccgaagtgcgcgtggaacgattaaacgctatcagcgagcacgatgctcaggctgaaggcgtggcgaagctacgaggagggttctggcagcactatcagccaggctggacgcagcatcaattgagcgcccgcggctcatttgtaacgctctggaaatcaatctacggcgaagaatcatggaattctaacccgtgggtttgggttattgagttcaaacggattgagggggcagggaaatga

SEQ ID NO: 207265 - DNA, 291 bp, Klebsiella oxytoca
atgctactgatttcgcattccatcgcaggtatacgcccatacccgaaaccaaaaaaaggtaagaccatgaccgtacgtgcaaaatttaactgccattacatccagcgtgcagatgacaattcgtctattaccgtccacatgggcgcagtaacagccggcagcgaagaaaacaaagcctggtcaaaattaaccccaggtggactggtttcaatgcatatctccaacccggacgctttcgggctgtttgagcaggggaaagagtatttcatcgacatctccccggccgagtag

SEQ ID NO: 207266 - DNA, 258 bp, Klebsiella oxytoca
atgaatggtactgattcaaggcaggccgatattttatatcgtggaataattgattattacagcagcatcagcggtcttgatattacgtttgagcaaatgactcaacgcaataaattcataacggatagtgccatcgtctgcgacgactctctggatgagcaggttctggcgcttcaggaggagtatcttgctgcaggtgatgatgtttcagcgcagaagagtattatcgaaaaagcattcgctttacttgattcataa

SEQ ID NO: 207267 - DNA, 252 bp, Klebsiella oxytoca
atgcatttagtcaaaacaacagaatttaacggcgtgacgattgaggatgcgcgttatgtgattgatgaaataaatatccataacggagaaatggcgtttgcagtctgtatgatgcccgcagaatcaaacacccgcctttcaggcgtaactcatgcctgctcctatgacgaagaagggccatcaccgaaatctcaggcactggcatatctgaaatcccttcctgcatttatggatgccagggaatctaaatga

SEQ ID NO: 207268 - DNA, 1467 bp, Klebsiella oxytoca
atgttttcgcagatagatgtttattcttcatgggcatctggatttggtgttgtccccggtgtgattgatctcagagggaaaacatacacgctaacgaaagagcacatatgtaagaaaggcgtgaacctaatcaacggccgaattgaattaaatggcggaaatattgttttaggcgaactgggtagtacatcaacgctgacttatgcttttcagggactgacggtcgtcgatattggtaccgccgagtcatcgaaagcactgattgaggttcgtgtctgtttcaacgttctcgtttgtgcgaattatatccatgcaagaaaatcgaccactggaaaccgctccagatattgtctttttctcggctcgtcacgtggatggggaattggtttcgtcagcggctattataccggcggacgctgccctgtccgtattggcagaaccggagatcatacgggtatcttcattggcgcgggggcgactatcgaccatggaagcgtttgtaatctcatgctctgcaatccggctggagcaagcattattggctccaacatagagcatgcagagaacggggctgcgggctccattatcatcaccagcagtactaacggctctgttaactacgcacattcggtaacaatacagaatatctacgactttaataccgggaagggcacgtctccgaagaatcccgtgctttcgcctgccgctgttgtggtagggcgtgatgtgccggggacgcttggctgggatattgaagggcagctgattaccagcggaaataccgcagataacatcagggtctgtaactgctaccttgtgtctgacagacaggagtatgcagcgataatgcgcggaagaagcgggcttgtcgtggaaaactgcgtggtgattaataataacgctgacggggatgacattctcttcgagggcaccgcagcccgtagctatgccagagataatcgcaaccagaatacaggcgtgtttgatgcggttggatacacctcggccagtgctccgtcgctgggggcgactaatggctcctggaatatgtcccttgtcgattctaatggcgtaggttcgtatactcgtagcacatttggcggcggatatactgtcgtgaatgacaagtgtacagcttacggctggatggttattggttcagtagtcgccgctgcaaccggacaattacgcattccgctacccgttccggtcaggctggcttacagggctggtaacccaattggtgtctttaacatcgccgggactaaaagtgtaaatattggcgggtcagcaaccaccgtccctattgcaatgtttcccgttattggtcaggtgctggatggcggctcctatatcaccctttacaccgcagacgggcagtcattaccggcctcggcgattaccgccggtacatcgtttcagttctcaatcgactatccggtgcgtttagcaaacaaccgttcataa

SEQ ID NO: 207269 - DNA, 273 bp, Klebsiella oxytoca
atgacaggttcagactctaaacaggctgaaacgctttttttaggtattgttgattactacgcaaacataagcggaagtgatatcacctccgcccaagttattcaaagagataaaatacttaagtttgcaggtatcgtatgcgatgattcgcttgattctgagattttatcattacaggatgaatttatttctgctgattacctgccaacacctgatgaaacgcaagccaaaaaaaaccagataattgaatcaacaataaaacttttatcataa

SEQ ID NO: 207270 - DNA, 1035 bp, Klebsiella oxytoca
atgagcaagaaacgcaacaagcgccagcagcagtcgcgcacccaaaaccacaccgccacaccgccacagagcatggaagcgttcaccttcggcgatccgacgccggtactcgatcgccgggatatcctcgattatgtggagtgtatcgataatggtcagtggtacgatccgccggtgagcttctccgggctggcgaagagcatgcgagctgccgtgcaccacagctcgccgatatacgtgaagcgtaatattctggtgtcgacctacatcccgcacccgctgttatcccgtcaggacttcacccggtttgcgctcgactacctggtgtttggcaatgcgtttatcgaagagcgtcgcagcctgaccggcaagccgttaaagctggaaacctcaccggcgaaatatacccgccgtggcatcgaggatgacgtgtactggtatattcagtcctacgctcagccgcaccagttcgcgcccggctccgtcttccacctgctcgaacccgatattaatcaggagctttacgggatgccggaatacctgagcgcgcttaattcagcctggctgaatgagtcggcgacgctctttcgccgcaagtattatcagaacggtgcccacgccgggtacatcatgtatgtgactgatgccgcgcagagcagcactgacgtcgaggcgctgcgaaaggctatgcgcgactcgaaagggctcggcaattttaaaaacctgtttttctatgcgccgcacggcaagccggacgggattaaaattgtgccgctgagcgaagtcgcgacaaaggatgacttttttaatatcaagaaagtcagcgccgctgacctgctcgacgcgcaccgcataccgttccagcttatgggcggcaagcctgagaacgtcggctcagtgggcgacgttgagaaggtggcaaaggtctttgtgcgtaacgagctgaccccgctacaggctcgcttcatggagctgaacgagtgggcgggtgaagagattatccgcttcgaaaaatactcactcggcgacgactga

SEQ ID NO: 207271 - DNA, 1770 bp, Klebsiella oxytoca
atgaccactacaaccgacacatcattactcagcgacccgcgacgacaggccgcgcttttgttctggcaagggttttccgtgccgcaaatcgcggagcaattgcaggttaagcgccccacggtgcagagctggaaacagcgtgataaatgggaagagaccgccccgctaaaccgggtcgagttcacgctcgaggcgcgactgattcagctttatgcaaagcccgacctgacgccgcacgacttcaaagtcgcggattttctggcgcgccagatggagcgcctcgcaagggttaaccgctacggccagaccggcaacgaggtcgatttaaacccgaaggtggccaaccgcaacaagggggaaaagaagaagccgaaaaagaattttttcagcgaagaggctatcgagaaactcgaagagattttcctcgagcagtctttcgactatcagatcgagtggtggcgcgctgggctggctcaccgcatccggcacatcctcaaatcccgccagattggcgcgacgttctactttgcgcgtgaggcgttgctacaggcactgaagaccggccataaccagatatttctgtcggccagtaagacgcaagcctatgtattccgtaaatacattatcgcttttgcccgacaggttgacgtcgagctcaccggcgatccgattgtgctcggcaacaacggcgcagagctgatgtttcttggcaccaacgccaacaccgcgcaaagccacaacggcgacctgtatgtcgatgaaattttctggatccccaacttccagaagctgaagcgcgtcgccggtggcatgtcgtcacaggagcacttgcgcacgacctatttctcgaccccctcatcgctggcacacggtgcctatccgttctggtcgggggaacagttcaacaaggggcgtaacgataaaagcgagcgtgtcgatatcgatatcagtcacgccgcactcgcgaagggcgtcgcttgcccggacggccagtggcggcagattgtcactatcgaggacgcgctcgccaaagggtgcaccctgtttaacatcgatacgctgaagcgcgagaacagcgtcgacgagttccgcaatctgtttatgtgcgagttcgtcgacgacaaagcgtcggtatttccgttcgaagagctccagcgctgtatggtcgacagtctcgaaaaatgggaggactaccagcccttctccgaccggccatttggtcaccgtccggtgtggattggttacgacccttcattacgtggcgacagcgccggttgcgtcgtcatcgcgccaccggtcgtcgccggtggccggttccgcatcctcgagcgtcaccagtggaaagggatggactttgcccaacaggccgaatccattcgagagctcacgcagaaatataccgtcgaatacatcggcatcgatgcgaccgggctcggtcagggtgtattccagctcgtgcgctccttctacccggccgcacgtgaaatccgctacacgccggaaatgaaaaccgcaatggtgctgaaagccaaagacaccattcgtcgcgggtgcctcgagtacgacgtcagcgcgaccgacctcacgcagtcgtttatgtcgattcgtaaaaccatgaccagcagtggccgcagctcaacctacgaggccagccgcaccgaggaagccagtcacgccgatctcgcgtgggcaaccatgcacgtattaatcaatgagccgctgaccgccgcgaccggcgaacagtcatccagcattatggagtggaattaa

SEQ ID NO: 207272 - DNA, 864 bp, Klebsiella oxytoca
atggctaaaaaagtttcgaaatggtttcgcatcggcgtcgagggtgacacctgcgacggtcgcgttatcagtgcgcccgatattcaggaaatggctgattcgtatgacccgcgcgtctacggttgccgtattaacctcgagcacctgcgcggcctgttgcctgacagcgtatttaaacgttatggcgatgtgactgagctgaaagctgaagtgattgacgatgattcagcgctcaacggcaagctggcattgttcgccaaaatcacgccgaccgatgacctcgttgcgatgaataaggcgggacagaaagtctatacctcaatggaaattcaaccgaactttgccaatagcggtaaatgctatctggttggtctggccgttactgacgacccggcaagcctcggtactgaatatctcgagttttgccgtaccgcgaaacacaacccccttaaccgctttaaagccagccctgagaatctcttctctgtggcaacgctcgccgagctggaatttgaagaccaacccgagaccatcatcaccagactgagtgaaaccgtaaaaggcatcttcagccgtaaacaggccagcgacgatgcgcgattcagtgacgtacatgaagccgtgaccgccatcgccgagcaggttcagaccggcggcgaaagtgctgaggtacgtttcagccagcttgaaaccgggctcgccgacatcaaaaaggcgctgaccgaacaggccacagccacctcgcagaaattcagcaccatcaaaaacacgctggataacaccgaggacaaaacgcagccgcgccgcaagttaagcactggtggcgacggcgatgcggctagctccactctgaccgactgctaa

SEQ ID NO: 207273 - DNA, 1161 bp, Klebsiella oxytoca
atgcgtaaagagacccgttttaaattcaatcagtacctgagccgtatcgccgagctgaacggcatcgaggtcagcgacctgaataagaaattcaccgttgagccgtcggtcactcaaaccctgtttgacaaaatccagcagtcatccagcttcctgaagctcatcaacatggtgaccgtttccgagctgaccgaagagaaagtcggcatcgatgtgaccggcacgattgccagtaccaccgacactgacggcggcgtcgagcgtaaaaccgctgatttctcgaaaatggatgcgtaccgctatttctgccacccggtgaacttcgactatcacctgaagtacaacaagctcgacctgtgggcgcgttttcaggatttccagatccgtattcgtaacgccatcatcaaacgtcaggcgctggactacatcaccatcggctttaacggcgtaagccgcgcggcgacctctgaccgtgctcagaatccgctgcttcaggatgtggccgttggctggttgcagaaataccgcaacgatgcgcctgagcgtgtgatgtccagcatcaccgacgatgacggcaacgtgatttcaaacaccatcaaggtgggtaaaggcggtaattacgccaacctcgatgcgctggtgatggatgcctttgaatcgctggtcgcggaaattcaccgcgaaaacccggaaatggttgtcatctgtgggcgtcgtatcctgaccgacaaatacttcccgatgattaacaaattccaggcgaacagcgaacagctcgccggtgagctgattatcagccagaaaaccatcggccagcttcaggcggtacgcgcgccgttcttccccgcaaacagcgttttcattaccacgctggataacatttcgatttatctgtacgaggacggtcaccgccgccacatcgtcgaaaatccgaaacttgaccaagtggaaaactacgaacaggtcaaagtcgatttcgtcatcgaggactacgaggccgggtgtctgattgaaaatatcgagatcctcgagccggaagaaatcgacaccccggaagcggccagcgcggaaatcttcgctgcggcgatggttaaggcgatgcagtccctgaccggcaacgaaccggctgacgctggaacccctgacggcgcggaggcttaa

SEQ ID NO: 207274 - DNA, 759 bp, Klebsiella oxytoca
atggcaacccccgcacagcgtcacgcgatgcgggtctcggctatcagggcatcgcagcgggataaagccccgctgcgtcatgcctcaccttacgagcaaatgctcgttaagctggccgcagaccgccggacgctatcagcaattcgttctaaagaacgtaaagcagataaaaaacgcgaattactcccgctgtacctgccgtgggtcgctggcgtactggaaaacggcaccggcgcacaggatgacattctgatgacggtgatgctctggcgtctggatgcgggggatatcaccggcgctatcgagattgcgcgctatgcactgcgtttcggtctgtcgatgccggaaaaacattctcgcacggcaccttacatgctggccgaagaggtcgcgctcgccgccacccgtgcccgtattgccggtgagccggtcgaagccgagcaactcctttacgtcatcgggttgactgctgaggctgatatgcctgacgaagtccgcgcccgactatataaggtcgccggtctgactctgcgtgatgccggtcagcctgagaatgcactttctcacctgcaacgcgctttacagctcgataccaatgtcggggtaagaaaagacattgagacccttacccgtgagctgaacccgaaaccggccactgtcaaaaaaacagccccgaaagttgcgaaaagggtatccgcgataaaacaaaattcaccggtgaaacgagggcgaggacgtccgaagaaagtcgccggttaa

SEQ ID NO: 207275 - DNA, 237 bp, Klebsiella oxytoca
atgaatgtgacgaaagaggtacgggataaattacgccaaaaagtgccgggtctacgcaacgtggcgctcaccgcgccctattttcatcgcggtgatgttccgacgcttgatggcgcagtaaaactgatgctgcgctatcaggtcggtacggatttagcgcaaaaagatatcgatgatattgtcgcttttctgcatagcctgaccggtgtttatacgccgtatcagccggggcaataa

SEQ ID NO: 207276 - DNA, 186 bp, Klebsiella oxytoca; identical to SEQ ID NO: 181358

SEQ ID NO: 207277 - DNA, 924 bp, Klebsiella oxytoca
gtggcaaagcaaaagttcaaaatcaccaactggcccacctacaataaagccctcatcaaccgtggctccataactttctggctggatgatgaagctattcaggcctggtatgagtcggcaacgccttcatcacggggaagacctcagcgctattctgatctcgccatcaccaccgttctggtcattaaacgcgtgttcaggttgaccctgcgggctgcacagggttttattgattccatttttacactgatgaatgttccgttgcgctgcccggattacaccagtgtcagcaagcgcgcaaagtcggttaatgtcagtttcaaaacgttcacccggggtgaaatcgcgcatctggtgattgattccaccgggctgaaggtctttggtgaaggcgaatggaaagtcaaaaaacacggcaaagaacgccgtcgtatatggcgaaagttgcatctggcagttgacagcaaaacacatgaaatcatctgtgcagacctgtcgctgaataatgtgacggactcagaagccttcccgggtcttatccggcagactcacagaaaaatcagggcagcatcggcagacggcgcttacgacacccggctctgtcacgatgaactgcggcgtaagaaaatcagcgcgcttatcccgccccgaaaaggtgcgggttactggcccggtgaatatgcagaccgtaaccgtgcagtggctaatcagcgaatgaccgggagtaatgcgcggtggaaatggacaacagattacaaccgtcgctcgatagcggaaacggcgatgtaccgggtaaaacagctgttcgggggttcactgacgctgcgtgactacgatggtcaggttgcggaggctatggccctggtacgagcgctgaacaaaatgacgaaagcaggtatgcctgaaagcgtgcgtattgcctga

SEQ ID NO: 207278 - DNA, 399 bp, Klebsiella oxytoca
atgtatatgaaaattagtggcttagtgatttcactgacggccatattctccggtcaggcctttgctgcgctccctcagggctatccggcggattatcaaaaggtcgtggatgcggggattaaagaaggcaaggtggtgatttactcaaccacggatactaaggccgcaggtccgttaattaaaggttttgaagcgcaatatcccggcattaaagttgaatataacgatatgaacagtaccgaattgtacaaccgttatatcagcgagcaggcagcgggcggcggaagcggcgatgtggtctggagctcttcaatggatacggcgctgaagcttgccaccgattatgcggaacagtatgcctctccggaacaagataagctgccgaaatgggcggtctag

SEQ ID NO: 207279 - DNA, 345 bp, Klebsiella oxytoca
atgacaactgatatcaccgaactggcgcagctgcgtgctgagctttcaaatccggcaattggcagtaaagaccatctgcgaaaactcgcgttatcgctggtagaggcgctggagcttaaggaagagcagtgcgctaactggttccagatggcgcaaaaattaggggaagacttggatgcggctgaaaagcgcatcgcagagctggagtcaaagctatttaatccggtgcaattgccgaaaacaaacggctactggactgagacagaaaagacgtatgaagaagctattacgctcgcgaagcggcaaattcgtctggctggattccggtgcgagggggatgagtag

SEQ ID NO: 207280 - DNA, 174 bp, Klebsiella oxytoca
atgtctcaagaaaatcaagccgcacaaattacccagctgaggaatcaactggaaacagttaaaagtgttctggcttctcagaataatcaggtcacgcaactggcgggagctctggacactttaaaaaatgaagtgtctcagctcaaagcagcagtagcaaagcagggtaagtaa

SEQ ID NO: 207281 - DNA, 285 bp, Klebsiella oxytoca
atgagtgaagctaaaccgcaggacggcagcaccgtaaagggctaccgcccgttgagtgctgacgatatcgagcagatgaacggatttaaaaacctgagtcgcgatttctgtgagcagttggacactgagcgatcgcatatcagcttacaaacttttgttgctggtagcgatgaggaggctgttttgtccgagtctttgcgctgtctggatatcgcccgcacgaaaatgcaagaggcctgcatgtgggcgtgtcgcgccgttgcccggcctgatgccgattgttaa

SEQ ID NO: 207282 - DNA, 459 bp, Klebsiella oxytoca
atggatatgttaaaaaaaggtgaattcactttccgtgatattactttggagctttctgagctctcagcgctgcagcgcataaattatctggaattcctctcaaaatccgaaaagtggctacctaatcttgaggattccctttctgaatatgaaacctctcgattgctcttgcgcctcgatatagaaacaggcgctttgctggtgggaatgtcgctatggcaccagaaccgaaaaggcccaagaccggaagaacttgctgaaactattatcgaagaatggccacccgaagctatccgggaggctgaattgatgattaagcggctttcgaacatgttgccgccggaagtggttgagcctgaagaagtcgcgcaggaagaagcggaacagggcgacgaagacgccaggacactacgcgaagacccgccaatgacggcggaaaagcctacgccagtgaattaa

SEQ ID NO: 207283 - DNA, 1170 bp, Klebsiella oxytoca
atgaaaaaaatagtgatcgcatgccgggcctattaccctgatgttgcgggtggtggagagatatcaacacgtgtacttgctgaacaactagctagtgttggatataatgttgaagtattagctataggtaatgaaacatgcactaatgtgcaaaatgggataaagataaataggataaagtatagaaatatttactggtcatataataataaaaatattagcgttgtgaaaaaattaatttggcactctttggattgtaacaattttttaattggtgaaatgataagtaacgttttaaaagaaataaagccagatatactaataaccagtaccatagaagacttgtcgagtatcatttggaaaattgcgaaaagtcaaggcataagagttatgcatatcctaaggagttattctttaatttgtgtaaatgcaaatatgtttaaaaaagataactgtaaaaaaatatgcactacgtgtaagcccttttctattttaaagaaggaaaattcaaaatatgttgatgatgtaattggtattagtgaatttattttaaatgtccacttgacttacggttactttaaaaatgcgagatcgcatgttatatataatatgtgtatggatgaaatccttcttgaacgcagctataatggctttagagaaaataaaataagaattggttatttaggtcgtatacataagactaaaggcattgagctaatagttgaggctgttagcggtctatcagatagtcataaaaataatatcctatttaaaatcgccggaaccggtgatgaggattatataaacgaattgactaaactagctaatgcaaaaaatgttaaatgctcgtttgaaggtgtcattcctgctaatcaactgttagaccaaattgatttactgattgtcccttctaaatggaatgagccctttgggcgagtagttattgagagcttgggaagaagagtccctgtagctgcaaagagagtagggggaatacctgagcttctaaatgataatgaagattttctctttaatactattgaagaattaacaagcattataatgtgttatgtaaataagagtataaactttaattttaatttatctcgctttgaaaataagcgcattataaatgattggacgaaagtacttggtggattgggagcatag

SEQ ID NO: 207284 - DNA, 495 bp, Klebsiella oxytoca
atgattggcgaagatgaatccggctttttaccttcagcaaatatgttccttggtggagtcgaaggccaccacggttggggtaaagatgccatcaactggtatctggaagctcacgatacccgatcgaacatgagccgcaccaactatagctatacgcaccatatctataaagatggctactaccagcaaggttactcactcggtgatgctatgggaggggatggccaactctttgcgggtaaagttgaactggtgacagaggataatcagcgctggagcgcgcgtttagcgtatgcgaaggttaacccagaaaatcagtcaatcaacaaggcgtttcctcgttcggatacattaaaaggtgtgcagctgggctggagtggcgacgtgtacaaatcggtacgactgagcacttctctctggtataccgatgcgaaccataatgatagcgatgatgtaggcgcaagcgccgggattgaaattccctttaatttatag

SEQ ID NO: 207285 - DNA, 564 bp, Klebsiella oxytoca
atgactaacattaaggatgacttcacagtgccagaactcatttgcgtgcttaactcttggttaaaacgctgtaaagaggctcgtgatggtcattataaaagagcagagactttatttgatcgctcacaaattctggggtacatgcttatatattcaacagtctttgttacggtgttttcttttttcacaccaaatacaacagtgatttttttatttggtataactaaacagcatatagttgtactaattgggtgcgtttcagcagttatttctggagtggttactcaggcaaggtatggagaaagagctgagattcatcgctcttcaggcgctcaatacgctaatttagcacgaaagatagaggtgcttcagttaaaaataaacgctgaaatcattaacagagataacatgggtattcaatccagtgaaattattgcggaatggaatgatctgtcaaaaaactcattattaacaccacatagagaaagtaaatctaaattaatgttacatgtcgctatcgccttaatgttttcacttgtctttttcattgtagctcacacataa

SEQ ID NO: 207286 - DNA, 390 bp, Klebsiella oxytoca
atgtttacagttaagcagatcatcaacaacgccacctcgctatatgaggtgaaagaaatcacggtagcacgtcccggttcagagcagtggcatcaggcattagccctagccgaggatctgggggttcaaacccctgacatcattgagcacgttccgatgtcatacgaagaccctgaaatgaaaaagcctctcggagatgagcacctattgtcagtggaacggcatggcgtaagtcgggctgattgcattggcatcatctgttccggtctgccttcagcatccctcccggacatccctgaagctggcggtgtaggttatcaattcctgtacaagggagatcagatttacatcaccaacagccacggctcaaccatcgaaacggttaagtaa

SEQ ID NO: 207287 - DNA, 819 bp, Klebsiella oxytoca
atggaaattcatgttcccatggaaatggtagtaagtgatggagaagaaagattcacagagcttgatttttactatgggtcaaaagcacttgaaggcacgtcagagatcgttacagtcctcactaatacgattctaaatcgcgaagtagttactaaaatcccatcaatcgaaggcataaccgcatcttttcgtaccagttatgaagggtcgtttagacaacgtttcatgctcaagatcacaggtgaggaacaacgtagaaactatggcgcaatcggagagggggcatttctagatgttatgtcttattatcttacaagaccattattaacaccttataatttcacatataaaagggctgctagaattgttaaagaacttgagccagattatagttcattaatgaagaggctttatggtccactattgaaacttcataagccaatagaagaacaaaattatactgttgagctgaaacggagaaggacaaatcttgctcggtatgatcacacgacccttgaaaatctaattgttgaacgcgccgatgatgaaaggatcattattgaagcttctataacaagatttaatcggctaacgggaacgggaaggctcattcttgaggaagattctgactctgtaagttttgaaccttcatatctttggagagattttccagcagttcaaaaacgcaagctatctagaaacttagacgtcaacacagataatggtgattttactcgtgtacggctagaggtgacatcaatcagaaactttcttggtgtcattaaaaaatatagtcttcaccgagttataacggattga

SEQ ID NO: 207288 - DNA, 735 bp, Klebsiella oxytoca
atgataaagtatattgcttttttagttatatcagttacatggttgatttatttcttcaacttcgatccgttaaatggttttccaattgataagtctgaatggggaacatttggtgatttcattggcggtgtaaccaatcccattttgacattttttacaatgattatgttaatcaaatcaataaacttacaaaaagaggctaacatcagcattattaaacaaaatttgcacatgcatgaggtttcagaaagacaaaaagaaattgatgacttgcgctcttttgaatcatcattttatagcctcgctgaagtatctagaagagagtttgatgccctcagaataactggtagaaataaaaaaagctactcagcctcagatgcggtaacctatttagagggttacatgataaactcatgtaagtcaaaagatgcagaagaattatgcaagcagttttctatttttgataatgaatcctctatggctctcttttctgccgttcgtagtttttatattctatttaaattcacaaatgaatcttgcccagaaaaccacaaagaaagatattacgaaatagcaaattatactatgcctgtgaaatttcttcatttggtatgtttggcatacgtgtttagtgattggaaaataataaaagactttgaaaacttcggttttttcaatcgcaaaggattagataaatacatcatggattttatggatgtaaagaaattttattag

SEQ ID NO: 207289 - DNA, 1107 bp, Klebsiella oxytoca
atgtctaaaacacgcgatgatttcagctcaaaaactgtaagagctctagcactacgggcaggatataggtgctcatttcccggttgcaatcagcttactgttggccccagtgatgaatctttaacatctatcacaaatattggggtagctgcacacattcatgccgcagctcctgggccattagcaaggagatatgatcctaatcaaacacctgatgagaggaaagatattaataatggcatctggatgtgtgttaatcacagcgttgaaatagatagagatgaagttagatatacagcagaaattcttaaagaaatgaaaaaagcccacgaagaagagattaaaaaagaggtgagcaatggctcttcatccaccaaacataatgacttcattgcaataggtatagacattatcgttttcggagagcttaccggaatctcaaccaatgagtggactataaaattttcgaacttctttactggtgatttatctaagctaatatctttcaacgaaagattccattccatcccctccgaagaaaaatttattctagttaatcaacttggtgaggggcgtttgttatcagcaccaataaaattaaataaattaccggatagctatgaagtaaccgtaccggttgaaatagacactccacgcatcaattgcaatagcctcccaatggatttagatattttcacgacaggcgatttgtttataaatagttctggtgatatagctacgatatcagggtttaatgctttacctcaaaaaatatatacctccctttctaccattagaggtgagatttattctcagccaacatttggttccagaataagacagttcttccatgactttgacggaacaatgtggctagacaagttagttaaattagaagttattcgcttatcttgcataccatattttgactcaatcacaaaaaacaagtgcaccccattacattgtgtaagaaatgtcaaaaacattcgggtaataccaactgaatataaagacaggaaattacctattgagttcacccttgatattgaaggtttcggcatctggaccaaagaaataagtgttttctcacctaaatacgatgaataa

SEQ ID NO: 207290 - DNA, 228 bp, Klebsiella oxytoca
atgagcgataaaacgacgaataagaatgtgctgatcccggcatacgccatcaaaataaagtccatttcggatgttgatggcgggtttgctgttatcactcccgacaacgaacaggaaatcaccgacccgattacagtaacggcggcatttgtcgaaaaatataacccacaaccggggggatattacgtcatgtgtgtgaatggagtcggtttgtattccggaggttaa

SEQ ID NO: 207291 - DNA, 924 bp, Klebsiella oxytoca
atgaatgtcattaaacatagtgtagcagcagttctagtcacatataatagagttgaactattaaaaattgctattgactcactagaaaaacaaacgattgagcttaaaaatattgttgttgtgaataataattctacagatggtacagaggattatctaagaagtattgcaagtgacaaaatccaatttataactttgcacaaaaatactggtggcgctggtggtttctcagctggcattaattatgcctacaaactgaatattgattatgtgtggattatggatgatgatgctattgctagcccttcagcattagaagaattattaaaagcaaacgatactttacaaaatcattcagcgacaccgggttttttatgcagccatgtccttagtgataatgaagattgcatgaatgttcccgagatttctaagaaaaagaactccactggttatttcagttggcctgagtttgcttcaaagggcatagttggagttgataaagctacttttgtttctgtactaatatcaaaagatattgttggtgagtttggtttgccagttaaggaaatgtttatttggggagatgatacagaatatacatggcgaataagtaacaaatataattgctattatgtcgcgaatagtgttgtttatcataaaagggtcatggctaagtcattgtcacttgcaacagaagacaatttaaatagaatgccatggtatggattgctttacagaaataatttttacaacgtacggaaacatggtaaagctaaagactatgttttctattttaattatgttttaaaagatttctttaaggttttattcaaagcaaaaaacaaaaagatcaaaaggttatgtattattattaaaggatttatatctggtatagtatttaaccccaaaattgatagaccataa

SEQ ID NO: 207292 - DNA, 237 bp, Klebsiella oxytoca
atgtcccgagtctgccaagttactggcaagcgtccggtgaccggtaacaaccgttcccacgcactgaacgcgactaaacgccgtttcctgccgaacctgcactctcaccgtttctgggttgagagcgagaagcgttttgtcaccctgcgcgtatctgctaaaggtatgcgtgttattgataagaaaggcatcgatacagttctgtccgaactgcgtgcctgtggcgaaaagtactaa

SEQ ID NO: 207293 - DNA, 258 bp, Klebsiella oxytoca
atggtcgagctttccgggaaaactcaggaatacttaacccgggccacccagcgttattatgccaaaacgccgatgcagatgattaacgatattcgcatcaacttcgccaaaaaacagctggagataaccaactactcggtgaccgatatcgcctatgagtcggggtacagtagcccaagtctgtttattaaaacattcaagaagctgacttcttttacccccagcagctatcggaaacacctcaccagtattaattaa

SEQ ID NO: 207294 - DNA, 603 bp, Klebsiella oxytoca
atgatgaccactgaaatcagtaccgcccgggagcaacaactctttaacggcaagaactttcatgtggtcatctataacaaaacggagagcgtaagcgggcttcaccagcatgattactacgagtacaccatcgttttaaccgggcgctattatcaggttattaatggcaagcgggtgctgctggagcgcggggattttgtcttcatcccaatggggtcgcatcaccagagtttttatgaatttggtgcgacgcgcattcttaacgttggcatcagcaaaagtttctttgagaaacactatctgccgctgctgccgtttggtctggtcgcctcacaggtctatgccgttaaaagtacttttctcagttatattgagtcggttattgcatcactgaattttcgcgaaactgaattcgacgaatttatcgagctggtgtctttttacaccctgaatcgtttgcggcattatcgtgaagaacctacggaagacgttattccgcaatggttaaaaaataccgttgagggtatgcacgataagcttaaatttggcgaggggcgctggaaaatatggtcgagctttccgggaaaactcaggaatacttaa

SEQ ID NO: 207295 - DNA, 852 bp, Klebsiella oxytoca
atgaaaggtaaaaataataaccaacaaaagggaaatcaccatttcatcccacaagtttatattcaacgtttttatgatgaagaaaaaaaagctgtatggagaggtaaaatacagtataaagaaactaagtacttctcatctgctcaaatcttttatgttcataaattatatgatttaaaactattaggtaagcaattcactgacatagaagattcttatgctaatattgaaaatttagtaggtgatttttatcaaaagatcgatcgttatgaaaaattagacctttcagatgaagaaaatatagaattattctactttattaaaacaatattactaattcaatattttagaactgaagatatgaaaccagaaatgtttagagaacaatgcactcaactggttaacatttataagtcaaaagatgaactattcaaaacgcaatttagttttatcaaaattgaagagttaagattatttgaaaaattaataaaaaaaggaataaggaaagataaaaaatatacaaatgaattgataaagggattacaatatactactctcccattactattatcaaatttcaatagtaaaggaataactctaattcgaaatcaaaaaaaatatatcactagtgataaacctgttgtatgcaagaatatagatgatcttttgaatttaagaaactttatatatccactaagccctaatattttagtatatgcattaggagaggatgttacgaaagatatgattaatgatgaaaataaagttaatgagttcattgctaacaatgcaatctcatatatcatatctaatgacaaagatatggttgaaaagtatatgaaagccctgtaa

SEQ ID NO: 207296 - DNA, 480 bp, Klebsiella oxytoca
atgaacatcgaaacagtaaacgagctcattcagtcgcttgagtctgcgggcgagctgtcgatcaaagagagtaagtatctggagctggcgaaagcttatcagcagttggctgcggagaatgtggtcaggcaggaattcgtcaaaatctgtttccgcgcagcagcagacggcgcatcgctggatagctcagatattcaggagataggtgagtgcctcgggctgtttggtcgcgaaacataccaaccgatgctgcacgggtatatctgtggtcatgaggctggcgaagatagcgtgtatgtgatgaaaagcgcgcccgccaccgacgcctacctggccgggattaaggctgatggggtggaggagttcgtatccaacaccgtgcataagatttttgatgaaagcgatgcagtgtcagctttggcttacctttccctggctaattcacacgtgaagcaactgcgcgaggtggccgacaaatga

SEQ ID NO: 207297 - DNA, 222 bp, Klebsiella oxytoca
atgatgaccgaagcggcggttgacggcggattcacccgcgatctctatgctgcgctgggcgaagagctgggcaacggcgcctgggccgtacgcctttattataaaccgttcgtacgctggatttgggccgggggagtgctgatggcgctgggcgggctgttgtgcctgtgcgatccgcgctatcgcccgcgccgcggatatcctggcgcggaggccagatga

SEQ ID NO: 207298 - DNA, 1986 bp, Klebsiella oxytoca
gtgaaaaataacacttcggatatgacctccgtttattcggtgatcgcggcgccaaccggcgggattttattattgccgacggcgctttttctgctgtaccaaagcggtatcgcgcgggcggaggactactttgatccggcggcattagaatttgccaatccgcagcaaaagaccgctgatttacactattttgccaaagcaggcggccagcagcccgggacatacccggtcagcatttgggtgaataaccaggagatagcccagggcgaggtgacatttgtcgacagcaacggcgaactgcggccgcagttaaccccggcgcagctggcggaatatggcgtcaacgtcagcgctttcccggcgtttaataccctgcatgagggagaaacgtttactcgcatcgagcgctacatccccgatgccagcagccgctttgatttcgccactcagcgtctgaacttaagtattccccaggcggccatgaacgcccaaagccgcggatacgtggatccggcgcgctgggatgatggtatcccggcggcgtttgttaactataacctgaccgggtcgcaaacccggcagacggatgacagcagccgctccagctacctgaatctacgcagcggggttaacctcggcgcctggcgcctgcgtaacgtctcgtcgatggagtatgaccggacccggcgctggaattcacagagtacctggctacagcgtgacctgaagtcactcaaaagcctgctgcggatgggcgatacctttacgaccggcgacgttttcgacagcgtgcagtttcgcggcgttcagctgatgtccgatgatgaaatgctgccggatagccagcgcggcttcgccccgacgatccgcggaatggcgcacagcaacgccaaagtcaccatctcccagcatggctacgttatctatgaaacgttcgtctcgccgggggcgtttgcgataaacgacctctatccaacggcgcaaagcggcgatctcgaggtgcaggtaaaagagagcgatggttcggtgcggacctttacccagcccttttcagccgtcccgtttatgctgcgggaaggacgcgtgaaattcagcctgagcgccggacgctaccattcggagcagagccaggtgcgctcgccgacgtttttgcagggtacgctcttttatgggctaccggctgaattcacgctctacggcggtagccagctggcgcaggattaccagtcgtgggcgctcggcgtcgggcgcggttttggcgagctcggatcgcttggaggcgatgcgacatgggcgaacaccacgacgccgtcgggaaagcgatcggccggccattcggtacgggtgcagtaccagaaggattttgccggcaccggcacctcatttagcctcgccagctatcgctactcctcaggcggttattacgacttcagcgaagccagcgcgcttgagagccgcaatggcctgctggataacaagcgcagccgcgaagaggtctccctttctcaggcgtttggcggtatgagcagcctggcgatttccgcctggtcgcaggagtactggcaccgccagagccgcgatgaaacgatccatctcggtttttacagcgcctggcgaggcgtttcgtggggcgtgggttattactacacccagtcatccgatcgccaaaaagacgatcgctcgtggtccttgaacctgagcattccgcttggcggcccgctgtccgagagcgcggttagctacagcaccacctccgacaatagcggacgcacctcgcagcaggcgtcgctgtacggttcgcttccgcgcaatcccaatctctactactcccttcagcagggctacgttaacggcggccagggcagcaacagcagcgcatcgctcgattaccacggcggctatggaaccgcgcagctcggctatcgccgcgatagcgcaagccatcagctgacctggggtccatcgtcgcccatcctcatggcgtga

SEQ ID NO: 207299 - DNA, 297 bp, Klebsiella oxytoca
atggcgaacctacgtaaagaggcgcgcggccgagaatgcaccgtccggatccccgggtattgtaacggcaacccggaaaccagcgtgctggcacattaccggctggcggggacgtgcggtaccggatgcaaacctgatgatacccaggcggctattgcctgcaactgttgtcacgacttgatcgacggagggaagaaaacaaccgattacacctatgacgaactgcgcctgatgcatgcagaaggtgtactcagaacgctggccatatggaaaaaagaagggctggtaaaagcatga

SEQ ID NO: 207300 - DNA, 414 bp, Klebsiella oxytoca
atggcatacgcacaatgggttgaagtaaaagttgttgtcactgaggggctgtcagtttccatcaaagaagctaagcacagtagtggtaaattttataaattgggtgataagggtcatgaactgtcgccagaagagataaatcagatggtggtgactgactcttctactgccgataaggcaactatttgcgcgtgtggacgctcggatgcaccagagggtactgaggggagttttgtcatgtatagcggcgctgacaaaattggtcggttttattgggactgcccttggggtaaaaaaactaacaaaatacaatatattagcgcgtcaaataaatatgttgttcaagttgagggtggaaatcttgactctggcgctctaggtaatatcgtactcactgtcgttaaaattagataa

SEQ ID NO: 207301 - DNA, 189 bp, Klebsiella oxytoca
atggcagaaggttattattggattcgacattgcaatgttgttcaggttgcctattatacgaatgactatgttgaggacatgatgacgggagaagtggtagttggcatctggcacttaacccaaagttatgacatttgccataacggtgaagctgaggtcctcgaaggaccattgaatcaaccgcaataa

SEQ ID NO: 207302 - DNA, 501 bp, Klebsiella oxytoca
atgcgctggtgttcagatggcttcgagttcggctgtgacaacggagaaaaactgcgggttacgttcgcgctggactgttgcgacagagaggccatagactgggctgcaagcaccggaggctacgacagttcgacggtgcaggatgtgatgctgaggtcggtggaaaagcgcttcggcgacaggctgccggaaacaccagtgcagtggctgacggacaacggttcagcatataccgcgcatgaaacgcggaggttcgccaaagagctgaatctggagccgtgtacaacagcggtgagcagcccgcagagcaatggcatggccgaacggttcgtgaagacgatgaaggaagactatatcgcgttcatgccgaaaccggatgtgagaacagccctgcgaaaccttgcagcggcgttcacgcattacaatgaaaaccacccgcacagtgcgctgggatataactctccgagagaataccggcggcaacgtgcatcgttaacctaa

SEQ ID NO: 207303 - DNA, 138 bp, Klebsiella oxytoca
atgcaactgacttgcgcagatatccatttcgatcgcgcgatcaaaacgaaagatgaagcgctgcaacgcgtcgttggcagattaaccgaatccgggcataccacgcccgcttatctgaacggcatgcgcgaacgctaa

SEQ ID NO: 207304 - DNA, 225 bp, Klebsiella oxytoca
atgaaaatctgctgccggcttcataaagatgacgctgtctggctggagcagacgctaatacagctcggtctttcaatccgcgcctggcagcgcctgattaaagtttcccgaactattgccgatattgaggcagtcgaacgcatcgaacgtcatcatttgcaggaggctctcggctatcgggcaatagacagaatgttgagccatctacaaaaaatgatggcgtaa

SEQ ID NO: 207305 - DNA, 534 bp, Klebsiella oxytoca
atgctatatataaaagatctaattgaactaagtacaagagaagaggttcgtgaaattgatattgatgttaccacatataaggaactatcaatatccattgcaaatggtagatttactgaactaaagagtactgaaaagtttttatcacccgatgaagtactcaagattatcaacaaaaaaagaaaatatgactctatatacgatttaccattcatgatggcattagttagaatagattgtggagaaataacatatgagaatggagtacttaaacatattagtacatctgaaagatataattgggaaaaatatcaagtatggttaaatgataatggaacacttggtaagtactcatttagtgaaggtacgacctttccacccatgtgtgtactaagtggatttggttatattggtgatttatctgaagaagaacgattccagagaagtacaatacatggtcatgatgatactattcaagtactacaagatatcatattaacataccccactggaaatgatcccaacttcaaataa

SEQ ID NO: 207306 - DNA, 1434 bp, Klebsiella oxytoca
atgcagggggagtttttcccttcatctgatcgcccggagctgctggtcagcctgacgcttccggccaatgcttcgcagacggaaacggagaaacaaacggagaggctggaaagggcgctcgccgggaatcgcaatattgaccattattcgacctatattggggcgggcgccatccgcttttatctgccgatggatgttctgctggataatgaaaatacggcgcagctggtggtggtggcgaaagacctggccgcccgcgaccgcctgcgggaacagttaaacgcgctgctggccacgcaattcagcgatctgacctcgcgcgtttcgcctctggagctagggcctccggtgggctggccgatcaaataccgggtcagcgggcctgattatctcaaggtcagagagtatgccgggcgtctggccgaggcgatagggcgctcgtcgttaacccgggaggtaaatcagaccgccggcgagccggagagaaccatcgtcctgcaggtgaaccagactgccgcgcgggcggcgggagtgtcatcgcagagtctggcgcagacgcttaataccgtctggtcaggcacgacggtcacatcgctgagagacaatgaccggctggttgatgtggtgctgcgggcgaacgacagcgagcgattgaatcttgccaccctgtcatcgctgacggttgaggggcgcggtggagaaaaagttcccctcagcgcggtggccacgccaacctggggagtggacgatccggtgctctggcgtcggcaaagattgccgtttatcaccgtacaaaccgacctcgcgccgggaatgcgggcagaaggcgtatcgaacggtctgcgcccgacggtggatcaactgcgcgcgggtttacccaccggttacagcattgtcgaaggtggagtggtcgcggagtccgaaaaaggcaacagctcggtattgaatattttacccgtcaccctcggcattatgctgttattgctgatgcttcagctgcggcgctattctcgtatgctgctggctctgttcatggccccgttcggcttgccggggattgttatggccatgctgccgggcgacacgccaatgggatttgtggctctgctcggcgtcatcgcgctggcggggatgattatccgcaatgccgtgatacttatcactgaagttgacggcaatctggctcagggcatggaaagcgatgccgctattattgccgccgcagagcaccgggccaggccgatatttctgaccgcctgcgccgcgatactgggtatggtccccatctctcaccaggtattctggggaccgatggcgtatgccatcattggcgggctgattgtcgcgacgctcgtcacgttaaccgtgctgccggcgtcctttagcctgctgctggagaggggaggataccgggaaaaacgtcccgccgcttaa

SEQ ID NO: 207307 - DNA, 690 bp, Klebsiella oxytoca
atggttgtcattcaagaaattgtcgccgcgctgtggcagcatgattttgccgcgttggcaaacccccacgttgtgggcgttgtatatctggtcatgttcgcaaccctgtttctggaaaacggtctgctgcccgcctcatttttaccgggcgatagcctgctgctgctcgccggggcgctcatcgccaaaggcgtaatggactttgtacctacggtcgccattttaaccgccgcggccagcctcggctgctggctgagctatatccaggggcgctggctgggtaacaccgttacggttaagcgctggctgggtaacaccgttacggttaagcgctggcttgggcatctgccgcataagtaccatcagcgggcaacctgcatgtttgacaaacacggcctgctggcgctgctggccgggcgtttcctggcgtttgttcgcacccttctgcctaccatggcgggcatttccgggctgccaaaccgccgcttccagttcttcaactggctgagcgcgctgctgtgggttggcgtagtcaccggtctgggctatgcgctgagcatgattcccttcgttaagcgccatgaagatcaggttatgacctgcctgatgattctgcctatcgcgctgctgatcgccgggctgctcggtacggttatcgtggtgattaaaaagaaatactgtaacgcctga

SEQ ID NO: 207308 - DNA, 1284 bp, Klebsiella oxytoca
atgtttgaaagtaatataggaatcgaagataagatagagcttatagaatcaagctctacaaagacttattttaaagaagtatatagcagctatttgaatggtaattatcgagcggctgtagtttctttatggtctgttttggtttgtgatgccgtatacaaaacccggcgtttagttgatctgactaatgatcattgggctaagcagcaaattaaatccattgaggaatctcagcgccaaaatagtactaaatccgactgggagttaaaattgtttgaagggttctacgaccaaaagaaattcattgggattggcgaaatcaccaacattagagatatacagcagaaaaggcatctatgtgcccatcctattctttctgaggatgatgtgctttacactccaaataaagatctagtaaaaagcatgattataaatgcacttgatgattttttattacgaaagaattattatgggaaagatttattcccaataatacgagatactctagtagagaacagtgaatattatgccactgtaaaaaatataaaacctctaatatctaaatactgtcaaagagtaactccattggcactttatcagatattcaaagagttttggaagtttagttttagatttgaagatgatgaatcttcaaaacatagaaggattctccactttgcatgcatgtatctatattacgaggtaaaaaggaacgctgaattaacagaaaaaatcaaaggtgatgtagactactttgaaaaaatatcattcaaatatgatgcgctaacacatttgttttcatttttctgtgagcatcctgatttctacaaaaaactatcccctgaacttcaggcgcgcttaaaagaatatctctcgcgtcatgacaaggatgatatagagtatgtttataaaatcgcaacaatgtttttatttgataatgccggggagtattttgaatacatccgtaacagcattgaagaatatgaaatagagaaaatcacgctttcacatttaaaatatataattgaaatttatcatgatcatcagtgtgaaaaagaaatctatgatattgcagtattgtatgcttcaaaatccacaagcttcgatgatgctgataacagatttaatcttattttcgaaaaagaaatatttggtaaattgtctgttaatcaactagagcaattaatatcatcttttgaagtgaatgatcaaataggctgcagaagacgaagcgatgctgatatgaaaaagctaacaattagacttgagacaataaagggataa

SEQ ID NO: 207309 - DNA, 1440 bp, Klebsiella oxytoca
atgatgcaatacattacaattaataacatcatcctatttggtgcgactggagcaaccttatcaattttaattctttttacatcatccatattatactattttttttcacacaataatggaacgctacagtatttattcaaaactattataataggactcataacaacacccgtcgctatagttctattgttcgtccttgtgcattatgtttgctggcaaaaaggaattttatcagcatggcgttacatctcacattcaaataaaaaaaagaatgaaaatacgattaccaatactgagtctgcggatgttttagttcatctcattcatggtacctttgaacctaacgccccctggacacaatcaaactcagatctgtgtaaagaaatcaataaggtaaacccaaccctgggaatttcccgcttcgtatgggacggcaaaaacactgaaacatcccgaaaaaatgcagcacagcagttgggtaatcacatcaagaattcgccagccaaatataactacattattgctcatagccatggtgctgctattgtaagagaaatgtcgtatatgtttggtgacgttgcgagaaaggttgagggagtctgtcttctgtcgcctccttttatttatcgacgtaaaataactcgcacatctggagcattgatgcatcttattgatataagtggctcactctcaatccaacttatgcttgtcctaatcctaaaaccttttggcctgtataatttctcttttgcattactcatttttgcgctcaccgcatttgcagaagtcaaactatctcaaaaatataaaaaagaagttttgagtgaggtcgaagatggcaggctacgagaagctgtggatttcagaaatgttgaaatttatcatgctataggcgatgaggcggactctggattaaggtttgtaagctcacttcacgaaggatgttttgcaatattctcgcaactgaaaaaagctcaaacaagtcaacgcaagttaatacattggtcagcatttataagttacattttgcacattcttgctggtctattagtttgggagttttaccctcaagatacagcatggctgatttcattattagttagcttcacaatcgtttttttatctcacatttttcaatggctaagaccctctagagatattccgcatgttttaatcatagctgcaatgcctgttgccattttctcgttttggctggctttggctaaaggaatagcctatggagacctgcgcttgattttctgccctgaggtatttatcgcatcatcagaaactcctgctggagatcatcgggttcttaagtttgctccacaaagcgatggagttctaatgcacgctacacactcgaacacagaagctttgcaaaatgtcgctcaatggttgtactttagtgaaaaggaaagaaaaaaacgcaacccatag

SEQ ID NO: 207310 - DNA, 150 bp, Klebsiella oxytoca
atggaacgtagtgaaggtagcggtgcgcaggaagcccgtcgtgaagcccattacgaaaacctttgtcaagaagagagtggcgcattgtgcgctttaaacaatcaaaaagaaactgtaagaaaagtggccgagcagcttttccataaataa

SEQ ID NO: 207311 - DNA, 762 bp, Klebsiella oxytoca
atggataagaatttattacagatctgctatgaaggtgaaagtggagagagttacatccgtagcattaatgagaagggtcaattctatgtttcgctatctgatgtactaaagacgctctcaactgaaaacagaaaaatggatggtaagactcctcagagcttattacctgttataaaagcggttattcaaacacttgatcccgatgagattaagaacttccccattatcgaaaacggagtcacaacttctgaagcatttttagctgaacctgggctgtatagggttttagctcaagatacatcagcagccgggaaaaaatttcaacggtggctttttcataaggttttgccctccattcgtgaatttggtgtttttccccctcctccaaaacaagaacaatctgagatacgtgcttttgctacaagccttcaacaaacagtaaatgctttagttatggaaattgctaaacgtgaggagcttgagggccgtgttaatgacgtagagttaaaagttaactcattggaaagtttacgagatctttcaaaattccgaagtgtcccacaacgtttaatggacttaggcttggaggttttgtcaattgaggaactgtggcattggtgtgaaaaattacgcagcgaaagaggggctgaaaaaataaaatgtccgtcagggatcgggatcaataccttatacccccttggtttggtagatgaagctattgctttgtatcaaaaaaatgttgaggcaagagagagaaagtaa

SEQ ID NO: 207312 - DNA, 627 bp, Klebsiella oxytoca
atgagaacaataaccatgtataacaaagacaacttaaaacaagcggaggcggtatacgataaacttcattctataaccagaaagttaaagtgggagattaacaaactaaaagaacagtctttctctttaactctaaaagaagagtcaggtaaatgtgttaaagacgcttatttaactttattagataagacgaaaacagaactgaatgactctatctgtaaaattggatttgttgataatgatgtttatctttttattgactggtttctaaataaacattgtgctgtgaataccagagatggtgctgctcctgatggaacacattttatcttttatgattatatcgatcttgagatacaaaacttcaacagcatagtatcagagattaaagataacgcccttaataagttgtttagcttacatcatttagataaagaagaaggaaaaatcattacagagccttgggagctagaatatataacagaacaatcaatcaaagtgtttaaaaagttgtgtttcaaacataatgtaagcaatacacaaaagtatttaacctatgctatgtgtaacaatgagattgatgagtgttttgattttacgaagcttttaaatgagctatggcggtaa

SEQ ID NO: 207313 - DNA, 1503 bp, Klebsiella oxytoca
atggctatttttcatcttgattttaaaattgtgaaacgaagtgagggcaaatcttccgttgcgaaagctgcctatcatgctcgtacacgtataacagatgaaagaacaggtgatacgtatgattatagccgccgtactgatttatatgggcatttcatattagcaccagttaatgctcctcaacatattgtaaaagactccacaacattatggaatgaagttgaaagagttgagcgtcaacaaaatggtcaaacagcccgttattttgacgttgccattcctgccgagttaaataatgacgacaagaaaaaacttgtccttgaatactgccagaaaaatttcgttgataaaggcataattgccgatatcgcttttcatgatcttgatagcgataacccacacgctcacgttatgttgacattaaaaaccataggcccggaaggttttggtaaaaaagaaagaagctggaacgacagaaaaatgtctgtgctgtggcgtgaatcatggtcaacgatggctaacagctatctcgaagccgcaggttcatcagagcgtattgatcatcgttctcttcgagcccagcatgaagaggcactggaaaaagcagcagtagctttagataatgaagaaaaagcactttggcttgctaaagccgctgaaacaaaccgtcctccaatgaagcgtattcacagtgccaaatggcgtagtaaagcagctcaggagcaaagaaccgcagaacaggctgttcgtgatgctgccaagcaagaagccgttgaagtccacaaaacattcagcgaacttgatcttgaaattgttgttgatgtcagaagcttcaccgtggctgctcttgctgaaccagaacaaatcgtattacctgaaacacactccggctcttctactgatgagaatcaaagacctgtattggtagcaccagctcctcatactcgtatgcgtggcgttaaatcttaccgtgataaaacaaaagtcagtaaggtcgttgctggtaagaaaccatcagtcagtatttctgattctggaacaaatactatcctgaaaacatcctcctctcaaaacccaaacagggcatccagaagcgcccctgagcatgttaagaggacacaggctattccacgtcaggataatatttttaaacgcttcacaactcttgtcatagattttttcaagcagaagtttgtatgggctaaagcaaacaaagcccaaattgatcttatcagtgaggaacatgataaacgtattgctgataactacgtctttgatgaggtattaggccatcgtgtttctcgcgttgaatatgagaaacaagctaaatttaaccacgatgactacaagccaacaccggatgagatcagccgtttcccaagtcgtcagaataacgagcagaataatgccaatagtgacatgggtcttatcccatccatacatgaaaataaaaaaaataatttactacgattgagaccatccagctatcgtgttaataaatga

SEQ ID NO: 207314 - DNA, 765 bp, Klebsiella oxytoca
atgactacacctaggctccaggcggcactggtttcagaacagtggcttagaggaaagcacttcgctgatgctcttcctgttgattgcattaagatagctgaaagcctaggaataaaagtccaaggggcccctcttaaggatgaattccaaggggccctctttataacccctgatgtaacagccattattttcaatgaaaacataaaagaagatgggcggaaaaatttcaccatagcccatgaaattggtcactactgtctacatagcgatagagaggaagttcaatgccgattagaggatatgggagcattcgttctaacaccgcatggtaaggagatagaaaaagaagccaatgagtttgcagcttgtctattgatgccagaaaaagatgtacagcagcaactcttagataaaaacctcgatctcaaactcgtgcttggtctcactcttcggtatggaacaacagtaactgcaacagcttgtcagatggtgcacatgtctgataaaccacttgcagtcgttatgttaaacgaggataacacgacaaaatggtgtcttcgtaattcgcatttccgtgatttctttatcaaaaaagggactcttataaacatccaagaacacttaccggaggaactgtcaccaacatatcaagacacatggttttcaagctctgtgaaaagcgtgtggaatctaaaggcttcatctttagatatggaggaatacaaacaaagaatctatatgatttcaggcagtaagcttacttaa

SEQ ID NO: 207315 - DNA, 294 bp, Klebsiella oxytoca
atgcttagcgaaaaaatcagagaactgaggacatctcgcgggctgtccttggatcaattagcatcaaacgtaggttctacaaaaagctacatttgggaattagaaaaaaaaccagggataaaaccatctgcagagcttgtttctaaacttgctcaagcattagatgttacaatggactctctgatggatgagaaaaaagaaaacgatcaagatatagttttctttagagaatacaaaaacttatcagaagaaacaaaagcgcaactgatgagtatattgcgagcaataaaataa

SEQ ID NO: 207316 - DNA, 177 bp, Klebsiella oxytoca
atgagctatctttttcttgtcgccggcaccgcaccaggtgcgacggtccttttacagagttgtcctcatttgacgggcctggatggcccgttcttttatgcttttaacgtccagaacccttttctcggccgaaatcaccggctatgcggtggtgtgcatagccatgcatatgcgtaa

SEQ ID NO: 207317 - DNA, 1980 bp, Klebsiella oxytoca
atggagtcggcatttgtcacgcagctcaccagccaggaaagtcggttcaataccttcatccaaagttcgggctatcagattgtcggtgattacaccgccggcccgttgacgatcactgagtacaaccagctcattcgctataacaacgagttgtataaactcaccgcagcgacagatatcccgtttaccacggctggtcatactgacgaaacatggaccgatactgatgctgcgcattttgtatctgtcggtgatgcagcgcttcgccaaaacctgggttcaggcgacggcacaaagctcatcggcggtctgcctttcgtaactcctgagatgttcggctccagccggggtgatataacccacgatgaagcttttcggctgatgcttgctacggccgccgtgcatccaacgagaacggcatgggctcctggtgattacgaactgtttgatacccatattctgccgcagggagtaacactcatcattgatggtgttattaagcataatcctgtcggtgatttcacgtggtctgaaagcaaccgtcgctctccttattcattatttctggttacagtaagtgctgtagccattaaaggttccgggagaattgaaaataaatatgaggctgtttccgtagattccggcggagacaacttcaaatttgaaggggtaacgatttctaatcctgaccgttcgaaatcggttgggttatcaatttacaacgtatttaacgtcagtgtgttgaattgcctcattgcaaataacggcagcaaagggacttatgtaaatagctctagcacggggattaccgggcgctacgggaatggtattgatgcgggaagcatttggggaatgaataactccggactttcgctgattgataacggagcaaatggattctggtgctatggggtcggagacttaagttttgtgaatggttggtgcctcaccaatggtgcctctggattccagtacggaccgcatcctgattatgatggattaactctttcaaatagccgatttcgtgcaaatgctgctgatggtgttgatattaactatacagggacgttgccggttgcaatagatgcgacgattaccggtattacctgtagacggaatgggttttataattcagacacatctaaacccacagctgacgggtctggcgttactctgcgtaatgttactaactacgtccttgcagactttatctctcacgataacaatggcgttggggtttactgcacgtatgcggcagatgccaatattcatgatggcgtcattataaacaggctgacaatgtcatcaggaatgtatcagggcttcgcctcaacggacgtcagtatccataacatgaggataatgaccaaaggaacctgctatcaggaaggcggctctatgccagtgactcggccagcattccatgataacaagctgtttagctctcaggcgcaaaccacctctataccgagcaatacacagacggaccgaatctggcacagcaaccatcacgtcacacctaacgtcatcaacttctggttctcagttaaagatgagactgtgcgctatacgggaagcacaggcagggcggtttacattaacaccaactacggcaaaattcgcgatctgactgttgtcggagccacatcagacgacctgatttatgttgatggcggtcttaaaaacattttctccgggcttgcggcaaataataccggaaccggcagggccgtatacaccaataacagcgctcgtctcaagttctcggatgcgtttatccagtgcgcagcaggtaccgcattattctgctacgccggtacaactgtggatttggatagctgtgatgttatcggcgttaccgccataagtgcgccactgccatcctctggaaatgctgcggagataaagaaagctggtacgaactttataagtggtgcggtaagcacagccatcccggtaaaatcagtaccgtattcataa

SEQ ID NO: 207318 - DNA, 279 bp, Klebsiella oxytoca
atggcatttaaaatgacgaaagaggttcaggtgagcttggtatcaaatggcgttgtgattggctctcaggcccagagcgcggagctcatcatgacagttaccagtgtatcggtttacccggacggaacgggaacagcatacctgggaaccacggtaaatggggcatctaacggcgatgtgcgctcattcccgataacctggctgagtggggatattttcagccaggcgcaagcgcaaattatggggctgggtgagttttccggggcgactattgcataa

SEQ ID NO: 207319 - DNA, 264 bp, Klebsiella oxytoca
atgtatttaaagaaaaccatcagcgacaacaacggtaacgccatcgtggatgcggagcacattatcaaagagctgaacatctccggcggcatgctgtcgtttcttctgcgaagctttgcgccatcctcaggtgatgaggagcgactccctttccgtgccgcctggtatcactgtgaataccgttcatcggaggaattataccggcaggggtttgagtacctgctgacgctcgatgatttcgccggaggagaaattaatgcttaa

SEQ ID NO: 207320 - DNA, 771 bp, Klebsiella oxytoca
gtgcatcaggcgtacattgaggggatagggctggttaacccgaacctgcccgccggaacaggtaattactttggtattgatgttgccgacccgctgcgccctgaacgctcagggattgggtatctactgggcgaaggtggcgcacagctcgattttttcacaacagcatccaataaccagcacgcgccgctgatatcgtcaaataaagtgaagtctgcgccggagaccgcgctcacatatttatcgtcaatggccgattctggcgaagttgacagagctactgtctgggacggtaccaacactgatattcgctatttgcgcaatttcagctcggcattttctcagcctatcgctttttcgctgggtggcccgacatttcgctacgctgtcgggtatttcacgccgaaattactggttggcggaaatcagctttccctgtccgttgcgcggggttattacgtccggaacgggaacacgataacggccagcgttcagtttcagtctgccggaagcgtcacgctggcggccggagaaattgtgatttcaggcctgccctttgtcattcctgatggcgtgatatcagtccatcacggacaggtcacactgttctcgctcgctgccgccggcgtggttgcgctcccgctgtttaacgaggcgaccacgaccatcacgctgacgaaggacacgcgggggaccagattaaacggctcagaaaccagcgcaggcgttctctacctgaacctgagttttaccatgtctatagtggggtaa

SEQ ID NO: 207321 - DNA, 249 bp, Klebsiella oxytoca
atgtctttaattgttgatacaacctttaaaggtatttctgttgagagcgcgaaagtcaccatcggtgatatttatattgctgacggacatgcggtgttgtccataactgccaactggtcggcgcctgggtcttcagaggtcttcaggcaaacaacctataactgcccgtacgatatcactggcgcagacccggtaactcaggcctacacctggctgaaaacactggacgagttcagcgctgctgattga

SEQ ID NO: 207322 - DNA, 672 bp, Klebsiella oxytoca
atgaatatatttgaagacaatgattttgaaaacgcctgtaaatggtatgagcacgttaagtctaatgttgacggttttaatataaaaatacaaaacctaagagaaaagatagcgttagatttattaaataataagaatattgattatttttacacggtttatccgtctttagtaaatcgctttgaaacaggtttttatcaaatcattgatacattctctgtagaacaacaatatctgccattcgtatgtatgatcattgaagaacatgccgatcagatatatgactcaaccagttttttatcacaggtattaagtgataagggatttagcgatccgcaagatactctgacctttggttatgaagtgtatgaggcaattggtctcctgaatgtcgatattgaagatgtaaaagaacagacaatgtataaataccataaaatggattttgcttatcatgactggcgcttgaagtatggtgaacaagagctgataaacgcatgtgccggttttaatcgacgtgtagcagggctgtttaaaaactatgggtttgataaaacctgtattcctgtattgatggcaattattattaatgaaacagatcacatttatggattttcagattatggttttatcgagtccttaataacagctattgagaaagagatggggtaa

SEQ ID NO: 207323 - DNA, 318 bp, Klebsiella oxytoca
atgaggcattttacaagtaatcaaattgattcaacttttatgaatgcctttggtcaacctatcgaaattaacggggcgacatttacaggtattgtagatgtacgccccgttgtcgttgatagcagtactcaaggcataattgaaggtacagagacattaatctcaattaataagaaagacatttcattagtatcgattgatgcaactgttgaagtagatggtgttaattatacaatctataacatatatgatgatttgagtggcattgttgaagtttatataagggaatcaatatataataattatggagggatttaa

SEQ ID NO: 207324 - DNA, 396 bp, Klebsiella oxytoca
atgtctaacactaacgccaattttgagatgaccgggatcctgttagggcaagaagtccgtaaacgtaaaactcctcaggagaagatcgccattatccagcagacgatggagccgggtatgaatgtctcccatgtcgcccgcctgcatggtatccagcccagcctgctgtttaagtggaagaagcaatatcaggaaggcagcctcaccgccgttgcggctggagaggacgtcgttcctgcttctgagcttactgctgctctgaagcaggtccgggagcttcagcgccttctgggcaagaagacgatggaagttgagatcctgaaagaagccgtggagtacggtcagtcgcgaaaatggatagcgcacgcacccttgttgccaaaggacggggaatag

SEQ ID NO: 207325 - DNA, 639 bp, Klebsiella oxytoca
atggattcagtttggatattaaataatgacacaattgtcaatgaaaatagtttgtctttaatgagggcaacattagaaaacgatcagaacattggagtttgtggctccagactagtatattttgatgatagagaaaaactgcaaggcctcggcggattattcaatccagttctatgtacttccaaacattataaagcatatgagcgtgctgataagatattcgataatgaaaacgtttcgagtaacattgattatgttattggtgcatcaatgctaattaaaagggctgtattagagagcattggcggtttatgtgaagactattttctctattacgaagagatagattattgtatacgcgcgaagaaattaggatacaaagtttttgtttgcactgaaagtgttgtgtatcataaagaaggggcatcaaccaaaaaaaatcaaaagggtattttagctgattattattcagtaaggaatcggctgctaatttcgaagaaattttatcccaaatattatgcgctagtatatttatccatttggttggtcttgcttaatcgtgtgagaagaaaagagtttcacaaggcaaaaaatgtactaaaaatattaaccttcagaaaaatttgtaatgaaaattaa

SEQ ID NO: 207326 - DNA, 135 bp, Klebsiella oxytoca
atgagaccaaacatgataaatggaatgcctaaaaaaatcatttccattattcatatcaaacgtgtcaatatcgctttactcaacattaaatacaatagttttagggaaatattcgagtccaacaattgtaggtaa

SEQ ID NO: 207327 - DNA, 501 bp, Klebsiella oxytoca
atgcgctggtgttcagatggcttcgagttcggctgcgacaacggcgaaaaactgcgggtaacgttcgcgctggactgctgcgaccgtgaggccatagactgggcagcaagcacgggaggctatgacagttcgaccgtgcaggatgtgatgctgaggtcggtggaaaagcgcttcggcgacaggttgcccgacacagcggtgcagtggctgacggataacggttcagcgtataccgcgtatgaaacgcggaggttcgcgagagagctgaatctggagccctgcacaacagcggtgagcagcccgcagagtaatggcatggccgaacggttcgtgaaaacgatgaaagaagactatatcgcgttcatgccaaaaccggatgtgagaacagcactgcgaaaccttgcagcagcgttcacgcattacaatgaaaaccacccgcacagcgcgctgggatatcactccccgagggaataccggcggcagcggacatcgttaacttaa

SEQ ID NO: 207328 - DNA, 1089 bp, Klebsiella oxytoca
ttgaaaaaaatattgatactaagtcatacacgagcattttcggacttcaagattgggagtcatcattatgcaaacaaattggcagatttaggttttcaagtttcatactctggtgtacctgaaacaattttccataaacttttaaaaaaagaaattagaggcccttataagttagatgcaaatgtacaaaacacacaactcagaactttttttccaataactattccttcatctatatttacagagacattaaattgtcgattactaccttattataagggaaactcaataattttagatgagtattatgatgttattatttgtgactatccatatttctatccgctgataaagcatctaaagtatttttcattaatttatcgtcctacagatgattacttggctatggggggggagaaagtaagagcatatgaatcaaggatctgcattgatgcaactaaaatagtaccaacctccgacgttgtatcaaacgctataactaacagatattctgtaccaaaaaaaaggattgatgttatagcaaatggattcgatgcagataaattttttataaaaaataacattaaagatcgtaaaggggccgtatatattggttctttagatgaccgttttgattttgatgcactaaaaatactggctaaaaataacaaacaacaaattttcgatatctttgggccaataaacaaaagtgcacagcaaagagttgatgaactaaaaattttcaataatgtgaaattccatggcagtgttgattatgatgatacaaataacgtgttaaataattataaggtaggattgcttttgttgaaaaatgatccttcaaataaaggaaggagccctatgaaattatgggagtatattgcatgtggtttaaatgttctatattctaatattgataatattgctcatgtaaaaaatacatatcaatacaataatgaaagtgatatttcggctgtatttaatgaagcaatagttaccccattctctagattagacactaatgatagcttaaaaaccaattcttgggaatataaagtaaaattgttgacttcctattttcccgaatag

SEQ ID NO: 207329 - DNA, 303 bp, Klebsiella oxytoca
atgatggatgacgcgctgctggcgggcgaacgtgcgaaagcgaagaaaccggataactgggagattgtcggtaccgctcagtctcaggaagcctacggctgcatgctgcgcaaagatgacccgcagttcaaaacgctggtcgatgagacggtcgcccaggttcagacctccggtgaagccgaaaaatggttcgataagtggtttaaaaatcctattccgccaaagaacctgaatatgaactttgaactctctgacgagatgaaagcgctgttcaaatcacctaacgataaagctcttaactaa

SEQ ID NO: 207330 - DNA, 429 bp, Klebsiella oxytoca
gtgggacattccccggcgaaagtcggcgatatggccggccagcgtttcccgccgctgctgaccctcgtcgctgcgaatcacggccagcgcggcgctcagcgccaccgcctgcgccggcggcatggcggtgctgtaaatcagatggcgggcaaactgcagcagataatccgccagcgcctcgctgcacagcaccgccgcgccgctgacgccaaacgctttaccgaaagtgacgataagcagatccgggcgtacctgctgcgcgcggcagctgccgcgcccctcttcgccgagcgcgccgataccgtgcgcgtcgtcaaccagcagaagcgcaccggccgcccgcgccgcctgataaacctcagccagcggcgcgctatcgccgtccatgctaaaaatgccttcggtcaccaccagctgctggccggatag

SEQ ID NO: 207331 - DNA, 261 bp, Klebsiella oxytoca
atggatatgaagattaaagtggaagttaacggtctggtgtatgacagcagcaatccaaagtgtaagtgcatcctgtctaacagccagcgtaaattgtatgccttcctcctggttctcgatggcgatatgacgaggcgctattggggcgagtacgatcacgatgccccggaggactcgataggtaatgactccaacttattgatagtgttttatgttcagataatgcccgatgactttatcatgcagctccaccgattttga

SEQ ID NO: 207332 - DNA, 858 bp, Klebsiella oxytoca; identical to SEQ ID NO: 184729

SEQ ID NO: 207333 - DNA, 612 bp, Klebsiella oxytoca
gtgagcaatgaacgtccgtccctgctgaccaccggctccacggtctccgccgctgagaacatcgtggcgtggctgaagccggagctgctgaacgaacctcagcaaaacaaacctgaccgcatcagcgtcattgagcgtcacatcggccagttcagcaccccggcagaggtcaaaacctggctgtcagatcgtgatggttgcatccgtctggccgcactccgcgtgcgcaatatccgcgctcaggctggcggtactgtcggcgatatcacctgggcggcttacgtcatggccaccgatgcatggggctatacgcgcgacacccgctgcgaggtactggtcggaaagctggtacgccgtattgtccagcgcggagccgctaatggcatgaaggccgagcgtatggctacctccgtcagcgccgacaacatttattccggcggacttaacgatctggggctgaccatgtgggccgtgacgtgggaacaggagttccgtctggatgatgaaatcgaccttgccaccctccctgacttcctgcgactgggggccacgctgcaggtcggcgatggtaccaccccgattgaagacgttattaacgtaagagagccgtaa

SEQ ID NO: 207334 - DNA, 270 bp, Klebsiella oxytoca; identical to SEQ ID NO: 195261

SEQ ID NO: 207335 - DNA, 270 bp, Klebsiella oxytoca
atgaatgagcctgtctggttagctgcagatcccgccgatgagtcaggggattgcaccgcagtgacagcactggtttaccgcataaccggtagccagcagtaccacaccttcaccctgattgatttcagggcattcatccttgatgcagatgtgccgctctttaagtcatgcgtgtccggcataggcagcgacgaccagggcattaagaggggtggacttgtacgcctgcaactcgtttccgacagtcccgatgaggagttgccattctga

SEQ ID NO: 207336 - DNA, 696 bp, Klebsiella oxytoca
atgactaagaaactgcttaaagccctgtgtcccacttgtggaggtctacgtaactgcaccatacacggagagttgaccacctgttgggaagatcaaagatttccagtttatgggtatcattaccatcaccttcttcaatgcaatggctgtgaaacggttttttatcatcataatgaacactttagcgaacatattactcatgagtaccgcaatggtgagcttatagaaacgccgattgatatggtcactacctacccatcgagtgaaacatttcaaccgccagcttggctatccaaacttgaatcagttgatggtcaactattccaaatattcaatgaaatgtattcttcttataactctaatcatttcattctatcctctattggtttgcgcacgatcttcgatcgtacagctgaactattacaaatccatccgggtctgtctcttggcgaaaaagtagaaaaattaaagttggatggatttatcggagaaactgaagcacttgttttaacgtcagtaattaatgctggtaatgcagctgcacatcgaggctggagtccaaacaaaagcgaatttgaacaaatgttagaagctcttgagagttttgttcaaagaactcttttaggaaaaaaatcacttgagcatataactgaaaaaatcccccccaaggctaagagacctaaaaaaaacacttaa

SEQ ID NO: 207337 - DNA, 711 bp, Klebsiella oxytoca
atgcgccagaaaacggttaaggcgattcaggcgcatgcggcgactgagtacccgcgtgaggcctgcgggttgattgctcagaagggtcgggtggaacgttatttcccctgcaggaatctggccagcgagtcgaatgataattttgttctggctccggaagattacgcagaggtagaagattggggtgtggtcatcggtattgttcacagccatccggatgcgaccactcagcccagcgaactggataaagcgcagtgtgataccacgctgctcccctggcatatcatcagttggccggaaggcgatctccgcaccatccacccaaggggtgaactgccgctcatcgagcgaccgttcgtgcttggccattacgactgttgggggctggtgatgagttattttcggcagacccacggcatcgagctgcatgactaccgtgtcgactatcactggtgggaaaacgattatccggataacttctaccatgattgctggtacgaatgcgggttccgtgaatttgatggcccgccacagccgggcgatatggtcatcatgcaggtgcaggccgataagtggaatcatgccggaatcctgctggaaggtaacatgctgctacaccacctttatgggcatctcagccagcgcgtgccatatggtggttactggaaggatagaacaatgaagattctgcgttataaagaactatgctaa

SEQ ID NO: 207338 - DNA, 3396 bp, Klebsiella oxytoca
atgcgcggcagtcatgagggcattaatgtaatggcagacgtcgcatctttagcggtcgggctgcaccttaacgcagccaactttaaatcccagcttctgggagcgtatggcgatgcggagaaccagtcaaaaaggtttaaccgcaatgcccaggcggacgcgaaaaagacggaagacgcctataagaaggtcggcctttcgatatccgggatggccagcaggctggcggggctggcaggagccggtctttccataagtacgatcatcacaacgtccaggcagtatggccaggcgctatccgacctgcaggcgatcaccggcgcgaccgctgatgagatgaaagcgctggatctggtcgcgcaggaaatggggcgaacgacagagtacagcgccagccaggcagctgaggcgcttaagctgatggcatcggctaagccggagttgctaaagacttcagatggtctgcagcaggcgacgaacagcgcattgattctggcgcaggccgcaggaacgacgctcccggatgcgacccgaacgctggcgctgtcgttgaaccagtacggagcgagtgcacaggaagcagatcgttatatcaacgttctggccgctggcgccaagtacggctcatccgaaatcacggatacggcagcggcgataaaaaatggcggtgtcgcagcagcgcaggctggcgtcggttttgaacaactgaatgcggccattcaggttctggccgaacgtgaggttaaaggtgaccaggcaggaacggcactgcgtaacgtcatcctgaatctggaaaagggcacggataagagcctcaagccatccgtggttggtctcagccaggcgctgactaatttgtcagggaaaaacctctccacggctcaggccgtgaagctgtttggcgtggagaacctgaatgcggcgtctatcctggtccagaaccgttcaaagattgatgagctgaccgcttccctgaccggtacaaaaacggcgcatgagcaggcatccatcagggttaacaacctgaacggtgatttgctgggtctgagcagcgcatttgaagggatggtcatcaagattggccagagcagtaacggtccacttcgcagcgggattcagacagctacggaggcgctaaatggcctggcggataactttaacaccgtctccagtattgcgctttacagtctgattccggttctttccacaaaattaaccgcagggcttcgggaaaatattgctgcctggcgggaaagccaggcggcggtaaaagcgagagcgcttgccgatgcggatattgcccgtaaaacgctggattcgacagctgccatcctgaagcaaaatgatgccgagtttggtcattaccgccagatggaacggacggctaaacagtacgggatgaatatcagttatcaggacgagtttgcgcggcttatccggcaggaaactgaacaaaccaacctggccagtcaggcaaaagcaaagctgaatgttgctaaccgccagttatcgatttcagcccgagccgcatcggttgctgtaggtctggcgcgaggtgctcttgctttcgttggcggcccatttggtgcagcgatgctggctggctccgcgttactgtatttccatcaacgggcacaggaagcccgacagtctgctgttaacctgaaagatgccgtcgttgaaaccaccgctgcgctgatgcaaatgtccgacaagcagctggcagttaaagagctggaccttggcgatcagctggataatcagcttggcgaacaagaaaagctgcaggaacaactgaagtacatgaacaaacagatcgaccagtccaacaaacagggctggatcggtgatgtgttcggtaacaaaaaggacatgcaggcggcccgtcaacgcgctgaagctgacctggagtcggtcaatcagggtatccagaagacccgcgataatctggaaaacgtcgggagagcacgctttctggttcagaccggaattgctaactacgccagtcagctggccagcgatattcagaagataaccagcactactggtaccctgggagacacgccccctcctgtgtggaccggcgatggtaatggtgatgcggcaaagaaaaaacaggctaatcagtacgagcaattgcggcgtgaagtggaacaagcccatgccagcagccttgaacggatcaatctgcaggagcaggaaagcgcaaggaaattagcggaagcagcgaagaaaaatggcgccagcgatgctgacctgcagcgcgcgcttttgatgaatgcggagaactatcagaagcagcgactggatctggccgcacagtattcacccacgcaggaaacattacgcaaggagcaggaagccagccagaatctcgccgaactgttcaaagcccgccttcttaccgaaaaagattaccagactgcccgaatcactctggccagggatacagccaaagagcttctgcaggcgcaggctgacgaaattgctgttcctaaactggatatcgccggtgaagtcgatcctctcgtctccctgcgcaatcagctggcgcaacgccagtcgctgctgcaggcgtattacaccggcaatgccatcagcaaggatcagtacgaaatgctgatgcagaaggcgacgaaagagtcggcagatgcgcagtatcagacttcgctggagttgtatcggtcgcaaggggagctgcagagccttgccgtcgggcttcttgagacgacgcaggagcgttccacaaatatgttgaccggaatgctgacaagaacgcagagcttcagagacggcatgattgggctgttttcctcgctgacgcaggcagtcattaaaaacctggtggatatggctgctcaggcgctggttaccagtaccattatgcaaaccattatgggcgtggtggggattgggacgagtattgcaggtggtatttctggagccgcctccggagctgcttctggcagtacgggaacggccattcagaatgcagggagcaactttcagtttaatgcgaaaggcggcgtttacgattctccttctttaagtgcctacagcaaccagatccacgataccccgcaattcttcgcctttgctaaaggggctggcgtttttggcgaagcaggacctgaggccattatgccgctgacgcgtgccggtgacggctcgctgggggtacgcgcggtcgggggcgcacagagtgccagcaccacagaagggccaaaggtctggatcaccatttctggtgacaaaacttcaaccgatagtacatcgggattcgaggagtttggccagcaaattgggtcgttcgttgagaagaaataccgtgagctgcaggcgaaagatatgcgaccgggcggtgctatctggagcgccgtaagaggacaacgctaa

SEQ ID NO: 207339 - DNA, 369 bp, Klebsiella oxytoca
gtgaaagataaagattttgacctgtccgcgcttaaatccgcgcttcttaaatcagtcccgacggtggctaaaaccgagctattcggcgcaaaagtttatatccgccgcctgaccggggatgaaatgattagctacgaagaaaagatgatggaatcaacaaaagctggggtgccgcgtgaggcatccgagcatttaatccagatcattatcgattcgctggttcagccagacggaacggctattcccgatgaattaaagccaacggctgcagaactgttgaaggcccatgataacccagagctgctggaagccgtggataaggtgaagcgccattccatcgggacgctggaggaagcggaaaaaaactaa

SEQ ID NO: 207340 - DNA, 1275 bp, Klebsiella oxytoca
atgcccggtaatataaggctggctgatgccatgcgtacattgattgtcactattaaaagtgatggttatgaattaaagagcattgcaggaaaagctttgtatggtgtgagtggaatacgtggaaaggttgaaggtattcctgaatacttccccattagcctttcggttaaagatgaaagtaaccccgtgccaaaagtggagctatccaaagtccagtcaggcctggatgagcaagttgctattcaagatgcccgaatcagtaacgctggtgcgtcaattaccagcctggcttcagggatggataaagccaacgctgacattacccgaaagaccacctcctgccttggtacgttgacatcccgccctatttttgggctgactgacgcggcaaatgatgtgctatatgcgctatttttccgtggtgcgcttgcatctggcgaccttccggcaaagagcggagccgccgaactgcgttcgctggggcttgctgagaccgggcatgttgccaccaaataccagggtgaagattacttcacatggcttacctcggcggggcaggaatttgctatttggtatctggttaaaacgcaatttggtaagcggtctgcaaatgcaaaagcccttgagaagccatcggctaatccggagggggttagcttcaataatgtcatcatgagaggagagattggtagcacagcgcatattggggaagcacgtatttgtggcaataccatcgaacaagaaacgctttcaggcttgctgactggcaccctccatcacgttaatccaaaagaagtcggctatgttgctgaacaactggccaaagccgttaagtctgcgtttagcgtgctggagcatgcatccggtgaacaggataaggaacagccaaaagaaccggacttatccgtcggtactttcaaaatttatcacgagggagaggtgaaggtggctgcaggccctctctcaacggacgaaatagaagccgagcgtaaagctcgtaaaacagttggcactattaatttaaagctggagcttgataccagtgaggctaaggagcgccttgatgaattccgtactcttatctcaaaagcggttaattcagcaataaccgatgcacttaagccgggtggaaagctacgggaagcaataaatcagaagactgatgttagcggactccgggcgttaagcagccgcgtattccaactggagcttgcccagttaagtcagggcagtcaaatcacggagttgcaggctaaacatgcccgcacgtgctaa

SEQ ID NO: 207341 - DNA, 204 bp, Klebsiella oxytoca
atgtttatagcaaatgggcttaagccggatttagacaatgaaggctgggtaaaaggttgggcagttatccgtaacaacccttggcatctggttggtgtatacgctacgaaagatgtagcggaaacaaaagctgggtctcttggacctggctatgaagcaaagtatggttcgcatcatttagggacggatgactttatttcataa

SEQ ID NO: 207342 - DNA, 1032 bp, Klebsiella oxytoca
atgagcaagcgtgaagtaaagagcaaaaaaataatctataaagaagttactatgtctggggtgtcaaaaacacttcaatctatgctaacggaactacttgaaaaacatacaaaggccgatgctcgcaaggaaatggtgagcccaggagaggaagacttattcaggctaatcaataaacatgaagtttttcaaggcatgttgttttgccaacttgttgccttcgagcctggtcattcgcaacgttacatacaacttaaaaacgatgcagaatcatacgagattcggtctgtaacttcagatgagctttcaaaaatgactgttgaggaggctgaagaagttcgttccgaaagagagcaagttgtacgtgagtttatagattccattctttattttggagtttttggaaatagcattgtagttatgcagtctcgctcacttacaacaagggagctagaaacgcatctaaaatggttgctggggtctttaagtaattatcttggcgctcaaaacattcttaaagtttccgataaaccaaaagaagagattatcgaagaagttttaaaacgaccagtgaaatcagtctcagttggagcacctgtaaccgctgttaatgatcttagcagaggaagcaataatccaagctgggttccggcgggtacagcttctgaattgcttaaaacgatgctggcggaaaaatgggaaagtttcttacgcagcagtaagcttgaagattgccttgacgacgctaatcttgaagtaacattgaagattacctataagaggacgacctctgattccggagaaagaatgctaagaaatcttgttgacgcgaccagacactatccggatgatgacgtggttgttgagatggtcggtggaacacgccttactggaaaagagatccgactttggaacacagttaagctcacaacttacaagagtttaatcgatgagcatgagctttacagtcaaatgcatgattggatggcagtactcataagtgatggagaaatagaagagaacgatgagtga

SEQ ID NO: 207343 - DNA, 540 bp, Klebsiella oxytoca
atgagtgaagaggccggtaagcttgcatttaacctacaaccaagtagagcgttccacttggttgtggttgtattgcttatgtgcacagcttggtttgtcgccagcaagtttatcattctaacttcagtcccttggggcgtgctaaccatccttatactgccaattgcaagtagtgccaccctttttcataagttatctgagaccaaaaaaaatgttgcagaggatttatcgcgcgatgaacaaagaagattaacaagacttataagagataaaagcagagctactcttttcatgcttgggctacaaatctcgatcatagttttcgtagcattaattagtctcggaagtgaatcagaatctattaaacagcacattcaaataatcagtaaactagtagtgtgcaccttagttttttctctgtattctttaattcccgttttactcggagttaaggaagttattgattttgaaggtttaataaaaacaagaaaaaccttaaataaacgtaaaaaaagtgctttaactaagcttggaaaataa

SEQ ID NO: 207344 - DNA, 342 bp, Klebsiella oxytoca
atgcgtgatatgtacgaattattagaccgttggggggcttgggctgcagcggaaagtagcggtgttgattggcaaccaattgcagctggatttaagggactgctaccacatggcaagaaatcacgtatccaatgtgatgacgatcaagggattatgattgacgcttgcgttgcgagactgcgtaaatataaaccggaagaatatgaactgattattgctcactttattatcggtatctcattgcgtacgattgctaggaaacggaagtgttctgatgggactattagaaaagagttgcaatctgcattaggctttattgacggagtttggagcatgctctaa

SEQ ID NO: 207345 - DNA, 1062 bp, Klebsiella oxytoca
atgagggcgctgctaactcccgaagtggtgccacgcttaggcgtggtgctgcttaagccaggtaaagagctgatgcgccttttccgtaatggaagggtgctggtggaatccgaacctaaaagcatggcagggctggcgaccggccgcattcctgatgcgcgccaaccgctggccgacgatagggtgttggacgctttttttaccagcgagaaggtcattaatgccgctggaggcttgccgggtcttgagcattggctacggcgaaatatccgggaatgccagtatccgcattctgaataccatcaccatgagctggtaacgatgcgtcaccctcccggcgcgatgatgctctgttggcactgtgaaaaccgcctgcgcgagcagactaccgatacgctgaccgcgctagcgcgccggaacgttatcgactgggtgattgatacagcgctgttggatctgcaactgggccgcgagcgagaactttcgctggcggagttgtgctggtgggccgtttacgcaggcgccgccgatgccatcactgagacaatggcgcagcgcagcctgcgtcttcctgctgagccgttcctgtcggtatataaagaaaccgatattgttccttccgtaccggccaccagcattctgcagtcgaagttgccaactgcaggagtagtacaacaatgcaggcccagtgaaaacgagcaggcgttaccggagcaaccgaaggtgttggctctggccgttgacccggaatcaccggaatcctttatgttgaaacctaagcgccgccgctgggttaacaagacctacaccgactgggtaaagcgccagccatgtgaatgttgtcgccgacccgccgacgatccgcatcatgttatcgggtatggcatgggtggtaccgcaaccaaagcccacgacctcttcgtgttccctctgtgcagagagtgtcacgacgagttacatgctgacgtaaacgcttatgaagagaagaacggcacgcagttgcagctgctgtttcgtttccttgatagagccatagcgatcggcgtgattgtaaaagcataa

SEQ ID NO: 207346 - DNA, 1320 bp, Klebsiella oxytoca
atgaatcttagtccttacagccaggcactggcgaagctgcgcgcccgggaagcacattatttgaaagaagtaggtgatcaatggcggacgccggatctgttgttctggggggttaacgctatgtttggtccgctggtccttgatttgtttgccgacgatagcaacgccaaatgcccggcatggtacaccgctgaagttaacgcattaacacaggactggtctgatcgactggctgagctcggtggcgcagcctttggcaacccaccgtatagccgttctcagtatcgtggaaaacaggcgattacgggcatgacgcacatcatgagttatgcgtctcagcagcgcgaaaacggcggtcgctacgttttcctggtgaagtcagcaacgagtgagacatggtggcctgaagatgccgatcacgtctgttttatccgtggccgtattggcttcgatctgccgacctggtttgtgccggctgatgataaacagaaacctaccagcgccttctttgctggcgcgatagtgatcttcgataagtcctggcgcggcgagcgttttagctatatcgatcgcgtagagctggaagcgaaagggcgcgcaagtatggcgctggcgcagttcgccgttagtaagcaggctcagccagcagaaacgaaaactatcccaaacgccacggttgaaaccgaaataccgctgcagcagtcggcaatcctcgatcagagtggtattcaggcatgggcctgtgtagttgctgcctttggcgataaaccggagtacacctttgccgaatcgaagttcggtcacacctgggcggctgattcagtagataagcctgaaatcactcctgtgcatccagatgtcattgaaaaagctaaattgctgatcaaataccagattgcacttaccgctctggaaaactggctggctaaggaagagtttgcttctgacgctgctcgttcagataccctcgagcgcatgagcgcggtttatcgtgagtttgccgatgaatgcgaggtggtggactttatcaaaacggtcagcaccttggaaaaatcgagctggttcaacagcaggatgatccgcacgcatgttcgtgaaaatatcactccagcttttgagcaacaggtagaagcccggatttggcctttagaggtaaacctgatgtttgaacaggtggaaggtgcttcggaactgggcgaacctcagcagaataaggtgaaagcccatatcaatcagctctggctggagcgcatggtaaaggatgaaattgtcgcgctggcagccggtatggtcagtgtattgtcgggagtggcggcatga

SEQ ID NO: 207347 - DNA, 210 bp, Klebsiella oxytoca
atggatctgtatttgaatttactgacggatcgtgtccagtttctggaccctgagaaccctgattttttggctctttcggaggttcagattctgaacgtccagattccgaaggttcagattctgaacgtccagattccgaaggttcagattctgaacgtccagattttggaccctcataatgttcatttgcagcctgacgaagcttggtaa

SEQ ID NO: 207348 - DNA, 234 bp, Klebsiella oxytoca
atgttcatttgcagcctgacgaagcttggtaacgttcagggtgtaaaggttgctggtgctgcgctggcccaggcgacgttcttttttggtcagccagccatctttaaccagctccccgatcaaagtaataacagtactgcgcccggcgccgagctggcgcgcaatagtcgcaacgcttgggtatgcgatgccctcatcgctggcatagtcagccagacgcagcatgatcaataa

SEQ ID NO: 207349 - DNA, 285 bp, Klebsiella oxytoca
ttgattgaaactcgcatacatactcacctgttgaggttgcagtatggatactttatttgcagcaaaacaatgtggacaaagatgcacggttatttccgtatcacccacaatctgcttcttggaatacaccagagaaccagaatcaaacttattcagaacatagccttcggtttggcttttgaagtcttcaaactctgcaatttttgctttgagaagcattaccttctcgtcacgagaacggatggcatcaccaagagagaaacattcagcttggagggtgattag

SEQ ID NO: 207350 - DNA, 867 bp, Klebsiella oxytoca
gtgaatcaaaatccattctcgttctatgattttcttggatatctaatacctggtggattttttatcctgttgatgtatttctgtggtttgacatttgatttagatattgttgttgatttaactgaattgctcagaggtaaaagtcaaatttttggtattttgaactatgcctcaattgtcattatatcttacatagcggggcattttatatcgattacatcagcattttttattgaaaaatatatgaacgaaaagttgggatatccttcccaatatctattcaataagttatcagatgacttagaaatcgtttgtacaccatcaagttgtaaacaagatgaagatatcaaaagaaaaataaaataccgcataatcaaagcagtactattaccaataacgctatgggattacgccactcaaaagttatgttattcccgatcattgccatttcaattagctagtactacatggcaaatgattaaagacggctatgagaaaaagttcatattagacaatgaattattaaaagttggaactggtcttcatgatgatcttttcagactggcctatcattatgtctatgaattttcgaatcaacatcaatcaaaaattcaaaactatgttgcattatatggcttttgcagaaatatttgtttggtatttacaattacattttggatatccttactaacctttatttttcgtttggtagaaggtagtggtatttcttatagtttaatttctgtgctacttagctttttcttcgtctatgttttctacgtcgggtttgtgaagttttatagacgatatactttagaggtattaatggctttcgcagttctacaaagaaaagacaatattaattaa

SEQ ID NO: 207351 - DNA, 879 bp, Klebsiella oxytoca
atgagcttttctagaacatcatccggcctttccaatatggcgatattctgcggcgcagattttatcgtatttaccgagggtggttccaaatcatttacttcggaggatgcgctaaatgggaactttaatactttatcggtggacataaaattttggtctgccgtttttaaaaagtatggctttaaaaaaagagtacattttcgtgcattaggttctaaaacaagtgctcatgatcttgcgctaaaagctaaaaacctagaaatatcaaacatattggtagttagagattcggatttagatgtttttttacaaggtaaaattgaatctccgtttgttttatatacatatggatatagctgggaaaatgacacttggcacaaaaattcaattatttctcagattgaaaatttcaatatgtgtttagaactacctgatggatgtctagaatctgtggatatgtctttatctactctcgataaatatgcacgcaggttactttcattagaattaatctatagaaagaatggattgaaatttattacagagtgcacaggggagcaattcattaatagtagaactaaaccaattttaaagccgggaccatttcttagattacttagaaaaaataaaggtaaaatcatcaggcctgctaaaaatgatatggcaatcaaccttgaaaatgcgttaagatattgttacgggaaactttatgaaagtttatgttacaacgcactttgctacgcttgcaaaaattaccttggaattaaatcgatcccaaaagatttaattattgctgctatgatagaaagatttaaggatttacatgacgataagatagatgagtattatcaaaacatgataaataatataaacgactaa

SEQ ID NO: 207352 - DNA, 1296 bp, Klebsiella oxytoca
atgcatacgttagaaagtgttagtatcgaagggttttggggtgctagaactttggactttgaattctatgatgatgttaacttctttattggtgtcaatggctcaggtaaaactacagttgtaaatttaatatcatctgctttaaccgccgattttaatacactagaaaaaattgatttctcgcaaataaaaatcaaactcaaatcgaaagatagcagaaaaaaaccattaatcagtataaaaaagacctcaagcaaagaaagcccgtttccaataatatattttgaatttaaagagggaatgagtgagcaaccttctattaaatatcaatctgaagcttttgatgatgttttctcaagaagttatagaaaaagtattttagatcgggatcgccataatactgtcagcgctgcaatttcaaacaatttaaacgctttcgtaaatgttagctggttatctgttcaccgttatcatgctgatcgcagaagccgtgaagaaaacggtaatgattcagcagtagataaaaaattgaaagaattatcagatagattggtaagatatttttcaagtttaggacagcaaggagcacagctcctagaaggatttcaaaagacagtatttctttcaatgttgcaacgccgttccagcaagcctatattttcatctgcacgccaaatgaatgttgaagaagaaaaaaacgccttggaagctattttctcttccttcaaactaaaaaaatctgaatatcaaaatagaatagattctcactttgaagtttttgcaaaggcacaagaaaaactcacatcaaatatgaatacaggactcagctcgactgagatatcagtattaattggtaccgaacgcattgatcatatcgttgaggaatggaataacctagttaagagaagaatgaaaattttcgagcctcgtgatacttacttgaaaataattaatgggatgatgcaaaggaaaactttttttataaatgagcaaaatgaattagaagttgagtctcagtcaggaaaaaacatacaattatctgagctttcctctggcgaaaaacaactattaattgtgcttggagaggcattacttcaggagaaaaaaaactggatatatatagcagatgagccagaactttcgcttcatgtaaaatggcaagaaaaattagttgataatctgttatctataaaccctaacgctcaaattgtttttgcgacccattcccccgatgtggttagccattttagtagaaatatttttgacatggagttgaaacttaatgagcttttctag

SEQ ID NO: 207353 - DNA, 267 bp, Klebsiella oxytoca
atgcgtttcgtcccgggaggcggaaaggcgctcaaacgccgtcaccacgccctgaatcgtgcgtaccggctgccggatttttaccccgaagccctggtcaaccggggcctgcagagtgaaggcggcatcctgcatcagcatctgctgcggcgtgagggttttgtcggcgctggtgaattcaatctggtagctgaacggttcgctcagggcctcatcgccttcaaaggccagcacgtccaggagggcgcggcagccgcgcaccgttaa

SEQ ID NO: 207354 - DNA, 354 bp, Klebsiella oxytoca
atgaattcgcgtaatgcatataaaataaaaattatacatatcggtgttaatgccgtattattcgcccgttatatgccttttattgtcatccaaatttttatgttgccgcccgttcctgagaatggttttattgatcgggaaaatgacaagcccgaattcatattcgggctttttttatgggctgaaaaaaacgtcagtagattagctttcggtagtcggtttttctgccttaccggccagctgcgcgaggaagtcgtagcgtttttgcaggtctgccgttgcatccttccacagttgttccgcgacttccggctgttgagcgttcaggcgacggaagcgctgctcgttcaatag

SEQ ID NO: 207355 - DNA, 513 bp, Klebsiella oxytoca
atgaagtttctggaggataaaggggtcccggatactttgagggaaatggtcaacagtttcgttgtgttaattaataaccgctacgaatcattgtatagcccgaacgttgacagtaagggatattcacctttgcaaagtctggtggcagaactgatctgccggagccaggagcaattctcacccgaaagcctgaattcgcagtatgatgttcatttcactgaggcgttacggtgttttgccagggggctccgctggttgattcaaactgcgaataaaaggcagattaataattcgactctcctgaatggaatggaggagcatgcaaggaaaagactccaacccagaaaaaaacttgcaaaagaattaatgtatcaggaaatagcttttttgctggatgaacatggtgatgctccccaccttcttcaggaggcattttctgatatggaattccgcatgaagcaattttccagtgaagcattaggccatttaaatcctgtaaggtttgcggtttaa

SEQ ID NO: 207356 - DNA, 1092 bp, Klebsiella oxytoca
atgggaaaacgctctgaaattaaattcataagaccttgcctctccatatatgaaaataataaggtattgaccccagcttatgctttgcagtgtttgacgcagaaaaaagtggttcagataaacttagataattgctctttacaaagaatggaggaattatcatcgacatcaactctggaggatgtaaaacgagttggcctattgccgttagtaaatctattacaatcaggaaatgtatgtttaaccgcaattggtgttaatgaaatgcctgatatatgggttgagaaatcaatgacggcctatcagaacttttgccaccgattctggcctggtcatattgacgatcccgaggcgactttcagggaatacaccccagactctgaaaaaaagaaaattaattttcaggaactttccgttgaagcaaggacggtatatggtcttcattatatatctatgcttcaaattcaaaatataaaattaaactattctcatctcacgcctgaaaaaagattcgaagtatatctttatagcatgataagcttcattgacatgattagtgcgtatgatttagaaatagcaaaatatgctttttgggatcttgactcaaacaccattaatcagctgccagagagtatacatacgcgtcgaaaatatataaaagagaacttttataagaacggaagcaatcttgataaatgtcgatggtatgcatttgatgcagcgatggatttacactggcttacgggagctaatttttcagaagatataggttcctttatcattataaatggtgtaaagtttgagactgaacattgggttggaacaaacgacaaaaaattatattacatctcacaagatattcatcatatttactatgagggttcaacgatgaaggcgttgagttcttgtagagaaaatgagatgactgcatttcaatactgggaagttgttgatagtatttcacaatctgtacttttatcccgtaaatattcaaaaaagaaaccaaacactaatattactaagttgattgatttggctgtagaaaaaatcgaaaatgatttacataattattttttaataaaagacacctaa

SEQ ID NO: 207357 - DNA, 3633 bp, Klebsiella oxytoca
atgaataccaataacatcaaaaaatacgctccacaggcccgtaaccagttccgcgatgcggtgatccaaaagctaaccacgctggggatttccgccgataaaaaaggcaatctgcagattgcggatgccgaagtcatcggtgagaccgtgcgctatggccaattcgactacccgaaatccaccctcacccgccgcgatcgtctggtaaaacgcgcccgcgagcagggctttgacgtgctggttgagcactgtgcctacacctggttcaaccgcctgtgcgccattcgctatatggagatccagggttatcttgaccacggtttccgcatgctctcgcacccggataacccgaccggctttgaagtgctggaccatgtgccggaagtggcggaagcactgctgccggagaaaaaggcgcagctggtcgatatgaaactctccggcaaccaggacgaagccatctaccgtgaattgctgctggcgcagtgtcacgccctgcaccgcgcgatgccgttcctgtttgaagtggttgatgatgaagccgaacttctgctaccggataacctgacccgtactgactctattctgcgcggtctggtggacggtattccagaagaagactggcaagaagttgaggttatcggctggctatatcagttctatatctctgagaaaaaagatgccgttattggcaaggtagtaaagagcgaagatattcctgccgccacccagctgtttaccccgaactggattgtacagtatctggtgcagaactccgtcggtcgccagtggttgcagacctacccggattcgccgctgaaaggcaaaatggactactacattgagccagccgaacagacgccggaagtgcaggcgcagctggcagctattacgccttccagtattgaaccggaaagcatcaaggtgctcgacccggcctgcggctccgggcacattttgattgaagcctataatgtgctgaaaaatatctacgaagagcgcggctaccgtgctcgcgatattccacagctgattctggaaaataatatttttggtctcgatattgacgaccgtgctgcccagctttccggcttttccttattaatgatggcccgtcaggatgaccgccggatattcacccgcgacgtgcgcctgaatattgtctcccttcaggagagcctgcatctggatattgctaagctgtggcaacaactgaacttccaccagcagaaccagaccggtagcgtgggagatatgtttgccgaaaatgccgcattagcgcataccgacagtgcagaatatcagctgctgatgcgcacgctgaagcgctttgtaaacgccaaaacgctgggctcgttgattcaggtgcagcaggaagaagaagtggaactgaaggcgtttctcgatgcgctgtatcgcctggagaaggaaggggatttccagcagaaagccgcagcgaaagcgtttattccgtatattcagcaggcatggatcctggcgcagcggtatgatgcggtggtggcgaacccgccgtatatgggtaacgggggaatgaataatgaactgaaagaatttgccaaaaataatttcccagatagcaagtcagatttattttcaatgtttatgcagcatgcattttttttgctgaaagaaaatggttttaatgctcagattaatatgcagtcatggatgtttttaactagttttgaatctctacgtagatggttactagaaaatgtaacattaattacaatggctcacttgggagcgagagcttttgggcaaatatcaggggaagtagtgaagacttgcacatatgttttcctaaaaaaagaacatttatctttcaatgcttcttatcaagatttgaaagatggcaatgaatcattaaaacatgaaaaattaaaaacgaacacatttatcacatataatatacaacaaaataatttcacaaaaatccccagctgcattatttgctactggttcacccctgagttattatctctttttaaaaaaaacaagataggcctcaaagctaaagttggagtgggtcttcagacaggcaataacgataaatacattcgaaattggtttgaggttagctatagtaaaataacatttaatgcaccagaggagaatgctaaatggtatccttgtaataaaggtggtgggcatagaaaatggtcaggagagcatttagacattataaattgggaaaattcaggcttcgatattaaaaatcattcaaaaggtgctgcaattcggaacgaaaaatattattttaaatcttgcatcacatggtcccgcatatctagcggaagtatttcatttagatacttagacaaaggttttgttcataatgatgcgagttgctttatttcacttccctcagaagagtcaaagtatacaatattaggctatcttaatagccctttaaaaaaaccattactagaagatttaaatccaacaataaatttattaccaggcatgctaaatgaaacgccttacattgataattattgccccgaagttatattagccctagaaatatctaaggctgattgggatgaacaagaaacgtcttggggttttatcagaaacgtactcatcttaaatacaaaagataataataagttatcctttgtgtacgagaacgttttatcacactggaatgataatgttaacagaatgaggaatattgaatcacatataaacgcatcatttttagaaaaaactgaccttactaaacaattagaatcagacgtaaaagaagatgatataacactctgttgcaataaatcattccgttatggaatcaatatatcagctgaagaaaaagaatatcgtttttcttctgacaatttatctcaattaatttcgtatattataggctgcatgatgggccgctactccctcgatcgcgaaggtcttgtctacgcccatgaaggcaacaaaggctttaccgaactggtcgccgaaggtgcatacaaaaccttcccggcggataatgacggcattctaccgctgatggatgacgagtggtttgacgatgacgtcacctcccgcgtcaaagagtttgttcgcaccgtctggggcgaagaacacttgcaggaaaacctcgaatttatcgccgaaagtctctgtttatatgcgatcaaaccgaaaaaaggtgaatctgcgctggataccatccgtcgctatctttccacccagttctggaaagatcatatgaagatgtataaaaagcgcccgatctactggctgttcagctctggtaaagagaaagcgttcgagtgcctggtctatctgcatcgctacaacgacgcgacgctggcgagaatgcgtaccgaatatgtggtcccgctactggcgcgctaccaggccaatatcgatcgcctgaacgagctggtcgatggtgcctccggcggcgaagccacccgtctgaagcgcgatcgcgacaatctgagcaagaaattcaacgaactgcgcagcttcgacgatcacctgcgccattacgctgatatgagaatcagtattgatctcgacgacggcgttaaggttaactacggtaagtttggcgatctgctggcagatgtaaaagccattaccggcaatgcgcctgaggtgatataa

SEQ ID NO: 207358 - DNA, 144 bp, Klebsiella oxytoca
atggtgagtacaacgaaaacctatctttttacgccacatctagatcgcaccaactgcctttatgcgctggtgcgtatcagatatcaagacttatgccttggaaccccggttcatgtcagacagagcgtcgacagtgccgcataa

SEQ ID NO: 207359 - DNA, 3558 bp, Klebsiella oxytoca
atgtctaagtttagcagttatgaatattcaccctatgagacacgaaagatattacgtactaggtttacatctaatctgactgtaacaaatacacatccacgagaaatcaacgaagagaatctggtagatgatattctggcagtggattatctgtctaaaacggacataaaagataatgcatatttaatcacttcgaagtcagactacgaaaacactaaacagccacaacatattgatatttcgtttgacgaattgattagtcaaggctgggtcaagttagtatggggcaagttacggaacatcggaaatatcagaaaaaatatctatagcgttaaggatgataaatattcagccataaaatcactgctcctcagtcttggcaaaaaaacgtatactatcgtcgcggatgcagatggagaaaacgaaaagactcaagtatttgatcatgacaactttagctgcctttctcccgcgtgggttgccgcaagattatgggagattacgcttaaccagtctcagaacaatgctaatgcattgaaaaaatggctttcactttggagtttattagataaccctccggttgtatccagcattgcttggcgtaaacaagatgctcagacactcatccagactatccttgcagaacttaagcaagaaaaagggtttacacgatgggataactgcatagaagttctggaacgtgaatatacaatacttaaagaactcacgtcgcaccctgtttattaccatgttaaaacacctccctcgacgctggtcggaaaagctatctggtcagagtccagagaagtggaaggttacttttgggaatcgtttgatacttatggagaaatgcataatttaatgcatctgttattacttcagataaacaatgatatccactgcaaagtccctcattatttaattgaacctctaatagatatgtctgccgagtactgtgaaatgctgttttcaatgttgcttcagacgaaaaacatgcccgccctattggttgatattttgttctacccgccgagctcagctttagcttatttgctcatcgcaaaatggccaatacacactggagcatgggatcgcaaactcgttgagactgatttgcagcacgctcgtgaagcgtgtattgatgatgcattaagcattctgacaaggcacgtatcactcggcagtactccaccctcagagatggctgacctttacaactggttgataggtaacaacagtgaaaaatatattgataacctgaaaacagtagacttaaccataataaattttagaaaagcattaagtcagttagacaggaatatcatatttgctatgatttcgcatcttttggaacatcatgaaatagcaggtatttattctccggaattcgccacgctgctggatttatgctccacggggcagcttgaagaaaaaatagatgcgggaaaaattctcaaactttactcggattcattgctgaaagatacaatcggaagatctgttcacaggatagggagcgacgaagctaacgctcttcataaaatattaaagtcaagcgaagacacatatgaagcttttctgtatccatttgatgtcactgctcttataaaaaaaataagcgaagacgataatatatactctgaagtagataaaattgcacattcactcagaactcatattcgtattttatgcagagcgctttcgaaatctgatgctcagtctaaaacacaaatagttaactcattgataaaatatgtaaaatctggagctttattacataaagaaaaaggacgaatagatgcattttccccgcgttttgatcgttatatatcttcaccctcatatataactatggcttttgatctttcgattgcgttacacctgattaacgctgagcagcagaattatctggttaacgcaatatgtgaaactgatgaacctagtatgttagcaacattacttccaattgttcctttctccttgcggagtaagataaccgaaagaatcaatgaattaacacctgaagatgcaggtgagatttattccctgacagatatgcaatcgaggatagatgaactgcttacagccggtgctgttacagccgcagaagcttatatgaaatctgaacgaaatttaaaaacactggggaaagtaagaggcagagaaatacttcgtttgcagtacgatctccgattgatgtttttaaagaaagaatgggagaaaataattaaccacccgatacccgcagacatcaccccgcatgaaaaagatgaggcaagcgacattttggctcactttcgcgcgctcgcattcctatcttgtgatacacccaatccgatattttctcgcaatgaattcgaaaggttgtttaataaacagccctcgattgcacgggtgacaaactggcttgcagcagaactgcaaatattaattcaaggcgacacattcgagctacttacaggagaagcttacagcgcaggagtggccgtagtttctaagctggaagcaatgttatccaaagtaacggaagataataacaatgagacattaaagtgtaacacagccctgctatacctagtactaggtgagacagagaaagcacttaatattctatctggctttcaattcattatgctgcaggatactgcttcagcatataaggcagtatcctattacagacttggcagactcctagaagcaaacgcagcgcttgatacggcagaacatatttttggtatcactggcgtattggcggctgccagaaattatatagccaagggctctgtagcgctttctttgcctcaagtcattcttacggaagatattattaaagtggtttcttctgcaattttgaaattcaaagatatgaatcctgataacaaagcggagatcttaaagcagaagaagaactcctttgctgaggttttagttgatcacgtaagagcagcttctggctcgcttatagcattagttccaacaatgaagcaaataacagtagatggttgtgaggatgatttatccgctttattcaggcattttttatccggccggcttgagtttttaggctggaccgttacagaacaatcacgtggcggatacagtggtaatctcaaccccggagaacgggatttgactattagctggggaagcaccgagctgtccgtcattgaagctgttatttgtagtaaacctttgacccaagatactcaaaaagctgatttgcttagccattttcagaaattactgggatacacgcatagcagggttatgttccatataacctacgcttacattgaagataaaactggtattttggaatttctgaaaagcagcgccaaagaacattctcctgatggttttaattttttgggtctcgaagatataccccatactgattctcgcccacctgggtttattgcgtcctacaggggagattttgaaatctttcaggtagtgtttttgatactgaatatgggacagcaaaggcaaaagcgtgcagcaaaaactgctgccgcaacaaaaagaagaaaagcgccaaaaaaaattgaggccaaataa

SEQ ID NO: 207360 - DNA, 663 bp, Klebsiella oxytoca
atgccggcttttcagcgcccacaccgactcggtaccgctgtcgtgctggccggagggcggcaccgacggcagaatcagcccctgcccgtcgtgccgctggtcgtcgtaaaactccaccacgtcgatgttcagccgggtgtcggcgatgaagcggaaccagatacccacctcactcagcaggcgggtgataaagcgcaggtcgtcctcgccgtactgcatcacctgctcgcgacgcgggtacgcctgcgccagggtgaagataaagtcctccccgcgcatgccgtggcgggtgcgcaggatatgctccacgatatccggcaccgacatatcctggtaaatccggttctggtggctccgggagagcagcgccagacgcggctgcagagtcagggaataatgcgtttcgtcccgggaggcggaaaggcgctcaaacgccgtcaccacgccctgaatcgtgcgtaccggctgccggatttttaccccgaagccctggtcaaccggggcctgcagggtgaaggcggcatcctgcatcagcatctgctgcggcgtgagggttttgtcggcgctggtgaattcaatatggtagctgaacggttcgctcagggcctcatcaccttcaaaggccagcacgtccaggagggcgcggtagccgcgcaccgttaa

SEQ ID NO: 207361 - DNA, 633 bp, Klebsiella oxytoca
gtgctgttccttgatgagctgcccgaatttgaacgcagggttctggatgcattaagagaaccgattgaatccggggtaatccatatctcccgcacgcgcgcgaaaatcgattatcccgcccgttttcagcttattgcagcaatgaatcccagccccacgggccattatcagggtcagcataatcgtgcatctccagaacagacgctacgctacctggcccgtttatctggcccatttcttgaccgtttcgatctctcactggaaattcctctgccgccgccgggggtgcttagccggggaacaaacgaagaagagagcagcgcctgcgtacgccaacgcgttttggctgcgcacgaaaggcaactgtcacgacagaaaaaactcaatgcaaatctggggaataatgagatgaaaatctggtgccagcttcatcaagatgacgcaatctggctggagcagacgcttacgcaactggggctctcaatccgggcctggcagcgcctgcttaaagtttcacgcacgattgccgatattgagaaggtcgatcgtattgaacgccgtcatttgcaggaggctcttggctatcgggcaatagacagaatgttgagccatctgcaaaaaatgatgacgtaa

SEQ ID NO: 207362 - DNA, 951 bp, Klebsiella oxytoca; identical to SEQ ID NO: 200944

SEQ ID NO: 207363 - DNA, 141 bp, Klebsiella oxytoca
atgattaagggattagctgagtattttcaatcagtaaacctgatgaaagtgataaaagactcggttaaagggactaattacattactacaaggcctaatggaaccgctacggacaacatagagaatctcccggaatactga

SEQ ID NO: 207364 - DNA, 1311 bp, Klebsiella oxytoca
atggttaaattaaggggtgatgtttcaatgaagattgctttcacgagaggtatgataaacagattatgcaggtgttttttttataggcatgataaagagataccttgtattcaagtaggtaaaccactgcaagatatatttttttggctcaaatacaatgatgaggaagtggcaaagtgcgctagcgctctgttaaggaattatgggaaaaaattagggataagtgaccttcatagcgctaaacagttgttgttaagcttttgctctgaagccttcaactgtatagatgctgatttcttatcgcttaacccagagcaaagatccgttgatagtataatatcaaaggtgcacagggaaaatctctgtgaaatgtttggttattatatgacctcacaaatgaaactttacccttatatatacaatcttgggtgtgttaggtttgatgggcaattaaagttacaggataatctttatctctatggcccgggacagggtacggctttattttctaatattaaatctaaagctggcattgacgtttatgaatccttctttgatgagaaagatatacgagatgaaccgattgggagatatttcaatcattcttactcgacagttgtacttatctatgcaccatctcaacaggatgcagttgagatgctgaatctgttattcggtggattatgtgttactgtgaataatccattcgctattaactcctgtgatgttaataataagattgagagcttctctgagggggcgtatcatatttctaactttcgtgtaaacatcccatcattgttaattttaaatattgatggcttggtttgcgaacagttagtaaaaatattatctagatctgataagcgtgttttatctgccctttcgttcattgctcatggttgggggagtgatcgtcgtgagaggtttttaaatcaatttatagctcttgatgcaatgtatggtaataacacaggtaacaaaatatctattatcggtggcgtctgtcgtgatgctataagcatttttgatgtgagatctaaaatagaaataatctacgagcttagatgcaggtttgttcatggcgatatttccactttatcggcacatgtgaaatatctaaaatttgtagattgccacgggagcgatcctgttgagtctctttttgaaatacttaaagagtgcgttctcaattatcaaggtgtgtatgaagcaccaaaagaatatagtaactctcggacaatgaatgtacccgttgagcttgctgaggatgtgaaaaagatgattgagagcttcaaaagtggcaagtga

SEQ ID NO: 207365 - DNA, 207 bp, Klebsiella oxytoca
atgaataatactttgcagttgttctggagtagcgggctgcatatcgcgagaatcttcaatatactgcacaaaaaaaacacccagttaacacaattaaaagaagaactatcaaaaaaccaaattgctggccaatttcttgatgtctttccattgttccatccctaccggtcaatccagtttgtaaatcagcatttcattttgagttag

SEQ ID NO: 207366 - DNA, 1125 bp, Klebsiella oxytoca
atgaccgtgaagaagtatactgcaatcactttagacaccactgtttttgatgggaacggattgaggctggacaaaggcttacttgctagcatggttcaattcaaaactgccccgactacttttgttttgactgatgttgttgtcaacgaaattaccagtcatattgaagaaagaataaaaaagagcaaactttccctcgaaagatcattggatagtattagagagcacaatattgttgaaagtgcagatgtagaatctctaaagaataagctggggtcggcaaaagattgtatagaattagctaaagaaaaggtttcgcaatttattgagtccactggtgctataattcttgatacaaacgaatatgtaacagtaaaagaccttacgactagttatttttctcaagaaccgccatttgcagctgtaggtgagaagcaaaaagaattccctgatgcaatttcgttaatcgcattgaacaattgggccggaaaaactggtcaggtggtttacgcgatatctggtgataaggattgggcttcttactgtaaatcgaaagaacttattgattgttatgaagatctttctgaggccttaaatcacttcaaccgtgcgcacaaaccctatgcggtcgttagtaacttagaatctcgtatcgcttctggcaactgtctatcgttcatgacccagttgtccggtcatttaggctacgtctttgatggtgtggatgttatacaagaagctgactcttcattttattgggagcctgaaggatgtgaggtacaatttataaatctgaactctattgatgataacttgagggttatcagagatactgaagatactattgttattgaagccacattgaatatctcattggaaataaatggtatgttctcattatcccattttgattcaatagatcgtgattatgtcagtatgggctctgtggaaagaagtgtcagtaaagattttgatattaatatgctgattacattaagcggtgattttgatgaggccaaagataatgttgatgccttggaaattgatagtgttgaaatgattgatggtcttgggtcagtatattttggtgagttggaaatggattacgaacctgactatgagtaa

SEQ ID NO: 207367 - DNA, 579 bp, Klebsiella oxytoca
atgagaatagattctttaggatggagcaacgttgatgtactggatcgcatctgcgaggcttacggatttacacagaaaactcagctagctaaccatttcgacattgcatcgagctccctctctaacagatatacccgtggcgctatttcgtatgactttgcgacacattgcgctcttgaaacaggggctaatctgcgctggttacttacgggagaggggcaaccgttcacatcgtctatagtggccgaagactcaaagagcatcgaattattcacattaagtgaagaaacactcaaaagtgatggttctcttaaaatcgacgctcattttttcacaaagccgattgctgatgcgatggctgtaaaagcggaaggaaaactccattttattgataagcaagcaccactttctgatggcctgtggttggtagacatagaaggtggaatcagcattcgagaattatcaaagcttccgggcagaaaattgcacgttaccggtggaaaagttccctttgaatgcggcatcgatgacataaaagtagtgggtcgcgtcgtgggtgtatacagcgaggttaactaa

SEQ ID NO: 207368 - DNA, 264 bp, Klebsiella oxytoca
atggcttctgaaatcgcaatcatcaaagtgcctgcccccatcgttactctgcaacagtttgcagaactagagggggtttcataccgcaccgcgcgtcgctggactaccggagataacccacgtttacctatcgaacctcgcgttatccgtaagggctgtaaacgtgctggcggtcaagttcgtatctactacgcccgctggaaagaggagcaaatgcgtaaggcgttgggtcattcccgttttcaacttgtcatcggtgcgtaa

SEQ ID NO: 207369 - DNA, 630 bp, Klebsiella oxytoca
atgctttggaaagttattgctttttttcttgttagtatttttttatttgttattggattatggctaggctcgcttcaatctgaatgggcaaaaccagaaaacagagatgctgttgcttatctggctatgattgggggctgggtttcaggaattgctacatcaattgcagttattatttctctatatgtaacataccaagcgtcgcagataaacattgaaaatgtttatctgtcttttgaaaaggcattagtgcttcacgatagagatataaaatttaagattgtggtaaaaaataataaaccacttgtggtttattgcaatagaatacttattactataagtggttcgaaaaaggctgtgaatattagtaaggtaaattataacaaaggtactcttccatatactttaaatcatttaggtgaagaatatcagttcatttttgacacccgctataatcatctgtggagtggtgttttttctagtctagaaaaaggtggaaagcctaaatttaataaaggctatatcatcgtcgaaacagccatgaaacaatatcgtttgaagatgccaaaagaatttctgctcgagttgcgaaaaacatatgcagaacaccaagttaggaggagtagataa

SEQ ID NO: 207370 - DNA, 474 bp, Klebsiella oxytoca; identical to SEQ ID NO: 99300

SEQ ID NO: 207371 - DNA, 879 bp, Klebsiella oxytoca
atgaaactgaaaatacaggacctgagactgtttaatctcgtctttgaaagcgatccgggctggatacttgatttctccaaccgtacgctgtcggctttttttgatgaagagctgaacattgatattgatgatgaatgttataaggaagaaggaacctcaaaagctaaacgggtaagatgtttgctgaaacaggtggatcgtgagacagccctgcgggttcttgataccctgtggcggtataaaatggagaccatgcctgagcaggccgaacaaagccgaaatgactggcttgcactgatttcacggctgaaaaatacggacgctgatacagccaaaggcgacaggcctgtgcaggcatggcacggtgtcgactggccttcactgatagccgaaatgaacgagatgaaatccctgtcgccacatccgcggggtttccgttttgaagcatggcttgcagaacttttcagtatctttaagcttgccccccgctcgtcattccgtaacacgggcgagcagattgacggcagcttccggctgaatgatgacttttacctgttggaagctaagtggcatcagaacagaacgccagcggcagatttgcacgtattcgaaggaaaactcagcaccaaggcgaagtgggcccggggcgtgttcatcagttggatggggtttactgatgaaggtctgacagccttcgtgaaaggaaaacgggtgatctgtgtcagtggttatgatctttaccattcactcagtcacggtatcgctctgcccgaccttctggacgcaaaactccgacacgcagcggaaacaggggagccttatgcccagtttgacaggctttacactcttaagggcataataaccggcacgccgaaataa

SEQ ID NO: 207372 - DNA, 1278 bp, Klebsiella oxytoca
atgttcaggcaggaagcgttacaacaccgtaattctgtatggaaagcaaaagcaatattgctgccaggtatccccttatggtgtatcgttttaagctgcttcgtctttataactttttttatcgttttcatcatttctggcagttataccaggcgtattaatgtgtccgcggaagtgaccacctggccccgtccaattgttatatcaaccagtcaacaagggtatgtagtcagatcatatgtgaaggaagggcagaaaattagaaaaggggaccgtctttatgagctggatacaagtaaaacaacccgatccggcgttgtcagtgataacgaatttaacgaaataacttctcagttacatggaattgatgagatcatccgaaacctggaaaaggggagagacgaaacactgcagtcaattaaagatcagagaaataaatataaggaagcatacgatatctcgtcttcgattgtacgaactgcagagcagggactacaaaaaatggaaaacaacatgagaaattatgaacagtaccggaaaaatggattaattaacaacgatcagctaacaaaccaaatgtcgctctactatcagcaagaaaattcagtcttgtccattaaaaaccagaatatacaaaatgcattgcaaataaaaaatcttgagagagaagttcagatacagacttcagaatatgacagcagaatatatcagatgaaattgcagcgcaatgaacttaaaaaagaattaataaaatcagggctaaatagtagcattataataagatcaccgtcagatggcataatcgatacattgaatgtatctcagggtcagattgttaatgcaggtgatactctgtcgcagataataccggagagagatagaaaactatacttaattttatggatacctgatatggccgttccgtatataaaaaaaggtgaccacgtcagaatccgttatgacgcttttgcatatgaaaagtttggacaatttaatggcatcattcattcaatatctaagtctccttcttcgcaacaagaaatgttaagctatcacttattagataatataaagttattctctggccatgcttattaccgggtcatggtcacacctgaaaatgataggatatattataacaaggaagaaatacatctggagaatgggatgagagcagaattaacattattcctggaaaatcgaaagatataccaatggatgatatcaccactctatgatgtagtaaaaagtgctcagggtaatattcatgaaaagtga

SEQ ID NO: 207373 - DNA, 486 bp, Klebsiella oxytoca
atggttaagggtgctgctcttaaactggaacggctaattcttgctgatgttgtttctaaggctccatcaaaatctttaactgctgctcttactaaggaagatgtgattgatgcacttgcttctcttgccgcttcaaacgtgcgtgtagagaacgttgtagctatcgtacatccttctaccgctgctgttcttcgcaccactcttgatggtgctaataccagtgccaagtaccttctacaaggttacatgggtgatggcatcctggctgattcagtacgcttagttgaaagtactcaagttgccgccggttctattgtgtttggtgattggtcaaatctggtacttgcacaatggggttctgtaactatggatcgtgacgataccactcaacgtaattcaatgggtattgtgctacgtactttcagcttccaggcacacgcatttgcacatgatgaagcattcttagttttaaaactaacaagctaa

SEQ ID NO: 207374 - DNA, 141 bp, Klebsiella oxytoca; identical to SEQ ID NO: 11535

SEQ ID NO: 207375 - DNA, 1113 bp, Klebsiella oxytoca; identical to SEQ ID NO: 11536

SEQ ID NO: 207376 - DNA, 2568 bp, Klebsiella oxytoca
atgtcatctttatttctttcactctcttttgttgatgcaagttttgttaataatgtttataaacgtctaccacacggtttagccagatattacgaaaaaagctttgacagaggagaagatttaatatcagcaatggaaagatctcttgataactctgatatatttgtgctatttgcatctcggagttcattatcttcgtacgctgtgaattttgaaatagaggaagccagaagacggattatttttaataagatgaaaaagatatatattttccccctagatcctggcattaatttccaagatcttcctgaatggatgcataactattgggtaccgaattcaggagattctccttctgatattgcacgctatttaactactattttacttgagccaaactcagatagtaactccgtcgtaccagacgttattggaaggggggcactaattgacagtgtgagaaggctttcagcatttcatttttcatcccataaagaaatgcccaaaatatacatcttccctggtataactggcattgggaggagaactttttcaaattattttctaagaaatgctctcagctcattagcaaatttaaggtatggacctactattacactatcggcacaagctgaactggttgatctataccgtgctttaagaatcgaaatagactcaaatatcaaaccgtctgaagttttagaagagcaagagctgtttattgaactaagcgaagacgaaaaaatagacgaagtaatcagagttacgaatcactttacaaaacttggacagtcaataactataatttctacagcaggtttttttgatgaccatgccataccaaaaaaatgggtaaaacctttttttcaaagaatacctcaaaaacaattaatttttataattagtaatatacaattcaaaagtgaatttattgatgagcttggtgtagccgtacaatgcagagttaatgaactagctgatgaagatatcaaaacgttgatgattttaacagcagacttactaaaaatcagcgattttaaaatatcagatgactttatcagagctataggtgggcatcctgatgttgctaacgcaggagtacgcttagcgaaacaaaaaggaacagctattttagaaaaagatccaagtcaattgtttaatatacaaaaattaataattaatgaatcgattcgcgctgagtcattattagaagaagaaaggataattctagatgtcctaagttggttaccaaatctaagtgctgatttattagaaaaaatagtagtacatgaattacattgtactgttgatagtttcaatacagctattgaaagtttgattttaggatgtttgatttatgcctctggatggaaatattctatagcttcatccgtaaggtatttatatagacgtcataatattactgataaaaagaccttaactgctatgggcagtgtttttgaaaaggcatgggatgaaagcaaagaaaaaggttttcgcgatgatcttttttccgcattcatattcatgcaggtcttagagggaaaatctttaccagatgaacttcgtagactaatgactgcaagtaacatttatgagatggtaaaaagcacctatgctcaaggaaaatccattgagagcgatgctgtaattgagcaggctatcaagtggggtaaaattgcatttaacatgcaaatggaagggcgactacatgaagagatattatctattgttgccagggctcaaataaggctcgagcaatatccagatgcacatgaaactatttcttatatgaaggagaaaggttacaggcaatatagttttctcgaaggtcattatttaagaaaaagaagggagtttatcaaagcaattcctattttaaaattctatctttcacataatcccaaaagtagatctgccgttcacgaattagccatgtgttataggcgagaacggcaaatggtggaacttgaaacattacttaaaaaatacaaaaaccttatttcagaaagtgccgaattattagatttcaatatcgcactgcatatttctcgcggaaaaatagaaaatattttacatcttattgaacagttaagagacttagacattaacccaaatagagcagatttgcgttatgcgcaatatcttgctaaagcagaaaatgacctgtcagctctcaattacctatccgatattttaaaaagtaaagatcgagactcaaaaagacttcgctcagccagagctgtatatgcagcacgaagtggagattcaaatttagctcgtgaagatctggcaatgcttagaagcataaggaaaaatgatttaaaagttgaatcgattgaatgtgaaatattaattgcggaaggcaaaccattcgacgcctatagattacacaatcggcatagtttaaaagatgctggcgattggtctctcagaggtaggatactggatgctattatagaaaattctgacattggtatttctgaattaaaaaactacagagaagaacgaaggaaaataaagtcacgatatgatgaaaatgactctgggctattgtttgacgaataa

SEQ ID NO: 207377 - DNA, 237 bp, Klebsiella oxytoca
atgttcgcgaaacttcgaaccaaccgctatatgaaagcgaccggtaacgacagcgcggcagtggtggaatttaccgggaaagtacagcgcatcgcccatgttcaccagttcgggctaaaggataagccatcacccaaaagcgccgaagtcgactacctgcagcgccagctcctgggttttacctacgatgaccggcagcttgtggaaagcgtcattatcgactacatcagagactga

SEQ ID NO: 207378 - DNA, 1359 bp, Klebsiella oxytoca
atgtcaattaagaatatatattcaaacttagagcgtagtctagaaaaaacaatttctgaatcacggacaagatcgcgcggtttcgtaaaagcagattctacttttgattcagcgtctgggcttgaggagttaggtaagtcatttgattttctgaaagatgttgttgttatggaaagtatgcaagaaagtgttgttaaccagaactatggcgtaaaagaaatagtaagggggaaatttggtaagcacgggaagttaatgcctacattcggctgtcatcctgatttttcaaatatgaatgagggggagttaaggaacggatatgccataacaatgtttatggatattataggttcaactaagctaggtgttatatttactcctgatatagtctttagaattaaaaacgatatcataaaatgcactattgagactgttaattcatttgatggtcacgttcatagaataatgggggatgctgtgatggctttcttcagaagtgatctaaatacacaggaggggcgaattgctgatagcgctgttgatgcaataaactgtgctacatacttaatagaaatgtttaaaagtgtcgtaatacctaaacttaacgatttaggtgttgatgagaacttagggataagaattggtatcgattatggaaagagtgaacatgttgtatggggggtgtatgggtatcaggagagtcgagaggttactgcaacttcattttttgtcgatgtggcagcaaaacttcaacaaaaggcacccaagaattgcataatgattggcgatagccttgctcaacttttaggccttgatgataatcagttgtctattaaaactgttacaaaattaaatgaaactgtacctgtgaaatacattactccaaactatagagatgctaaaggtaatccaattaattataagcagtttgttttaaagaatgaattttatctcaagctactaccaacgagtatagaagaagaaagtttttatatcagagcaagcctgaaagatgataaggatgatgtgtctgatgatgaatattacccctgttctcgaacaataaaaaaaggtagaggtatatcatttaaaggatactttcacacaaatgctatatatagcaatccgagatttagatttagggttgtaaatactggcagtgaggcgtctggagttttaaataatggtaatcatgagacatttcaaagtgctactttctcatcctctgatagacggtattttgcaaaaaacttcgaaaaaacggagtataaaggcctccaccatatgtatgtgtctttttgggatggggagcagcgcatcacagaggaacaatgtttctcggtttttattaatgactaa

SEQ ID NO: 207379 - DNA, 546 bp, Klebsiella oxytoca
gtgcgagaaactagcgaagaaaatgaaattcagattgataaaaaaatagaattgatgattaaagttatcattcgcacggacacgtatttaaattatgctaatactaagtcaacaatattactcagcttggcctctgccataatagctgcaattgccgtgaactttgataaaattacttcttttgttgttattggttctgataaatgcttcttgtcttttttgcttgggttgactttgtgttttcttatgatgtcagtgtttttttcattgaaagggataactccttttattaaagcaagtgaaaatattaatacattttcatttgttgatatagtgaaaggctacgatagtatggctgattataaaaaagaattttgcacagtaagcgactcatctttccttaatcaattaatatcgttgaatcataatttgtcaaaggctttgttatcaaaatatgaaaatcaaataattgctataaaatgcatcgaggtagctacctgtatactttgcttctccatttatataattttcttgtctaatctgtga

SEQ ID NO: 207380 - DNA, 237 bp, Klebsiella oxytoca
atgttcgcgaaattgcgaaccaaccgctatatgaaagcgaacggtaacgacagcgcggcggtggtggaatttaccgggaaagtgcagcgcatcgcccgcgtgcatcagtttggattacaagataaaccatccctatacggccgcattattgagtaccctgcgcgccagttgattggcttttctattgatgatattgactttgtggagaccttgatcattaataatctacaagaataa

SEQ ID NO: 207381 - DNA, 282 bp, Klebsiella oxytoca
atgggcacgcatggcggcgagcgccacctcttcggtgaacatgtactgcggcgggcggcggtgcctgcctggcatggtcagaccgtacttgaaggcgtagcgggcgatgtccatcgcgccgctgatatcacctacatcaagacgccacagcatggcggtcatcacgatgtcatcctgcgcgcctttgccctgttccagtacgccactgatccacggcagatagaacggcagcagctcgcgctttttcctggctttcagctctttaccaaagatggcttttaa

SEQ ID NO: 207382 - DNA, 273 bp, Klebsiella oxytoca
gtgccagcggagctgatattcgaaagactccgcgaaaaaaatctcttccagcttttcgatagcctcgtcgctgaaaaagttctttgtcggctttttgcggtcgcctttgttgcggttggccacgttgggattaaggtcaacctcgtttccggtctggccgtagcgattaatccgcgcgaagcgctccatctgccgggccagaaaatcggcgaccttgaaatcatggggcgtcaggttgggctttgcgtagagctgaatcagccgggcctctaa

SEQ ID NO: 207383 - DNA, 432 bp, Klebsiella oxytoca
gtgccagcggagctgatattcgaaagactccgcgaaaaaaatctcttccagtttttcgatagcctcgtcgctgaaaaagttctttgtcggctttttacgttcgcctttgttgcggttggccacgcggggattcaggtcagcctcgtttccggtctggccgtagcgattaatccgcgcgaagcgctccatctgccgggccagaaaatcggcgaccttgaaatcatggggcgtcaggctgggtttcgcataaagctggatcagccgggcctccagggtgctttcgacccggttcagcggtgccgtttcctcccagtggtcgcgctgtttccagctctgcaccgtggggcgtttggtctgcaacatgtcggcaatctgcggcacggagaacccctgccagtacagcaaggccgcctggcgtcgcgggtcgtttaa

SEQ ID NO: 207384 - DNA, 468 bp, Klebsiella oxytoca
atgcaaaagcccaacagtctgcgaaaagccttaactgatgcggtgccggtactgcgtaccaaccccgatatgctgcgcgtctttatcgataacgggaataatgcggcaactctggctcgctccctgtcgtatgaaaagcggtacacgcttaacatcgtggtgacggatttcaccgacgatattgacctgctgtttgtgccgattatggcctggctgcgcgtcaatcaaccggacagcatgacaaccgacgaggggagaaaaaaaggatttgcctggtacgctgacatcaataacgacagcagcctcgatgtcagcatcagcctgttgctgaccgaacgcacgctggtcaaagaggccgacggctcaatgtacgtagagaacatcccggagccgccaccgccggagccggtaacgcgccctgttgagatgtggagtaagggcgaactggtgagcaaatgggatgaatga

SEQ ID NO: 207385 - DNA, 276 bp, Klebsiella oxytoca
atgaaaatgacgcgtttcgccgctggtatcgcgctgatttacctgatgctgtgcgccggttgcaccagcgcgccgcctgcaccaacgccgccgccggtgattgtgtacaacgcctgcccgaaggtcagcccctgcccgatgccgggcagcgacccgctgactaatggcgagctgagtgcagatattcgccagctcgaaaacgccctggtgagctgcgctatccaggtcgatacggttaaacactgtcaggatgaaatcgatgctaaagcccaatag

SEQ ID NO: 207386 - DNA, 468 bp, Klebsiella oxytoca
atgctaaagcccaatagtctgcgaaaagccttaactgatgcggtgccggtactgcgtaccaaccccgatatgctgcgcatctttatcgataacgggaacaacacggcgacgctggcgcgctcactgtcatttgaaaagcggtacacgctcaacgtcgtggtcacggattttaccgacgatattgacctgctgtttgtgccggttatggcctggctgcgcgtcaatcagccggacatcatgacaaccgaggaagggagaaaaaagggctttgtctggtatgccgatatcaataatgacagtagcctcgatgtcagcatcagcctgttgctgaccgagcgcacgctggtcaaagaggccgacggcgcgctgcatgttgagaacatcccggagccgccaccgccggagccggtgacgaggcctgtcgagatgtggagtaatggcgaacgggtgagtaaatgggatgaatga

SEQ ID NO: 207387 - DNA, 273 bp, Klebsiella oxytoca; identical to SEQ ID NO: 207382

SEQ ID NO: 207388 - DNA, 198 bp, Klebsiella oxytoca
atgttatccgaaatctccctgaactgctcctcccagccgtcctgcagctccctgattgccgcgatctggaaagcaacactgaaaggcgttctgcccagtttctcggaaagccagaacagatgcctgccaatctcttcgtccggtaccgaatcgagcgcatcactcagtaaggttttttcgtcttcctgccagggatga

SEQ ID NO: 207389 - DNA, 297 bp, Klebsiella oxytoca
atgaaaatgacgcgtttcgccgctggtatcgcgctgatttacctgatgctgtgcgccggctgcaccagcgcgccgcctgcaccaacgccgccgccggtgattgtgtacaacgcctgcccgaaggtcagcccctgtccgatgccgggcagcgacccgctgactaatggcgatttgagtgctgatatacgtcagctcgaaagcgccctcatgagctgtgctattcaggttgatacggtgaaacactgtcaggatgaaatcgatgcaaaagcccaacagtctgcgaaaagccttaactga

SEQ ID NO: 207390 - DNA, 300 bp, Klebsiella oxytoca
gtgaagacgattttcagccgcaaacaggccagcgatgacgcccgttttcaggatgtgcatgaagccgtgacgaccgtcagcgagcatgtgcaggaaaacctcaccgccactgagcagcgtcttgccacgctggaaaatgcctttgcgacgctgaaacaggacgtcaccacgaaggccgaccagaccagccaggcattcagccagttaaaaacgtcgctggatacaaccgaaagcaccacgcagccacgccgcaagctctccaccggcggcggtggtgatgagctgctgaccgactgctaa

SEQ ID NO: 207391 - DNA, 300 bp, Klebsiella oxytoca
gtgaaagcgattttcagccgcaaacaggccagtgatgacgcccgttttcaggatgtgcatgaagccgtgacgaccgtcagtgagcatgtgcaggaaaacctcactgctaccgggcaacgtcttgccgaactggaaaatgcctttgcgacactgaaacaggacgtcaccagtaaagccgaccagacccgccaggcattcagccagttaaaaaccacgctggataacaccgaaagcaccacgcagccccgccgcaagctctccaccggtggcggtggtgatgagctgctgactgactgctaa

SEQ ID NO: 207392 - DNA, 882 bp, Klebsiella oxytoca
atggtgatggcgggcggtaccggaggacacgtgttcccggggctggcggttgcgcaccatttaatggaccagggctggcaggttcgctggctgggtaccgcggatcgtatggaagcggatttagtgccgaagaacggcattgaaattgacttcattcagatttccggcctgcgcggcaaaggcctgaaggcgcagctgctggcgccggttaggatattcaacgcctggcgccaggcgcgggcgattatgcagcgttttcaaccggacgtggtgctgggaatgggcggctatgtgtccggccccggcggactggcggcatggtcgctggggatcccggtggtcctgcatgaacggccaattcgcgtattggtcgtcggcggttcgcagggcgctcgcgtgctcaatcagacgatgccgcaggtggcggcgaagctgggctctactgtcaccatctggcaccagagcggtaaaggtgggcagggaaccgtacagcgggcctattccgatgccgggcagccgcagcacaaagtgaccgaatttattgacgacatggcggcggcttacgcctgggctgatgttgtcgtgtgtcgttccggggcgctgacggtgagcgaaattgccgccgcgggtttaccggcgctgtttgtgcctttccagcacaaagatcgtcagcagtactggaatgccctgccgttagagaaggcaggagcagcgaagatcctcgagcagccgcagtttaccgtggatgccgtcgcgcaaaccctggcgggctgggatcgcgaaacgctgctggatatggcggagcgagcgcgtagagcctcgattccggatgctaccgaacgggtagcagaagaagtgagcgccgcagcactggcgcgctaa

SEQ ID NO: 207393 - DNA, 309 bp, Klebsiella oxytoca; identical to SEQ ID NO: 20368

SEQ ID NO: 207394 - DNA, 315 bp, Klebsiella oxytoca
atgcgtgatatttaccatcagcttgttaagagcactcctgattttaaaaacttcactgatgaggctttagctgaatccagcgatttatattctgctggcgcatttgccatcaatagtgcgctcacactgatcggcaatctggcgtttgatgcaaccaatgcagaggactattccgatgaagatgcccggcgtgatttgatccttgtaagccatgcattgcgtcaccttcccagaatggcgcaagcactcaatcagagtagtgatgctgcggattatgcgcgtacccagcgtaataaagcgggggagcaatcatga

SEQ ID NO: 207395 - DNA, 189 bp, Klebsiella oxytoca
atgcgtaaggtcaaatggtcggaaattgacattgaagatgaactgcgccgcctggaagcgttgctctcaacatcgctgtatatgaattttgatgatgaaaccgagtacagcgttgcgatggatctgatcagcatgtcgttgtcccgcgttcgtgaactaaaagcggcaagtgaggtgacccatgcgtga

SEQ ID NO: 207396 - DNA, 681 bp, Klebsiella oxytoca
atgctgacgctgaataaaacaaaggcagctttgcagagctgccaatgtcactacgaaaaaccgaaacagattaagcataccagggttaatgctggtggtcaaagaatgagccagcgcaattctgcgcccgctgattttattcagccttttggctcaatacctttctttcggagggcttcccggcctaattccttcatccaatttgcgaggctaacactctctgcttgggcttctttttcaaattgctctttaagttcgggggggattcgaatctggaacgctggtgctttcccggctccttttggttgccgatctcgtttaatgggtgttgacatgtgcgtacctattggcgtactgttttctttaataggtacacaccttaacacggtgctatctaaaaaaacaacgccccggactgttcgagcagtaccgaggcgtctcaccaaaccgttaagtgaggtaacagttatggctgacaatcagtctacccaaactcgcccggaatttacatggagatttctcttcacctctgagcgatacccaaccgcaaagccgttggtaatctacgtcaacgcatccagtgagcaggaagcccgagacaccatgcccggcgtaaccctcgttttcgctgcccgcctgccgttccacgcatttcagagtatggaggtgcgccatgcgtaa

SEQ ID NO: 207397 - DNA, 1161 bp, Klebsiella oxytoca
atgtatgcaggatacttatcttgcatacattactttataaccaaacggatatattcattacaattttcaaagccgcgtttaacaatcaactatattaagcgaagtataatgggtcaaaatttatatcgcaaggaagcgattgaacataaaaaaaaccactggaaaggtaaagcgttattgctatcagggatgcctgcatggttaatattaacgttctctgccatatttcttttaattttagttattaccttgcggttttgtagttatacacaacgcattgatgtaaagggtgaggtaatcacttatccccactcaattaatgtatatgcttctcaacaagggtttgtggttaaaaaatttgtagagactggagatatagtaaccaaaggcgatcctctctatgagttggacatatctcgctcaacaattaatggcaatgtcaatactacaatgagcgccgttataagtgagaaaataaagaatgctgaagaaataatctctaaaaccttaaaaaacaaaacagaaacaatggaggcattgaatacccagttacatcagtacacaatttcacttaaagaaactaataagatgctagctaatgcagacattggtttgaagaaaatgaaggaaaacctatcaagctacgatcagtatttgaagcaaggtttaattactaaagatcaatttaactatcagcactcactttattttcagcaacagagtacatatcaatcattaattagccaaagaatgcaacttgaatctcaattgactcaattaaaaagcgatcttgtaactaaggcagctgattttgacaatcaagtatcaaatcaaaagaatcaaataaatgattataaaaatcagcgagttgaatcaacagccaacggtaaccttattatcaaagctacatcaaatggaaaaatagaatcagttactgtaactgttggacaaatggttgataagggtagtagccttgctcaaataaaaccaaaccctacattaatcctggtgatacggttaatatccgttatgaagcttttccgtccgacaaatttggtcaatttccgggaaaagtattatcaatatcgtcagtacccgcttcgcgtcaggagatgtctgaatatactaacgtcattacaaatccaaaccaacaggaattag

SEQ ID NO: 207398 - DNA, 2127 bp, Klebsiella oxytoca; identical to SEQ ID NO: 184995

SEQ ID NO: 207399 - DNA, 357 bp, Klebsiella oxytoca
atgacggtgaaagttgagtgggaaacgggtgtggcttttgcagatgatgtacctgaaattcctgagccgaaacgacctgatacctccgggatgaacgagaaaaattattatcaagtatggcaagtgtattttgatgaaaaacaagaatggtataggaaaattaaggcactgaataaagcgcatacaaaaatagtccctgttcccgattataccgggcaaaaaacctgcggaataaaggttcactttttaccctgcgatcaaataaaagtcaccaccagctgctacgactacggcaatccaaattatccgattaaagatccgatcaaaatggaggaacccaaagtatgtccacaataa

SEQ ID NO: 207400 - DNA, 402 bp, Klebsiella oxytoca
atgctgcgcatctgtccgggctacgggatggcagatggcggtgaacctgtagcccgggcaggcgcctggcgccgcccccgggagcaaagtgcagtgcggcataatctcccggaggcgatgctgcgcatctgtcccggctacgggctggcagacggcggtgaacctgtagcccgggcaggcgcctggcgccgcccccgggagcaaagtgcagtgcggcataatctcccggaggcgatgctgcgcatctgtcccggctacgggctggcagacggcggtgaacctgtagcccgggcaggcgcctggcgccgcccccgggagcaaagtgcagtgcggcataattacccggaggcgatgctgcgcatctgtcccggctacggctggcagatggcggtgaacctgtag

SEQ ID NO: 207401 - DNA, 195 bp, Klebsiella oxytoca; identical to SEQ ID NO: 185287

SEQ ID NO: 207402 - DNA, 276 bp, Klebsiella oxytoca
atggaaaatccgctggccaacaccaccggccatcagggctacatcgagccggagaaggaggtcatgcagcaggtggtcaccttcctggccgggaaagtgagcaccttctccgtcacgccagccgatgagccggtgctctccctgaccggcttcccggccgtcgcgcttccacatatggaccatgacgccgccagcacgcccggcgagcgtaaggtctggcaggagaaaatccgtcagcgcgaggctgacctgaaagcgcgggggctgctgccatga

SEQ ID NO: 207403 - DNA, 156 bp, Klebsiella oxytoca
gtgatttcgcctctgtataagcagcgtattcgcctgcgcgatggccgccagtgcgacgacggcgaaatggcggtacgcgcatggccggtaaaagtggagaacggtaaagtatgggttggcaaccagcagctgctggcgcgcgcggaggcctcgtga

SEQ ID NO: 207404 - DNA, 1197 bp, Klebsiella oxytoca; identical to SEQ ID NO: 175361

SEQ ID NO: 207405 - DNA, 966 bp, Klebsiella oxytoca
atgagtaactttctgttagaagccggacgccagaccctgatgctggagcttcaggaggcgagccgcctgcctgaacgcctgggcgacgacttcatccgcgcggcggaaaccatcatccactgcgagggcaaactggtcgtctccggtatcggtaaatcgggtcatattggtaaaaagctggccgccaccttcgccagcaccggcaccccggcattttttgttcacccggcggaagcgctgcacggcgacctcggaatgctcgacagccgcgatgtgatgctgtttatctcttactccggcagcgccaaagagctggatcttatcgttccgcgcctggaagaaaaatccattccgctgctggcgatgaccggtaaatccacttcaccgctggcgctggcggccaaagcggtgctcgatatcgccgtagagcgcgaagcctgcccgatgcacctcgcgcccacctccagcaccgtcaataccctgatgctcggcgacgcgctggccatggcggtcatgcaggcccgcggctttaacgaagaagatttcgcccgttcgcacccggcgggcgcgctgggcgcgcggctgctgaacaaagtccatcatctgatgcgccgcgatggcgacgtgccgcgcgtcgctaacgacaccagcgtcatggacgcgatgctcgaactcagccgcaccggcctggggctggtggcggtttgcgatgaacgcaatcacgtgcagggcgtctttaccgatggcgacctgcgccgctggctggtgggcggcggcagcttacaggatatcgtcagccaggcaatgacccgcaacggcgtcactctgcaagcggaaagccgcgcgatagaagccaaggagcgcctgatgaagcacaaaatcagcgccgctccggtagtggatgaaaacggccagctggtcggcgcgattaacctgcagaacttttatcaggccgggatcctttaa

SEQ ID NO: 207406 - DNA, 2220 bp, Klebsiella oxytoca
atgaacggggtgcagatccgcattcgcggtaaagtgcagggggtgggattccgccccttcgtctggcagctggcgcagcagctggggctgcgcggcgacgtgtgcaacgacggcgacggcgtgctggtgcgccttgtcggcggtgatgcgccatttctcgccgcgttaacccggcgctgcccgccgctggcgcgtatcgacagcgcggcagcggcgccttttgtctgggacgccgcgccgccaggctttaccattcgccaaagcggggccggaagcatgcgcacgcagattgtgcccgatgccgctacctgcccggcatgcctggcggaaatgaacaacccgcaggagcgccgctaccgctatccgtttatcaactgcacccactgcgggccgcgctttaccattattcgcgccatgccctacgaccgtccactgacctctatgtcgccgtttccactctgcacctcctgtgcggcggagtatggcgaccccgccgatcgccgtttccacgcgcagccggtagcctgcgccgagtgcgggccacggctggagtggcgcgggccgcaggcgcattcatttggcgaggcggctcttgaagcggcgacggctcgcctgatggcgggcgatatagtggcggtgaaagggctgggtggtttccatctgttgtgcgatgccggaaatcctgaggccgtcgcgaggctgcgggcgcgcaagcatcgcccggcgaaaccgctggcggtgatgctggcgacaacggcggggctcgatgaaccggcggtgacgctgctcacgtcccccgccgcaccgatcgtgctgctggataaaacgcaggtggccgggctgtgcgaccagattgcgccagggcttgcggaagtaggggggatgctgccgtctaatccactgcaacatttactttcgcaggcgctggcgcgcccattagtgatgacctccggcaacctcagcggtcgcccgccggcgttaaccaacgcagaggcgctggcggatttagccgggattgccgacggttttctgctgcataaccgcgagattgtgcagcggatggatgattccgtagtgcggcaaagcggcgagatgctgcgtcgcgcccgcggctacgtgccggacgcgctggcgctgccgccggggtttcacgatgcgccgcccctgctggccctcggcgcggatatgaaaaatacgttctgcctgctgcgcggcgacgaagcggtgctcagccaacattttggcgatctcgacgaggagggcgttgaggcgcagtggcggcaggcgctgcgcctgatgcaggagatctacgcttttacgccgcagcgggtggttgccgacgcccatcccggctaccgcgcttcgcggtgggcggcgtcgcttatgctgccggtggagcgggtgttgcatcatcatgcccacgctgccgcgtgcctggccgagcatcgctggccgctggagggcggcgacgtgattgccctgacgctcgacggcatcgggatgggggaaaatggcgaactgtggggcggcgagtgcctgcgggtcaactatcgcgagtgtgagcatcttggcggtctgccgtcggtggcgctgcccggcggcgacctcgcggcgcgtcagccgtggcgcaatctgctcgcccactgcctggcgtttgtccctgaatggcagaattatgccgacaccgccgcgctgcgccagcaaaactggccgctgctggcgcgagcaatcgagcgtggtattaatgcgccgcaggcatcgtcgtgcggccgtctgtttgacgccgtcgcctgcgcgctgggctgtgcgccgctagccctgagctatgagggggaggcggcatgccgtctggaagcgctggcggcgacctgcgaaggcgtggatcatccggtgaccctgccgtggcgcgaaggtaaactggacctggcgacgttctggcggcagtggctgagctggcaggcgggcccggcgcaaaaagcgtgggcctttcatgatgcgctggcccgcgggctggcggcgatgatgcgcgattgcgcgaacgcgcggaacattcacacgctggccttcggcggcggggtactgcacaaccgcctgctgacggcgcgattgaccttttatctggccgattttactctgctttttccgcagcagctgcccgcaggagatggtgcgattgccctcggccaggcgatcgtcgctgcggcccgcctgcaggcttaa

SEQ ID NO: 207407 - DNA, 264 bp, Klebsiella oxytoca
atgactgttaaggagaataatttcgggaacctgccttccagtaagttgccctatacgacggagtcgcaacatatgtttagtgtgttctcgcttaccctgatcttgaacgcgggtctggcatgcaaagaaaggcacaaaaccttcttgctgaagattttcgagaatggtgctcgtaggaatgtaggtataacgctcagaacgagactcatgtttattctcactaaatatactgggaacaaaatgcatcaattcttcatgcgttaa

SEQ ID NO: 207408 - DNA, 162 bp, Klebsiella oxytoca
atggctgaatgtacgccgagactgtattacaacctcaccatttcggataacttctccgaaaccactccgtgttgcatcagccccaccgctcagtatgccctctatgacatgatcgtaaactgcccacccgagatcctcatcaaattcaagagtcgcagctaa

SEQ ID NO: 207409 - DNA, 1086 bp, Klebsiella oxytoca
atgactgaagagttaacccttaacgttgacggcaaggtctggggcggctggacggatatgaccatcaaccgctctctcgacaatatcgccggagagtttgatttgaccgttaccgcccgctggtctgctgcggctcctcgctccatcaagccggggcagtcctgcaccgttgatatcggcagcgaccgcgtgctgacaggctacattgacgactttattcccagctatgactcggagaatgtctccctgcgcgtcatgggtcgcgacaagaccggtgaccttgtggacagttcagtggtcgataaatccggtcagtggaaaggtcagaagctggagcaactggcagccaccatctgcaaaccctacggcatcgaggtggttaacgagaccgacaccggcgacgcctttggcagcatcaccctcgaacagggtgaaaccggctttgaactgctcgaccggctggccaaacagcgcggcgttctggtgacgtcagacgcttacggtcggctggtcatcacccgcgcatccacccaacgggccggagtggcgctaactctcggcgacaatattctggctgcacgtggacgcttcagctggcgcgaacgggccagccagtacatcgtcaagggctccgccagcgcgggcggttcaacatgggacgaccagccggtgaagatgatcggcggccgtcagacggtagtcagcgacccggaaataacccgctatcgtccgaagattctggtcaacgaggacagcctgacggtcggcggtgccagcgcccgcggcgaatggcacaaggctcatatgatgggtgaagccaataccaccgaaatcaccgtcgcgggctggcgtgagaacggtatcagcggtccgctgtggcagacaaatcggctggtgaaggtaaccgatgccattcagcagctcgacgtcacctggctgattaagtccgtttcctttatggaaggcgatcaggggcggctgaccgtgctgacactggtcccgccagagtcgctggatatgcctgaacagaaagctaaaagtaaaggcaagaaggcaaagacttccgtgggggtgacatgggactga

SEQ ID NO: 207410 - DNA, 474 bp, Klebsiella oxytoca
atgccggagcgcaatctgctgctgcatgacggcatcgccacgcattacgttgacgccagcgacaacgtctgcatcgagcgtgaaatcaccatgtaccgcgtcaaccagtacggcgataccgatacctcgtacctcgatgtgcagtcaccggcgacgctggggcgtatccgctacgtcatcaaaaaccggttcaccacccgctacccgcgtcacaagctggccggggatgatgtgctcgaccagcttgatccgggtcagcctgtgatgacgccgaagattgcccgcgccgagctgctggatatcgcgctgaccgagctgatccctgcgggtctggttgaggacttcgacgactacaaagacacgctggatgtgtacctcgacggcgacgataaaaaccgcctgaacttcatctgccacccaaacctggtcaaccagctgcgtgtgctggccggtcttatccagttcaaactttaa

SEQ ID NO: 207411 - DNA, 501 bp, Klebsiella oxytoca
atgggtgccccggaaggccgtccagagctgcgcctcaatcatcttgagtggcccccagcgttcgagcagttcatcccggattgtgttcaggctctgcgtatcgttgaacgggaacacaatatcggtgtaccagtcatcgcccagcgccgcgacaaccgccgcaatatccggggtgccggtgccgccgttgaaggcggtgatggccaccgcaacgcctgcagggttctgctcgccggtatagtagttgagacggacgtccatcgcattgccggtcgcgcctttccagttggtggtcagggtgacgacgtcggtcgaatccgctttcagcgcagcagtaacctgcgtgtcgggcagtttgttaacggcggcgataatggcggtcgcgatagtgtcggcggtatcgtcagcgctgacgccgacctgcaccgatataccgttaaccagcagggccagcgtgcccgcagcagtggccgggccggtgatggtcagctctgcttttga

SEQ ID NO: 207412 - DNA, 441 bp, Klebsiella oxytoca
atgggtatttacgttacccgtgatgacctgctggctgcggacggttcgctggtctggaacatggccatcgacaaggcaacaaaccagctcgacgagacaaagatagccacggccatcgaagatgctgacgcggagatcaactcgtttctgtcaaagcgctatcagttgccgctgaacatcatcactgttccgcgtccgctgcaccgggtagctgtatccatcgccatttactggctgtccgagcgcgacaatcagatcaccgacctgattcagaagcgctacgacagcgccatccagaccctcaaggagatggcgaacggcacgcgcgacctcggcctgccgaccgacactccggcccctgagaccgataacggcaggatgattgttgtctccgaaaacaaacgtctgttcacccgtaacaacctcaaaggggtgctgtga

SEQ ID NO: 207413 - DNA, 876 bp, Klebsiella oxytoca
atgatccctgcgggcacattcactggccgggatggccgttcgtggattaacgacaatcccgctgcggtcattgccgcctcattccgttatccaaagttaccgattgatatcgaacattctaccgaactgcttggcccgaaaggcgaagaagcaccagcctatgcctggattgattccatgcgcattaatgctgacggtagcctagatgctcacgttgagtggacgcctgatggtgaagcatgtgtcaggggtaagaagtacctctattacagcccggccttccgttatctctcaacaggtcaggtgacgctgctgtccagcgctggcctgaccaacaaacccaacctgtatttacccgctcttaactcggagaacaccatgcctttacctgtgcagattgccacggcactgggtctggctgagaccgcgtcggttgacgatgccgtatcagcgatccagaccatcaagaacagcgaacagaccgcgctgaaccgtgctcagaacccggacctgtcgaagttcatcccgcaggagacctatcaactggcgctcaaccgcgctcagacagcggaagatcgtctgaagacactggatgaaaagacggccaccgcgctggttgacgatgccgtgaccgccgggaaagtcgcgcccgctaaccgcgatatgtatctggccctttgccgcagtgaagaaggccgtcagcagtttgctgagttcgtgaaaactgcgcagccgctggtcaatcaggacccgtccaaaggaaaagagaacaaggggcagcagaccacgctgaccgaaactgagctggcgatatgccgcagcatgggtctaacccaggaagagtttctcgccgctaaaccgaaacaggagcaataa

SEQ ID NO: 207414 - DNA, 765 bp, Klebsiella oxytoca
atgcagacacaggacggcgtacgctaccacgtcaccgccaccagtgacccgttagcgggcaaaatcaccgtcaccgtgcaggctgacgagacgggcctcagcggcaacctgaaagccggtgacgtgctgaccctgatttcaccggtgcccggggtgaacagcgacggcgtggtggcggatgccgggatttccggcggcgcggacgtcgagtccgtggccgagctgctgacccgcctgctgtaccgcaaacgtaacccgcccaccggcggcgcgttgcatgattacgttatctgggccaccgaactgccgggcatcagccgggcatgggcctttgactgctggcacgggctgggtacggtgggccttgcgtgggtttatgaccagcgcacggatattatcccgaccggcaccgaccgcgaggcgatgcaggcgtacctgttccgccatcaggaccctgcgaccgggacttacgtcggcaagcccggcggtatcgaggtctggcccatcccgctgacgctcaagccggtgccgctgaccattcgcgtcatccccgacactgccgccatccgctcagcggtcaccctgagcctgcaggcgctgttccgctcggtctcgccgggcgacacgctgctgctatccgctatccgcacggccatcggctcatcgacgggcgtcaccgactacgagctggacctcaccatcaatcaggtcagcgagaactacgagctgctgacgctgggagcaatcacatggcgcatcgtctag

SEQ ID NO: 207415 - DNA, 423 bp, Klebsiella oxytoca
atgcgcccggagacaaccgacctgctgctggccgactgggaggattatctcggtctaccagactgtaacgccatcccgtacggcttcgaccgccgtcgtgatgccgtggtggagaagtaccaccgcaagggcgggctggccacctggcagattgagcaggccgtgaaggatgcgctgggcttcaccattcaggtgaccgaaatcctgccgcatcacgttatgcgcaacatcatgtatccgatttattcgcataaataccgctacctgctgcaggtgacggtcacggatatgccgatgatccgctttcgcagtatcagcaacgtcctgacgccgttaatcagcctgcaggcgcagatactggaatgttttttacgtcgttaccggctggccgggcacgattatgattttctttacgaggtttaa

SEQ ID NO: 207416 - DNA, 219 bp, Klebsiella oxytoca; identical to SEQ ID NO: 161455

SEQ ID NO: 207417 - DNA, 360 bp, Klebsiella oxytoca
atgccaggcgtcggcaatcgcggccacatcggcctttttggttttattaatagcgacacgcttggcaatacgggagaacagacgggcgaactcaacggtacgattaccgccggtcatgttgctgtatacgcggtggttacccatcagcaccagtccgacgcgggtggcctcctgcagcagacgcagctcttcgagcgtttcagcacccagatggtcagcttcatcaatgatgacaagaccctgagtgccatcgagacggcggcgcagtgcgcgggccagcggtcccttacggcgaggtgcatcattcatccccagctcataggccagctcggtcaggcactccagtacacttgcacatga

SEQ ID NO: 207418 - DNA, 408 bp, Klebsiella oxytoca
atgtttaaatcgttgaataccgactggctgaagctggcattgctccgggtatttcagtccggctggacggtggtgatcctggtgggattgtcgctgctgttctgcagcttcactggccgtcaggcgtttattgtctggtggctcactttcgccggtgtgctgttaattggggcgagcgtatggctcggcaatctgccttaccgtctgctgcagccgggtaattctgctcgccggtggtcaggtatgttgtcctggataatctggggagctggtttcctgttgctggccgtcgctcccgcgaatgcaaaagacccgtggttcctgctgtttaatccgctggctggactgactgccttccttctctggttatgggcttcacataaggagcccctcaaatggatccgataa

SEQ ID NO: 207419 - DNA, 423 bp, Klebsiella oxytoca
atgcgcccggagacaaccgacctgctgctggccgactgggaggattatctgggtctgccggactgtaacgccatccctgacggcttcgaccgccgccgcgatgccgtggtggagaagtatcaccgcaagggcgggctggccacctggcagattgagcaggccgtgaaggatgcgctgggcttcaccattcaggtgaccgaaatcctgccgcatcacgttatgcgcaacatcatgtatccgatttattcgcataaataccgctacctgctgcaggtgacggtcacggatatgccgatgatccgctttcgcagtatcagcaacgtcctgacgccgttaatcagcctgcaggcgcagatactggaatgttttttacgtcgttaccggctggccgggcacgattatgattttctttacgaggtttaa

SEQ ID NO: 207420 - DNA, 780 bp, Klebsiella oxytoca
atgctgggtgtccctctgtttgatcgtaccactacacctgtcactctgacgcgttacggagaacgttttgagccttatgtacgccaggttctgagttcattaaccgaggcccggcatgaactggccgccatgactccggcaacagacaacacgctggtgatggtgagcctgcacacgctttcagtcaatattctgcctgatatgataagttatctgcgccaaagcgaaccacagctcaactttgccgtaaatgccagtatccagggtgttgataaccactttaacgcgcttatagaccggcagattgatatactcgttacctatgatattccctcctcacagcccggccttgatattgccgggaagctaaaacgctcattatggcgatacgaacgttttattcccgtgatttcgtctgacattatgggtgttcttgatgatcccggggcccagatcccctggctgtcatatagcgactatacgtttgttcggcgcatagtggatccagcggaacagcgcgtccgccaccggttaaaaaaagtgtttgaatcaggacttagtgagactatcaaggagatggttttgcgccatatgggaatggcctggttaccggagtcaatgatggcggaggcgctggtaaatcgtgaggtggtacactgctggcccgaagacgcggcaatgatttgcgaaattcccgtggttatctgggcaaaccttgaggatcagcgactggttttgcagaggtgctgggaaaaattacaacgccctcaccataactaa

SEQ ID NO: 207421 - DNA, 1134 bp, Klebsiella oxytoca
atgtttacattattgaccaatgctcgtgttttttcgccaacagatttaggtctgtgttccctcctcatctgtgccgatcgtatcgtggcagtcgaaaaagatattttgtcttttgataaagtcacggaagtgattgactgcggcggtaagttggttatgcccggcatcatcgatcagcacgtccacctcaccggaggcggcggcgaagcagggtttgccagccgcactccggcagtcaaactgaacgatttgtttcaggcagggatcacaaccgtcgtgggcgtgcttggtactgacgccatatcgcgttcgccacgggatctctatgccaaaatgcagtccctgaatattgaagggatacgcgcgtttatgcataccggcgcttatgccgttcccagtccgacgattacgcgttcgattcgcgatgatttaacctttatcccctcgattcttggcgttaaaattgcactcgccgatcaccgtggatcctatccgtcttttcaggaattgctgagaatagtcagtgacatccgtgtggcatctcttctggcaggaaaaaaagggctgctgcatgtgcatctcggaaatctgcctgaaggcatgtcgcaactgaccgcactctgtgaagccggtatccctgttcaccatatctcacctacccatgtcgccaggaccgaggcattattcgaacaggcgatcgcattcgccctccggggaggccatattgacgtaacatctggcggcagccggtttatgcctcaggagcaagccattcgtaatgcactggaagcgcaggtaccagccgatcgtattactatcagctcagacggaaacggcagcgtcccacgctttaatgctcagggcgtagtggaagggctgagtgccgcacccgtcgctggcaacatcagtctcctcccccggttgattgacgcaggtattccggttgaccaggcggtggcgatgatgacggttaacgttgcgaattccttagggatttccggcggaaaactctccccgggtgaacgcgcggatatttgcgtcctcaatgacgatctttcattgtcccatctcttcgccgcgggtaagcaggtcatccgtaacggggaaagcctggtgaccggcaattttgaatga

SEQ ID NO: 207422 - DNA, 1467 bp, Klebsiella oxytoca
atgtcattgctgctggcgtttatcgccattctgtttgccggtcgtcttatcctgcgcaaatatcatcctcagtctgtgctgttactgaccgggatcgcactgcttttgattgcgcatttcagcggtatggtcaccatcagtagcctggtaaaaaaaagcacgggtctgggaacatttgatgtctttgagtttattcgcgacaccctgagcgttcgtcttggtgggcttggcctgcagatcatgcttattggcgggtttgcgacctatatgtcagccattggcgcaagccaggtcctggtcagggtgacgtctcgcccgctacagcgcctgaattcaccttatcttctgctgggcctggccttattgctggggcagttcctttcactgttcatcagtagcgccacagggttagggcttttgctgatggcgacactctacccgctcttgacacgactgggctgtagccgggcagccgttgcggcggtgattgccagtacctgtgctgttgaatttggtcccgggtcaggaaattctgtgctggcagccaaaacagcaggaatagaagtggtaaattactttgttcacgatcagcttccggttgtggtaccggtgattatctttatcgctctgctgcatatcgtggtgcagcgtttttttgatcgtcgcgagaatgatgatttccatattgaggaagttcaatccctggaccagacagcagaaacagatgctcccggagcctggctttttctgccgatgctgccgctggttttgatgttgctctgcagtaaactactgttcagttcacttaaaattacgctggatactgcagtgttgcttagcctcgctgtgacgcttgtatgtgagtatctccgtcaccgtaatgcccgaactgtgatggctggcgtacaaaaggtattcgacagtatgggaagcgtatttgcttccgtcgtcacgttgattattgccggtgaagtattctctgccggattgaaagcaattggcgccgtagatgcgttgctgtctctctctggcgaattcggcctcagcgccgcttcaatcattctgctgatgacgctaatcaccttcgccatttctgcgttgatgggctccggaaatgcagcattcttctccttcgccccaatggtgccggatatcagtcggcatataggtagcgatattgcagcgatgatgctgcccattcagttatcagcaggtattggtcgaacactctctcctattgctggtgtcgtcattgctattgccggaatagcgggtgtatcgccggttgatattgttaaaagaacagcaataccgatgttagggggctggctgctaatggtaatcctgacatttgcccgttccggatatctgctggcggtcctgccatggttagccgtactatcagcgataatggccggcgtttattgctggcacaacaggcgtaagcagatatattcagctaagtaa

SEQ ID NO: 207423 - DNA, 789 bp, Klebsiella oxytoca
atgagcataactgaagtcacgggtaatccacggcacgatcagctgattcactatattgcagaacgtggctatatgaatatcgaagagttagcccagctactggatgtctccacgcaaacggtgcgacgggatatccgcaagctgagcgaacaagggttgataacccgccaccatggcggggccggacgggtatccagcatcatgaataccgcctttgaacaacgcgagctatcgctgacccaggaaaaaatggcgatagcagaagccgttgccgattatcttccggaacgttgtactgtttttattacgattggcacaacggtggaagccgttgcccgcgcgttactcagccgacgtgatttacgcatcatcaccaatagtcttcgtgtggcacaaattttatataaaaatgaggatatcgaagtcatggtgccggggggaactcttcgtgcgcataacggcgggattatcgggcctggcgctgtcgattttattgaaggattcagagctgacttcctgatcaccagtattggggctattgaacatgacggcacattgctggaatttgatgtcaatgaagcccttgttgcaaggaccatgatcaaacatgctcgtaatacgctgctggttgccgaccacaccaaatttacggcatctgcggctgtttctatcggcaatgcgcgtcgagtcagagcatttttcaccgatgctccccctccgaacgcgtttaaccagctgctgaaagaagaaaatgttgagcttatcgtggcagaacagggtgtttcctga

SEQ ID NO: 207424 - DNA, 897 bp, Klebsiella oxytoca
atgaccagaattgcatgcgtcgggatcaccgttcaggatcggatttactcgctgggggatctgccagacggcggaggaaagtatcagtctcatcactatatggaggcggggggcggtccggccgcaacggcagcagtcgctatcgccaggctcggtactgatgtggattttattggccgtgtgggtgacgatagttgtggaaacaccctactcaaggagcttcagcactggggcgtcagtaccaaattttgccgtcagtacccaaacgctcgctcgtcccagtccgctattctggtggatcaacatggcgaacgcatcattgttaattatccaggccaggatctggacagcgatgcaaaatggctggagtcgattgactttacgcgttacgacatcgtgctggctgatgtccgctggcaggaaggcgcgttaatgtcttttaagctggcccgcgcggctggcgtcatgacgctgctggatgctgatatcactccacaggatattacccctctggtggcgcttgccgaccatacggctttttccacgcccggactgaaaaaaatgaccggtgaggataatgctgaacatgggctcaggctggccgcaaagcatactgatggtcaggtctacgttacgttgggcggggaaggctcgctgtggcttgaaaatggtcgacagcaccagcaaccggcattttctgtcgatgtcgtcgataccaccggagcgggcgatgtttttcacggagcgatggccgttgcactggcagaaaaaatgccgaccgcgcaggccatccgcttcgccagcgccgtcgcggcaatgaaatgtactcaggcgggtggacgggccggaattcctgatcgtgagcaaacagaatcatttttgtcacgttttgcgtaa

SEQ ID NO: 207425 - DNA, 891 bp, Klebsiella oxytoca
atgacaactattgcatttttgggattgggtcaaatgggaagcccaatggccaataatctgttgcaaaaagggcacgccatacgggtgtacgacgtaaatcaacaggcagtgaatgagattgtccagaatggtgcgaaagcatccattactcctgcgcaagcagctgaaggtgccgactttgtcattacgatgctgccaaatggtgacatcgttcgtcacgttttactgggaaaagagggagtaagcgaaacgctctcacgtgatgcattagtgattgatatgtcgacaattcacccacttcaaacgcaggtgctgattaacgacatgaaggaaaaaggcctcagcatgatggatgcaccggttggcagaacatcgctcaatgccatcgatggaacattactcattcttgccggagggacatctgagcaaattgagcgcgcgcgccctattttgatgtgcatgggaaatgaactggttgaggctggcggccccgggatgggtattcgcctgaagctcatcaataactacatgagtattgccctgaacgctctgtcagcagaagccgccgtgctgtgcgagtcgttagatctcaaccttgatattgcaataaaagtcatgagcggtacggcagcaggtaaaggacactttacgacaacctggcctggcaaagtgctgaagggggatctctccccggcatttatggtggatcttgcgctgaaagatctgcgtattgctgtcgatgttgctcaacagacaggtgccccgctcaatatgggcattgcggccgaatcctattactccagcgccagtgagaacggcagaggccgtcaggactggagcgcactgctatctcaggttcgcctgcaggctggccgaccggactcactctaa

SEQ ID NO: 207426 - DNA, 888 bp, Klebsiella oxytoca
atgtcttcccaaaatccccctttcactctgaaagatatttctcgtcctggcggaggatttgccatgctggctgtcgatcagcgtgaagcgatgcgcctgatgtttgccgcttccggacatccaggaccgattgctgacagcgttcttaccgattttaaagtagcggcgacccggctcctctccccttacgcttctgccgtcctcgctgataaacagttctgcctcgatcagattgtttctcagggagcggtggcagagtcatgtggtctcatcgtggctgccgatcattttgttcccggtaatggtatcccggtggacagtgtcgaaattgataaagcagtggaccctcaccatgcccggaagatgggcgctaaagccatgaagttactggtactgtggcgtgaagatgaacccgcacaggcccgtctggcgatggtggatgaatttgtgcaacgttgccgcagtgccggtcttgtcagcattatcgaacccgttgttcgtccccctcgtcgcggctgggagtttgacaaagaaagcgccattgttgcggcggcggcggagctcggcagtaccggcgccgatctgtacaaagcagaaatgccggcaggcggtaaaggtgatgagcggacgttgctggctgcgtgtcagaaacttaacgatcaaatgaagatgccgtgggttatcctctcctcgggtgttgaggcggacatttttggccgcgccgtgcgcattgccatgaagggaggggcgagtggtttcctcgccggtcgtgccgtctgggcatcggttattggtgcgcaggatccacaaaccatgctgcgtgatgtttctgttccacgtctgcaacggctggccgaaattgttgatgaaggtatttcacaacattaa

SEQ ID NO: 207427 - DNA, 1011 bp, Klebsiella oxytoca
atggacaaaattacccaggtattattttcagatatcgacaaagtcacgaccgaatatgttgaggtgccacgccaggcgcttaaagctgatgaagtccgagtcacgccggtgttctacggtatttgtgggtcagacctgcatgtactgaaagggggccacccgtttgcccgtcctcctgttgtgcccggccatgaaatcgcagcgcgcgtgacggaagtcggcagtgaggtaacaaacataaggccaggcgaccatgtcgtggtcgatccgattatggcctgcatggagtgtcgcgcctgtaaagccggtcgttttaacctttgtgagcctccgcaggttgccggttttcgtgcccccggatttgctcgttcgcagcatgtcgtcccggcgcgaaactgccacgttgcgccctccactctgccgttaaaagtactggccttcgcggaacctgcagcctgcgcccgccattgcgttaatcgtatgccgaagtcttctctggaaagcgtactggtgattggtgcgggtaccattggcttatccattgttcaggcattacgtattatgggcgccggcaaaattaccgtcattgaacccgatgcggcaaaacgtgcgctggcgttaaagcttggcgcggcagaagtctgggcccctggcgaactggacccgcaaattcgtttcactggggcaatcgatgttgttgcagccccgtccacgctgaatgacgcctgtacccgcgtctatgctggcggaacgattgtgtgcatgggagtaccgagtggccctcgtgaaattcctttgcccatgatgcagcgcttcgaacgcgatctgcttaattccggtatgtatattccacaagattttgatgcagtgattgagtggcttgcggatggccggtttgataccagtgagctggtcactgacctgttccctgtcaatgaggccgcgaaggcttttgagcgcgcacaacaaaatgactccataaaagtcatgctgcaatttgctgaagaatga

SEQ ID NO: 207428 - DNA, 1434 bp, Klebsiella oxytoca
atgagtcatatcaccagtcctgcaccttattcaatcagtcgtccacaggacgtgattgatattgtaaataaaaactcagcagtcaataccagcgccggcgttatttttatcgcgctgggcggaattcttatcgatgcttaccaggccgcaatggttgggtttggtaacaaatacatagcggcacaattcggtatttccccgggactggcggcaacggtcaacgcctctgttctggtcgccgcgctgattggcggattattagcaaatcgcgtcattaaccgctttggtcaaaaacgcgcttttattattggaatgggattgtgcacgattggtgccgccgccgttgcgattgcacccaatatatggtgggtgctggtatgtcgcgtgattatgggttttggcctgggcattgatttcccgctagcgaccaacgcagtggcagaattacggggctctgcctcgaagaaaaccggttcatcggtaaacctctggcaaatggcatggtatgtctccaccacggtagtctacctggtcctgcttccgctgctgctctcaggcgttgccgaagagcaactctggcgctacgggattttcattggcgctatttttgccgttattatcatgatcctgcgctacgcctttattggcgaatcggccatgtgggccgcacgcgtcggacgctatgaagaagcctgcggtattctggcaaaacgttatggcgttcatgcccgcgtcgccgcgtcatcatcctcgcaaaatccatcagcagaaaaagcggaaaataagttccacggtgggtatggcatcctgttcaattcgcgctatcgcaaacgtaccattctcggctgcgtcgtcgccacaatgcaggcctggcaatataatgccgtgggtgtttatcttcctctgacgctggccggcatcctgagcggcgggctgtcaggcgcgctgacaggctctgcggtggttaatgcgctttgtggtattaccggcgggttgatcggctctctcatcctccagcgtctggggagtcgtttgcagtcactgtatgggtttgcattcgtgacgattgctttactggcgcttggctcactggcgaccactaatccatggctttctttgggtctgctgggcgcaattatcttcttccattctgcaggtcctggcgggctgggaatgacgatcgccactctttcatatccaccggctatacgtccgacgggcgttggttttgcccgcgccattatgcgaacaggagctatcgccggactgatcttctggcccatgttatggggcgcgtttaagacagaagcgttctactggctggcaattgttcctttcctcggattcctgacatgcgtattgattaagtgggaaccgcttggtgcgaatgttgatgctgaagatgctgaagtactcgcagagctggagaaatag

SEQ ID NO: 207429 - DNA, 1308 bp, Klebsiella oxytoca
atggctgaaaaattactgatatcgagcgaacaactatccggcaaagccatgaggcgtgtcgtcatgggcagtttcgccggtgcgctgatggagtggtacgatttttttattttcggaacggcggcggggctggttttcgcgccgctatttttccctgacagcgatccatttattggtttgattgctgcattcgcgacctttggtgtgggctttttaacgcgtccgctaggagggatagtttttggtcacttcggtgataagttcgggcggaagataacgcttatctggacattaggcattgtcggttcctcaacgtttttaattggttttatcccaacatatcaggatataggcatctgggcacctgtcacattgatggtgctgcgcctgattcaggggttcggtctgggtggtgaatatggcggtgccgccttaatgaccatagaatcagcgccccgggagaagcgtggttttttaggatcgttaccgcaaaccgcggcttctgttggcattatgctggcaaccggcgtgtttgctctgtgtaaccacttcctgactcaggagcaatttctctcctggggatggcgtattccattctggttatccgctgtgatgctggtcgtggggatgtttatacgactgcacactgaagaaacgctggactttaaaaaacaaaaaacagcggtactacacgaaaaaacggcgccgccgctcattgagcttttccgcaagcatccccgaaatatcctgctggcgcttggagccagactggctgaaagcgtctcgtcaaatatcattaatgccttcgggattgtctatatttccactcagctggccttatcaagggatatacctttaacaggtatgcttatcgcttctgcgatgggtattatcatttgcccgctggttggctggatttctgatcgagttggtcagcggaaagtgtatttgtccggcgctggtttctgtgtcctgtttgcgtttcccttctttttactactggacacaaaaagtacgcttattatctggtgcagcatgatgctgggatataacttaggcccgacaatgatgtttgcggtccagcccacgttattcacccacatgtttggcacgcgcgttcgctataccggcctttcctttgcataccaattttccgccattctgggagggatgagcccgcttatcgcctccagtctgctggcgttaggcgatggaaaaccgtggtatgtagccctttttctgctcgccatctctgccctctcttttatttgcgtctggcttatcgatccacattcactcaataaataa

SEQ ID NO: 207430 - DNA, 900 bp, Klebsiella oxytoca
atgaaatctgaatcgaatagcgcacaccgggaagccctgcaacatgcttttgatacaccgtggccggggccgacaggtgaagcggtattgctgcaaaaagggaatatccgtgtccagatttatccaaatgacggtgccagaataacgtcattacaggcgtttggttatgaggttttgcggcaatgggaacctcaacgaaaggcttttcagtatggctgtttcccaatggtgccctgggctggacgactgggaaatgccaccctgaacgttggggaacggagttatgccttaccggccaataagcctcctcatgctctgcatggcatggcctgctattcgacctgggaaatcgtggaaaaaacggcgcaaagtctccggttacgaatggtactagattccccctggccctggcggggcgaggttcagcaaacgttaatacttgaacaggacgcgctgaatttaagccttgaaattatctctgaattggcaacattccctgcttctgccgggtggcatccctggttcgcgaaaaacctcaatccctcatctggaggagaagaattacaggttattttccagcctgactggcaggaagaacccggcagtgatgaattaccgacgggaaacagaattacgccacgcccggggccatgggacgactgttttggctttttctcaggactgaatgtcagactggaatggccaggtcaactgactatgtcgatgacatcatcagcgcaaagtctggtggtttttgataaacagcccgatgcaacctgcgttaaccccctcactcaggcccccaatgagattaaccataatccgcattttatcagtccgaaggcgcctttgttaattgagacgagctggcggtttaaaaaaactgctgatgctggctaa

SEQ ID NO: 207431 - DNA, 168 bp, Klebsiella oxytoca
gtgacgacacaagtgaaactgataacccttgcgataaaaccttttaattctgaagacattaagcaaggctttaaaaagttatttattaattgggcgatcatcctgggtgggctggttcaaatcctgataggcacgctaatcgttctgaagtatcctggcttcttctga

SEQ ID NO: 207432 - DNA, 792 bp, Klebsiella oxytoca
atgatcttgattgataacgttaagaatgaagagttaaaggatatacgttttgttctaaccgatatggatgagacgctgacttatcaggggaggttacaggcccggacctatgaaagccttgagaagttacaaaatgcaggtattaaggttattcctgtcactgctgcctctgccggatgggctgaccaaatgtccagaatgtggcctgtagatggagtcattgcagaaaatggcggtttgttttttacacgtaataccagtaatcatggtgtcgatagattcttttggcatgaagatcagttttcagaaaatcatcaaacgttgagggaaattcagagtcggatccatatcaaacaaccatggttagaagtgtctgatgatcaaagtttccggttgacaagtatcgccttcaggctgccagaagttcatgagcagacgcaacagcttgttgaagaattagagaaaaatggctgcagttatacaattaacaatttatgggtactgggctggcttggtcagtatgacaaactcgcaatgagccgaagaatactgaaaaaattttatgcgctggaagaagccgatgagcaagcgtcggtttactacagtggcgactcgcttaatgatgcccctatgtttaagttttataagaaaagtctggggatgagtactataaccaaggtattaaaggatatgcctgcgttgcctggctggatcagcaaatttcccggtggggaaggatttgtggatggtgcgaacagaattctcaacgccaaaaatagacgtctttattga

SEQ ID NO: 207433 - DNA, 963 bp, Klebsiella oxytoca
atgacggttattgcgcgtgatgtgaagcaactctctccggtagcatttattgcccgtacgattatctcgctcggtttatccgggcgtctacccaccacctcctggtttcaggaggtgctggagattggctcgggtacggtacagaaagcgctacaggagttaaaaaaatccggcgcagtcacgcttgtttcccgcggtcaccaggggacttttgtggtctcctggaatttccccctgctatggagtgccgcacgtatcccaccggtgcatatgctattaccccccagaggttcccttgaggcaatgcaggtggcttccgcgcttgttgagcagtgcggtcactggggggcggtaaccaccgtcggttatctgcgcggtgcgcgttcgcggctacaagcctttgatgaaaatgaagctgatattgttcttttatcgtcagggtcagcgcagatgctgatggcaaacgccgctgaagaggggtacgaactctttgaggtgggtaatggcagctattaccggcctggcagccttgttgtggttgaaaaatcagaaggagccgacacaacgcgcccgcgcgtcggtattgactttcattccagcgatcatcaaaggctgacccatgctcagtttcctgaagcgcagtatgattatgtcgaggtcgattttacccttttgccccgcgcggtatttcttggcgagattgacaccggtgtctggcaccaggagccttcactaatcccgctagagaaaattggcctgtccctcaggccgctgaatgagcctgctgcgctcagcatggcggagtctatttccagtgcagtgctggtggtgcgtgcctcatcgcctgtgactcagctcctgcgacagattgacttcgaggaaattaaaaagcaggccgtgctgccgttaaatacctctgaggcgagtttaggccgacttcctgatatcttgcgatttcgctaa

SEQ ID NO: 207434 - DNA, 852 bp, Klebsiella oxytoca
atggatagccgaactggtaaagcagtacgcttaggacgcattttacgcccggaaacggggcgcgcagtggtggtggccgcctctcacggcgttatggctggcccgccatcagggctaaaaacgcgcggtgaaatcgaaagcgtgtttgcgcagctgcgcggggctgacggggtcatggtctccccggggatgatcccgctggtggagaagacgttcattggccgtgaccgccctggttttgtgctgcaccttgactggaaaaaccatgcgcgctccatctatacgccggggaaagacggcaggagtgaaggggttctggcacagctggcggagattggcgatgttgccgcctgtggtatcgatgcggtcatgacctatatgtatcttggccagaaagatacgacccttgaacaggcggaaattattcgcaatacgcgcatcgtgcgtgaatgcgagcgccacggtattgcggtaattattgagccgcggtccgcgctggaaggcatcgatcctgacgcgctcagtgcgaatgtgatgagcatgtactgccggatagcggcggatatcggggcggacctggtaaaagcgctgtggcccggctcggtggacgattttgctgcggtaacaagcacctgttatactccggtgctgcttgcgggcggtgccggaggcgaagatccgcgctccacgctgcaactggcggctgacgccatgcgtgcaggcgcgaaaggagtaatgtttggtcgacgtattttccgggcgcagcagccagccgaagtgcttcgcgcgctcaatgccgtcgtgcatgaggaacaaagcgtcgaacaggcgttacggtttctggaacagtaa

SEQ ID NO: 207435 - DNA, 1398 bp, Klebsiella oxytoca
atgtctgacatttctcatctcgtcgccgccctgaaagctgccgttccggaatcgcaggttctgaccgacagcgataccctccaggcatccagtcatgatacctggcccctgtccaccaaacttaggcgcttaggatgccatgattatcaggccgatgttgtggtaaaagtcactgacgagcagcagatccagcagctgctggcgctggcgacggcgtatgacacgccggttacaccacgggcgctggcctcctccgtgacggggcagccgctgccgacgcgcggcgggatcgtactggatttaaccggcatgacgcatcaccgggatatcaataccacgaacctgaccgtggaagtgtccgcaggctataacggcggtcagctggaagatgaactgcagcagatgggatggacgctcggccattcaccccagtcactataccagtccactgttggcggctggctctctacacttgcgaccggtcaattttcctcttattacggcggcattgaggatctgatcacagcctatacggtcatcctctccacgggtgaaaagatacgcctgaaggcttccccacgcgctgctatgggccccgatctccgccagcttttcatcggcgcggaaggtacgctgggcatcgtcacctcggtacagctaaaaatgttccccctgccgcaaacgcgccttttcgattcgcttgagcttccctccgtcgaagcgggcctgactattatgcgcgaacaggcgatggccgggcttcgtcccttcctgctgcgtctgtatgataccaacgaagcccgtcacgccatgcaaaatccacagcaggataaaccggtaatgttcctgggcacccagggcgttgaggcggttgcccgcgcggaaatggatgcctttatggcgattgtccaccgtcacggaggcaagtccattggcagcgaaggggttctgaaatggatggatcgccggtttgacttctccaccgtcgagaacctgcttgactccaccggcggctttgccgaaaccatcgaaattgcgcacacctgggacggcatcgccagcctttatcacgacctgaataaaatgctgacgccgctggcgggcgaagtcttgtcgcatttctcccacgtctatccgcagggcacctctatgtacatgatcctgctcgggcgggaagagacagatgccgcggcggtggagaaattacgcaccatctggcgcgaaactatgcgcgtctgcctcgagcacaatgcggaactttcgcaccatcatggcggcgggctggttcgctcgccgtatgcccgcgaatcgctgggatcggcgcatctgctgctgcgccgattaaaacaggcgctcgatccgaacggcgttctcaatccaggcaaactggggttataa

SEQ ID NO: 207436 - DNA, 1344 bp, Klebsiella oxytoca
atgtggtttctcggtatagatatcggcaccacgcatataaaaatcatcggcatcagcgaggaaggaacgtttttgccggtgaaaaaatgccgcacgccagtgatgcagcatgacggactgacatttcacgatgcatccgtgttctggcaaagcctgagtgcacttatcgaaaattactcgcgcgaagaagcacgacactgcggccccctggccgcagtgtcggtgggcacgttcggccaggaggagtccgtcgcggttaactccagcggggaaattatctacccttccctggcgtggtgggaaaactatcccatcgcggcgctggaaacagacctccatcagtggctggacagccatgagcattacgctatttccggtatgcggtcgcgccctaaccagagccccgctcggctgaactggatacgtacacaccacccggatatctgggggcagatcgatcgctgggtggatttcggcagctacgttatgtggcaactgaccggcgaatggcgcgcggcagcctcgcagatcacccattcacaatgcttcgatctgaaaagcatgcaaccccaccagccaacgttagagcggctgggtttccctgcaacgctttttccggagctggcggacactggcgaacgctgcggggagatccgcccgggatcgctaccgtgcgtggcgctctgtcagggcgccagcgtctttgtgggcggacacgatcagatcgtcggcgcctgggcggtgcaaaatcaccagccgaccaacgtattcgactcaataggtacgtccgaatatctcatggtattaacgccgcatttccccgataccgtcgccgcatggcgactcggtgtcgatatcgagcgcacctggaaagccggggagtttgtcatgggctgcgccactccttccggcaagattatccagacgcttgcggaactgctctatcaggggaattacgatcagctgtttcaggatcttcttgccgaagcggttccgacagccgtctcggtttctgttaacgaggatgaagcacaggggttgttttccttgcagcaactgcatgctggcgtcaggccagccgacgttgtgcaggccaccctgaaccatattgccgaccgcgcgtttcgtctgctgacgcatatgggggaaattggcgggatacgcccgcaggatgcggtgctgatgggatcgttgttccagcgccaggagatgctgcagcaccgtaaacagcgctggaacatgccgctttttgtcagtcaactggccgaacctgtcgccacgggcgccgccatgatcgcccgtgaaagctggctgattgcaacccatcaggagggtcaactatga

SEQ ID NO: 207437 - DNA, 966 bp, Klebsiella oxytoca
atgaacgtcatcatcgcctcacttaatacggctattgaacggctgctgctggtggataaacaacagcccggcgaggttcacagcctgctggatgataaaacgctggcggggggaaaaggggtcaatgtcgcgcgcgttatgcgccagttgggtacccttctgccggacgcgccaacgccgcggctgctggggtttctgggaggcgcaacggggcggctgtgccgtgaactgctggcggaggaggcgctggaaggatactggtgtgaaatcgtgggcaacacgcgcatttgcgaagtcgtcaccgaggtacaggcaccggaaagagcaagcgtctataacgccgtcggcccggccatcaccccggacgagcatcaggcgctacaccgcacactggaacaggagttgcctcatgccagcgcgcttgtctgtaccggttcactggccaaaaacctgctaccggacgagtacggtcgctggataaccctcgcccgcgccgctggcgtgctgtcgttgctggacacccacggcacggcgctgttgcagtctgccggttcactgccggatatcatcaaaatcaaccgcgatgaactgcgtcacgccagcgcggcctcctcccgggcattgccgcaggcatggctggaccagggcgtgcgctgcgtgattatcaccgatggtcatcgccctacccttgcgctgacgcctgacggtgattatgaggtctcctctccggatgtgacgactgtcagcccggtcggttcaggggatgcctactgcgccggtctggtcaccagccttctggcccgtccgcaggcccgatggacagaacatctcacgctggctgcggcctgcggcgcagccaatgccgccagcccgacagccggcctcaccgccggtctgaatttgaccgaattacaacaacgttgcgcggtacgcgctgtttcgacgtcgccacgctcacccgcctga

SEQ ID NO: 207438 - DNA, 1383 bp, Klebsiella oxytoca
atggttagtcattcacaagtcacagccagaaacacctggatgcgtaatgttctgttaatcgcagtcgttaccgccgtcgggggctttctgtttggttttgataacggcagcatttcaggttcggtagggtttttacagagtaaatttgaactggatgcggatggcatcggctgggttacatcgtccatcattgttggctgcattatcggtgtagcgctggccggcccactttctgatgcaataggaagaaaaaaggtcctgctgctgaccgcgctgatttttatctttggtgtgctgggcgaggcactggccacttcgccggagatgctggtctggtttcgcattatcgtgggtatcggtatagggatggaaactaccattgcgccgctttatattgccgaggtttcaccggcctatattcgcggacggctggtctcgctgaaccagctttttaactgcatcggtaatctggcgatattttctgtttccgccattatcgcgaactacgccagtgaaatgtggaatatcgaatatggctggcgggtgattttcgcaagcggcatcttgcctgccattctttttctgatgctgctggtctgggtgccggaaagcccgcgctggctggtgcgtaaggggcgtccagagcagggccttgatattctgcgtagaataaatcctgacgaagcgacagccagagagcaacttgaagcgattaaacataccctgcaaaatgaaggtacctcccgactgcgtgaacttttttcccctcgcctgcgccgggcgctgattatcggtttctgcgttgccctctcccagcaaattaccggtattaacgccattttttactacgcaccggaaatatttaaaacggcaggcatggatatcagcggtgcaatgtcgtttaccgttcttatcggtatgacgctggtgatcgcaacgctggtctccatgtggatcattgataaagttggacggcgttcgttgcttatttttggttcggcaggaatggccgtcacccttagctgtacgggtatactattttgcgccagtgaaacccagacgacgttgttactgatttgcatcctggcctatgtcgctatcttcgccgtctcttatggcaccgtagcctacgtcattatttccgagatcttccctattcacgtgcgcggtattgcagtatcgattgcaacctttgccctctggggcggcaactttttcgtttcacgcttctttcctgtactggtggaaaatattagcgcagcgaatactttctttatttttgcgggcatctcggtaattgctttcatttttgttgtagcaatggtgccggaaaccaaaggaaaaacgctggaggagattgaagcggagctgcatgctaaataa

SEQ ID NO: 207439 - DNA, 516 bp, Klebsiella oxytoca
atgagacctggtaaaatcctacatccgcaggttgccgaagccttagccagtttagggcacggcgatattattttagtcactgatgccggcgcacctattcctcctggcataaaaagggtcgacctggcgttttgtgcgggctgcgtcgatcttattgaaattctgcgcgtattaagaaacgaaatttttattgaaaacgttatctttgctgaggaagtaccggcgaataaccctaagctattgcagcgcgtcaccaacatctttaccggttctggggctgacttctcgctcataccacatcaaaagcttgtggcagaaatctaccacagcgccagggtgatcattcgctccggttcgctaatgccgtgggggaatttcgcactggtcgccagtaccgatcctgatgcgtggttcgatgattctatgaaaattattcctgaatatgttgaacgctcagcgaagataaaaaatggagccgtacctgtcattaaaaaatactccacggtgacaaaatga

SEQ ID NO: 207440 - DNA, 1362 bp, Klebsiella oxytoca
atgagttataagttgtcgctcatagcatcaatcgcgggtttattatatggctttgattcggcggtcattgcgggtgcaataacgcatctgagccactatttttctctcgatgcgatgggcaccggctgggccgtgtcatcggtggtactggggtttatgataggtgcctttagcgctcagtttattaccaacgctctgggcagaaaaaaagcgttaatccttaccggcgtactggtgtttctcgccgggatcttcacagcctttccatacaattttatgatgtttatctttttcaggatcgtcggcggtattggcgtagggctgggttcagcgacggcacctgtttatattggtgaaattgccgcgcaaaaaattcgtggcaagacgctgggcttttaccagatgatgatcgcttttggcatccttttggtttatatggtgaacgccctggtcgccagctggggcagcgatccgcaatgggccacacaatatgcctggcgctatatgctgggcgccatgtcggtgcccggctgcctgtttatgattctggccttctggttacccgaatcaccacgctggttaataaaaaatcatcgtgaagcgcaggctagcgacattatgaaaaccctgtatggccagaattttgacagccagacggccattcaggagataaaaagcacctttcatcaacacgccgatcttgcccctcgcgaaagtattttgtcaaagaaatacaggcgagtatcgctgaccatactggcaatggcattgctggcaaatttatgcggtatcaatgccgttttatattacggtaacgtgctgttggaaaatatcggcatcgccagcgaaaaaacggcctattaccaacaggtcattatcggtattgccttctttgccgctgcggtctgggccgtttatcgggtcgaaaagtatggtcgtcgtaagctgctcattgtgggatcgttaatgtgctttctttcgatcacgttgctgggaatattaatctggatgggggtgaccagcatatttatgctggtcatcatgatcgtttatatcctgttcttcggtggcaccattggccccattttatggattattattcccgaactggcccctaacatgattcgcgataagctgatgtcgtgggccacgctgcttatctggaccggcagttttattgtctcgcaaacctttcccatgttgacacatagcgaaacgctgaacaggttatttaacggcagcttcccattctttttgtatggcctgtgctgctttctgtggtttttgctgaatatcttttgtgtcgcagagacgaaagacaaatcgctggaacaaatcagcgctgagatgagtaaagcgtga

SEQ ID NO: 207441 - DNA, 144 bp, Klebsiella oxytoca
atggctttggaaaacttgccgtctgagattcacctgggaattctcctggttatgcggaacgaacaggtcattgatgcagcaacacgcgttgagcctggacagctaacgtgtcagttgcaaattatgggcattacgtggctataa

SEQ ID NO: 207442 - DNA, 1023 bp, Klebsiella oxytoca
atgcctccacgtacagccagtgctttatatgatgaaatgaaaaaaatgtctgttgaggagagaattcgattcttctccctttccctggaagaaattcaccgtgaactgcgggaaagcctcaacgagatagaatttatgaaacgagcacttgaagagagcgaggaaaatcatcgtcagttggttgagacagcccaggatgctgtcattactattgatgattcaggagctgtcttaaactggaatctggctgcagagcgaatgtttggttggtcttctaaagaggcgattggaagctccttgggcgaaatgattgtgcccgaagagtttcgtgaacagcatgcacgcggattggctcgctttcaagccgctcaaccctctaacattcttaatcgaactatcgagatcaccgcgctacatcgcacaaaaggcacttttccgattgagttgtcaatctggcctcaccagcaatcaggaaagcaattgttctcagcttttatccgggacattacagaccgtaaacagagagaacaaatcgcctggctgcatgctaattttgatgcattaacgggattaccgaatcgaagattactggtcaatcgactggagcttgcgataacccaggctatcgctaacgatgcggagctcgcacttctgtttgttgacctcgatcgctttaaaccagtgaatgatgttcacgggcatgcggtcggagacgaattgctgcgccttgtcgcgtttcgtcttcaaagtgttttacgcgaaggagatacggttgcccggctcggtggtgatgagtttatcgttcttcttcctgatttagttactgacgatcccttacctgagcaaacagcggaaaaaatcagcctagccctgacgcaatccttcctgattaatgagtatgttattacgatttcagcaagtatcggtatcgctcgtttccctcatgatgcagaagatgctaataacttgctgaataatgcggataaggctatgtacatcacaaaaaaaatcacacgccggtaa

SEQ ID NO: 207443 - DNA, 192 bp, Klebsiella oxytoca
atgctatacattaaaagtattgatggcaacacttatttaataaacaaagaatgtatttccattgtgaagagtcacggcaataacgtaatgatttactttaagaattccgagagatatataattggtaatatagaaatgaaagatatactgaagttctacggcttccccacaattaaggagccagactcataa

SEQ ID NO: 207444 - DNA, 861 bp, Klebsiella oxytoca
atgaaattattaagttttataaacccacatactagaaaaaaaacatgggggcaggtctccagcgataaagtttatgatcttggtgccaaatattctgcctattttccagacctgaaaactgccattgccggtggtgtgcttgctgagattgagcgcatggttatcggaaatgctgattttcggttagagcaagtacagtttcttccagtaatagaaaaccccggaaagattttttgcgttggaatgaactatatggaaaaacgaattgaatttgaagaaactatcgatgctccaacgctatttatacgtttcccggactctctttcttcacatggggacgtggtttgtaaaccagacatcagcaacgagtttgactatgagggagagctggcagtaattattggaaaatcaactgataacgtcaacagccaaaacgcgctggatcatgtggcaggctatagttgctttatggatggttctgtccgggacatgcaatatacatggtttacctcaggtaaaaactggcgtaagacaggatctttcgggccatggatggtgactactgacgagatttccgatccgcaagatttaacgattagcacgtggttaaatggtcaacgagtacagcatgattcgaccagaaatatgataaatcccgttgcgtatttgattgaatacatatcgcgcttcagtccgcttgaagcaggggatgtgatcattaccggctctccaggcggtgtggggacaaaaagaacgcctccactttttatgagagagggggacgttatcgaagtggggatcagtagaatcgggcggcttgtgaatcaggtagaaacgctatcacgtgtggcatcctgctga

SEQ ID NO: 207445 - DNA, 1320 bp, Klebsiella oxytoca
atgaattcatcccaggaattagaaaggtcaacgttaaagaaaataacctggcgcatagtgccctatgttatgattgtttattttgtgggtttttttgatcgtataaatattggttttgccgcattaacaatgaaccaggaattggggttttcagatgctgtatttggtctgggggccgggctattcttccttggctattttataactgatataccctcaaatattattttgcaaaaggttggtccacgtatctggctggctcgcattttgcttagctggtcagtaattaccggatttatgatatatgtagaaaccgctacaggtttctatattatacgcttccttcttggggtcgcggaggcgggatcgttctcaggaatcattctttacttaagtacatggtttccgatcaaacgaagagctcaggttatcgcgttgttcatggctgctgcccccatatcttcaatgctggggtctccactggcaggaatgattttgagcctggatggtgcactgggatttaaaggctggcagttaatgttcctcatttgcacaattgcagccggcatactgggggtgttcacgctgttttacgttaacgatcgccctgaaaagaataaatggcttacagaatcagaaacaaagtggctcattgctacgctccatgctgaaaaacagaaccagtctcagggggtcaaaaccagcatctggaaagggttaactgatgtccgggtattaactctggctatcgtttatttcggcacatctgccgggctttactcgctcaatatctggtctccacagttcctcaaatctttctcattatcaatgatgcagataggtcttctgaatgcaatcccttccgcactggctgctatttccatgattctctgggccaggcattcggataagaccaaagaaagaacctggcatgttgtcggagcctgttcattagcatgcactggtttcgttgtggcaggacttgcaaccgcgttaccgtttgcaattctggcacttattatggcaaatattgggatctcttcctgtaaaccgcctttatggagcataccgtcactctttttgtctgggccagcggcagcggccgggctggcggcaatcaatgcgataggcaatctgggtggatttgctggaccgacacttattggctggctgaagaataactacggagatttctcaatcgccctgttttttgttgcaggcatgctggttgtgtctgcattattgacactcgcgcttgaatttaaaaggaaaaaaatggaaaaagaacagttattagagaaaaagcattctttatcctga

SEQ ID NO: 207446 - DNA, 618 bp, Klebsiella oxytoca
atgagcaagaaaattctgaccacgccgatcaaaagtgaagatctgacagacattcaggcaggcgatattatatatctgaatggtcacatcgttacgtgccgcgatgtcgctcatcgccgactcatcgaaggcgggagagaactacctgtagatattaatggcggtgcaattttacatgccggtcctattgtaagacccatccctgacagtgatgataaattcgagatggtatccgttggccccacaaccagtatgcgtatggaaaaatttgaggaggaatttattgccagaactggagttaaactgattgtgggcaaaggaggaatgggagaaggtaccgcaaatggctgtatggagtataaagccctgcattgcgtattccctgccggatgtgcggttgtggctgctaactgtgtagaagagatcgaagatgcacagtggaaagatttaggtatgccggaaaccttatgggtgtgccgggttaaagaatttggcccgcttatagtttccattgacacccatggcaacaatctatttgaaaaaaataaagtcctgtttaatcatcgaaaagaaattgtagcggaaaagatttgccagaatgtcagtttcataaaatag

SEQ ID NO: 207447 - DNA, 900 bp, Klebsiella oxytoca
atgaacaaaagtgagaaaattacctatattactgatgtcattgcaaaatttgttggatatacaggaaaggtgttaccggatgatgtctacaccaaacttgaagagttacaggcgaaagaagacagccatcttgctaacgtcattttttcaacaatgttcgagaaccaaaggctggccagggagcttaacaggcccagttgccaggataccggtgtgattcagtttctggttgaatgcggtgctaattttcctttgattggagagctggaatctctcctcagggaggctgttattaaagcgatagtagaatcaccactgcgccacaacagtgttgaaacgtttgatgaatacaacacgggcaagaatgttggtaaagggacgcctacagttttctgggagattgtacctgactcagatgtatgcagtatctatacgtatatggccggaggcggatgttctctgccgggtaaagccatggtattgatgccaggcgcaggttacgaaggtgtcacgcgttttgttctggatgttatgaccagttatgggcttaacgcatgtccgccgcttttagttggcgtcggtgtcgcgacatcggtagaaaccgccgcgctgttgtccaaaaaagcactgatgcgcccggtagggagtcgtaattctaacgaacgggcagccttacttgagaaaatgcttgaggatggcatcaatgaaattggccttggaccacagggaatgtccggcaacacttcagtgatgggggtgaacattgaaaatactgcaaggcatccctcaacaattggtgttgccgtaaacgtgggttgctggtctcaccgtaagggacatatcacttttgataaagatatgaattacaccattacatcacatcagggagcaaccttataa

SEQ ID NO: 207448 - DNA, 648 bp, Klebsiella oxytoca
atgtttaaccttggaaaaattgaactattatcggcaaaggaacaggtggcatcagttttacgtaaagcaatcctgtcccgcgagcttgttgaaggccagattataaccctggaggggatcgccagcctggttggtgtttccagcatgcctgttcgggaggctttccttatacttgctgcggatggtttgatcaaggtgaaccgtaacaagagcgctgtcgttcttgggataaatgaaaaagcgattcgcgaacattatgaggtccgctcgctgctggagagtgaggctgtggctaaagcgtcgagtccaggaacagatatctcacgcatcattgaagtgcatctgtcagccgaaaatgatattgcaattaataatttcacacgttattcagaccttaatcaggcgtttcatatggagatatggagcgctgccggtaatgaaaaaatgaaaatcctcctttcaaacatgtggaacgggctgtcaatgggatataacgtgactgaggaagagtatgcacgtatctctgttactgaacacagagccatactggaggcaattcagcaacatgatgagtgtcttgccagaaaacgaatgcagtcccatattatgcgttccatgaataatatgctgacccgttaccaggattag

SEQ ID NO: 207449 - DNA, 621 bp, Klebsiella oxytoca
gtgttaaagattcagagaaaacagaccagagattgtattgctcaaatgattcgttatgagatcttttcaggaagtatgaaacccggagataaattaactcaggaaaacatagctgaaaagttaggtttgtcccgaatgcctgtaagagaagcattacaatcacttgaaaaagaaggttttctggtacgtctgagtacccgacatatgatggtttcagccatagaatctgaacatattcatactatcttccaggtaatttcagacatggcaacccaattgttttctttgatcccggtacaagtagggcgaacactgtatgagcatgcatgtcaattaaaatcagcgacggatttaaaagcagaactggactttcattacctgataacatcatgtattgcaagcagataccttgctaaaatatatgaacaattcgtcgatagttatatttcctacactattttaaatctggaaataaacagaggtattcagtcggaattattatgtcagatatgcatggatatcctaaacaataaagagaatttacgaaaaagcattcccggttattttatggcgttgtcggcgattatggagcgtcatgtggagaaaaactgtcatgtttaa

SEQ ID NO: 207450 - DNA, 789 bp, Klebsiella oxytoca
atggatgacttaactctgcgttattttgacgccgaaatgcgttacctgcgtgaagcaggtgaagaattcgcccgcgcccatcctgaccgggcagcggccttaaatctcgacaaagcgggcgcgcgcgacccgtatgtggaacgcctgtttgaaggcttcgcctttctgatgggccgcctgcgggaaaaactcgacgacgatctgccggaactgaccggcggtctggtcagcatgatctggccacattacctgcgtaccattccttcgctctccattgtcgaattcaccgcggactggcatgaactgaaagaacctctacgcatagaaaagggctttggcatactttcgcagcctattggcgaaaagcgcacccgttgccattacaccactacgcaaccgttaactctgctccccttgtcgcttgtccgggcggggatgtcgacggaagcggacgggcgctcgcttatccgcctgcgctttgagtgcagctcgctggcagactggagccgcatcgatgtaagccgcgtcccgctctatctgaatgccgatgcgccgctggcctgcgctctgcatgaggcgctgacgctccgggtggcgaaaacgtatgttcgcctccccggcaatgccgaacgctggccgctggacgcccgttttgccgtctgcggtttcagtcaggatgaggcgctactgccggagagcggcagcttcagcggttatcagctgctgctggagtatttttccttccggaaaaaatttatgtcggtgacgctgcgcggcctggaaatgtga

SEQ ID NO: 207451 - DNA, 600 bp, Klebsiella oxytoca
atgctgacagcgattctgattcggacagcgattccgactctgacagcgattcggactctgacagcgattctgactctgacagcgattccgattctgacagtgactcggattctgacagtgactcggattctgacagcgattctgactctgacagcgattccgattcggacagcgattctgactctgacagcgactcggactctgacagcgattctgactccgacagcgactctgactccgacagcgactcggattcggacagtgattcggactccgacagcgattctgactctgacagcgattccgactcggacagcgattcggactccgacagcgactcggactctgacagtgactcggattcggacagcgattccgattctgacagtgactctgactccgacagcgattcggattcagacagtgactcggactctgacagcgactccgactccgactccgacagtgattctgactctgacagcgattcggattcggacagcgattcggattctgacagcgactcggactctgacagcgatattgaggccaaccccgatagcaacagcccggacgttgtcgcgctggaaggtaacctga

SEQ ID NO: 207452 - DNA, 288 bp, Klebsiella oxytoca; identical to SEQ ID NO: 182627

SEQ ID NO: 207453 - DNA, 2679 bp, Klebsiella oxytoca
atggctgttaatcaggcgaaaatttttgaacatctcgaacaactggttgaaaaccctgagcaagacgaatttatctacggctttttaactgcttttgagtttcctaaagctaccctaagtctcattcggcaaggcggggcgcggaatgttgcgaaagtgcctgggcacgttgggttaaaaaataagctctattaccaaccagtagccgatagcggtgatatcgattctgcttttgagcaacgtattgccgatatggctattgcaaaaaataagatccgttttgtgctgatgacaaattttgttcgttttttagcctgggacacacttacgaaggagcgtctcgatattgagtttgaagagttaccccgcaactacggttttttcttaccgctggtcgggctggagaaggctattctcaatagtgaaaacccggctgatgtgaaagccgctgaaaaaatgggaaaactatttgatcttatcaaggagcgtaatgatttaagcagagcagaagatatccacgcgcttaatgttttcctcactcgtttgttgttttgcttttttgccgaagatactggcatctttgaaaaaggtcagtttacttccgcagttaagagttataccgctgaggatggcagcgatttagatcagttcctaacgtacctctttacggtgatgaatagcaaactggatagtccatcacgacaatcacttcccattcatttaacagcatttccttatgttaatggtggcttattcgccagcgatgagcctgttccagagttggggttgaagggcagacgtatcttacttgaatgcagtgcaatggactggagtgagattaaccctgacattttcggtagcatgttccaggctgtgattgatgtagagcagcgtagtcgattaggccagcattacacctcctacagcaacataatgaatgttatacaaccactatttcttgacccactgcgtacggagctggaaaaacaacgcacaaatacgaatggccttaaacggttacttcttcgtctggggaaaatgaaggtttttgatcctgcctgcggttcaggaaactttttgattgttgcctataaagaactgcgtcttttggagatggatgttatccaagctcttttgcagtgtgacccacagtctatttttatgagcggtattcatctcgaccagttctatggcattgagattgatgattttgcttgtgagatagcacgtttatctctctggcttgccgaacatcagttaaataaacagtgggaagaacacattggttcagcaccaccagcattaccgttgcgttcatcaggtaaaatttggagcggtaacagcctgaaaattgattggcagacagtatgtccaaagaatgttgatgaagaagtttatgtgattggtaacccaccgtttttaggaacaactggacgttcagatgaacaacgtgctgatatgcaggctgtatttagtggttttaaatcattgggttatctagattttgttgcttgttggttttggaaaggggcgcagtacattcagaacagccgtgccgagctggctttggtagctaccaactctctctgccaaggcgagcaggtagcaacgctttggcctgccatattcgggctaggactgagtattcatattgcttaccccacttttacatgggcaaataatgctcgcgataaagcggcggtacatgtagttattgttggtttatcaggtagaagtaaagctcgtcaactatttcaaagaattgatggtcaatggcacaataaacaagtaagcaatattagcccctatttagtagagggaagtaatgttgctgtagtggcgcaaactaaaccgctggtagaaggtgttccaacattgttatttggtaacaaacctactgatggtggtaatttgctgctggaccgaactgagcgtgatgctttgctcgaaaaagaaccaaaagcggcatgttggattaaaaaagttttaggggcagatgaattcctgaatggcaaagaacgttggtgtttgtggttggtcgatgccacacaaaatgactttcagcaaatgcccgaagttcacaaacgtattgaaaaaattcgattgctacgaatcaaagcagggcacccggcagcccttaaaatggctgagaagccacacctatttatgcaggttagccaaccaaaaactggcgattacattctgataccgggagtctcatcagagcgtagaacttacattcccataggcttctatgattccaatgtaatctcaaccaatgcaaactatattcttcccaacgggaccctatacgagtttgctattctaacttcattaatgcataacgactggatgcgacaggtcgcaggacgtttgaaaagcgattatcgttattcggcaaaagtggtttacaacaccttcccgtggcctaagacgaacgatgcgcagcgcaaatctattattgcgctggcaaaaactgtgctattgacgcgtgagaattatcccgaaaacacgctggcggagttatatgatccacttaagatgccaactgatctttttgaggctcatcaggcgttagataaggccgttgatcgtctttaccgtgacaaaccattcagggactccactgagcgtttgagttgcctgttagagcgctacgaagcgctgactaaagaataa

SEQ ID NO: 207454 - DNA, 189 bp, Klebsiella oxytoca
atgatgtggactgtcactataaccgtatacattttcaaccgtatacattttctgtcctcacgacgtggcctgttcaaaggcatccgggctgacgtcatcgagatgactgtgacgctgggcccatttgtacaacgcttcaatataatcgaagatatctgcccgggccagatcccccgtatgtcaccatag

SEQ ID NO: 207455 - DNA, 564 bp, Klebsiella oxytoca
atgaatcaaaaaatcggctatctgagaacattagcggggaaatttaatacggaaaatctgcgcgaaaacctgaaatccgtaggctgtaatttgatcgtcgaagataaagaaaacgaacctcagcccatcagtttatgcctggatcttcttaatcccggagatgtgctgattgtaaccagccttgaaatgttgggacgtaaccttgtcgatgtacttaaggccataacttccatcaccgatcgggatgcatccctgatcagtctcagtgaaagccttgactcatctagtgaatcaggggaaccgctggtcagaatgtgccatttacttatggggtgtcagcaagccttcgttcgagaaaaaaaccagaaaggacttacggccagcagggcaagaggccgtcttggtgggcgaaaaaagaaattgagtcagaaagatatcattcaaatcaaagaattattaagccgtcctgaaagtagtgtgagtgatgttgcaaaaaagtacggcgtttccagaacgacgatctacaaatatgttggggttatcgttccagaacatgcgctttag

SEQ ID NO: 207456 - DNA, 1002 bp, Klebsiella oxytoca
atggcaactgcagaacagtttaaagcgcttttaaagagccacgctgacggtgatgaagcgcgcttttactctattgctctccaggtagcagctaaagaagcacgtcagggtcacagtaaactcgccaatgatattaagcaacttgttgaaaaatcacaaaaaaatgatggaaaaacgagtcatttgacgacagcaaaaacacttcaatttgttcatcagccaaaaagcgaacttcagggcttgctggaactgacgcccagcgatgtgcatgttgaggagctggtgttatcttctgatgtcaaagagcgactggagaaagtcgttactgagcaacgacagtcggataagttaaaacgcttcggattagtgccacggcgtaaactcctctttaccggaccacccggaacaggtaaaacaatgtcagctctcatgctggctactgaacttcgtttgccgctttataccatagtcctggatagccttattacacgttatatgggagaaactgcggcaaaattacgtcttatctttgatcacataagacagacccgggcggtctatctgttcgatgaatttgacgcgattggcacacaacgtggtgcatcaaatgatgtgggcgaaatcagaagggtattgaattcctttttgatatttgtagagcaggattattcagaaagcgtaatcgttgcagcaacaaaccacccggaactacttgaccaggctctttatcgccgtttcgacgatattattcagttcgagagaccacaagaagcacagattgtcatgttgatgaaaaatcgactttccttgttcgatattaaccatcttaactgggaagcaatcacaacggaggctctgggcctgagttctgccgaaattacgcgttcctgtgatgatgctgcaaaagatgccgttatatattttgacggaaaacttgaaacgtcggtgatcgtcaaagccctcgccagaagacataaagggggtggcgcaaaccgggaataa

SEQ ID NO: 207457 - DNA, 2514 bp, Klebsiella oxytoca
atggcaaatgacaggatgcatttgaatgtcaggcagtttgttacgagtgaaagatttaggtcaagaaatacagcaagaagtactcaagtcgctccccgggacagacagactcatggcgaaggactgaggctgcaatatcagggtatattagaccggtatgatggtatagctgccaatcgggaaatacctgtaacagatgacattggtatttatattgaggtcatgggtcaggaacgcatcaagctccccctagaaaagctggataatactgatttcaaactttgccttcttaagacagaggggaaccgtgaagtcgcaaccctgtttatccccgaagccaggcgcggggcctttctacgaaaagtaaatcagtatttggaccctgacaaagaccgctataaagaaagtgaagatacatattaccctgcaaaccatgctttgattgccagtattgctgaagtaaggtttgcacggattcgttctttctggaccgatgaacctggccttttccctgatgatcctcagagacaggtttggtgggagctttggctcaagaaggagcgaaacagcgatcctctcctgattggcagacagttagcagaaagacttgatgctgagctgggaagctcttctctaaatttctttaaatctgttgttctattaatcaaatgttcccttaaccagcttgaacgtgcccctgaactgatagcgaatctcgaagagctcaggagagcaaaagatacaccgttccctattgtatactcttcccctttcgatcaagctcagtgggtcgatgatatttcccaacgtttcgtgcctaataccgatgctaattgcgcggttacaatacttgatactgggatcaattatcatcatcggcttctacagcatgtcaccgctggcagctactcagaatgctggcaccctgagtggccgcattactctattccaggcggcattgaagtccagcatggttctatgcaggcaggtctgattgcctttggcaatctgcttgatgtcagccagagtagctcatctgtacatacgccattcgttatcgaatcagggagaatcattcctcctacaggagtaaatcctccagagctctacggcgatattactgtgagcacagcttacaaacatgaaactgaacggccagagtataaccgggtttttagcctagcgattacttcacctgaaagttctgtcagcgggatgccatcttcttggtctgcagaaatcgatcgttttacatgtggtgttgacgaagatatcagtaggttattcgttatctccgcaggtaacaaccgtgatgtcagacatgactcagattactgggatcaggttgccctttcgcccatcgaagatcctgcgcaatcctggaatgcgcttaccgttggtgcttatacagagttgtctacaattgatgaccccgcttttgatggctggacagcatttgcaatgcctggagatgtttctccatcaagccgatcttctgtgaactggtcatggcgaaaacaggctcctcataaacctgatgtcgttgccgagggtggaaatcatgttatttctcccgacaggactgcggttgataactgctctgatgtatctttgcttaccacatcgggtaaaacggcaggttctgcttttgaaagtcatggggacacaagttctgcatgtgcgctgataaccagagatgcagctcttctgcgcacacaatacccggagctatggcctgagactattcgaggcttgattgttcattcagcagaatggacaccccggatgatgatgcgctttggacagctatgcagtcagcattctccgagtgtggcaaaagattgccttctgcgtactgtaggccacggtgttcctgatattaatcgggcaagatacagcgctgatcacgctctgacattgatagctgaaagcgagctacagccgttcatcaaagagagcaatgcggctgcatcggctgatccaaaaaacaacatgatgaatctgcatcaattgccatggcctgtagctgctttacaattactttcaccggaaactccggtgaaaatgcgagttacgctttcatacttcatcgaacctaatccaggccgtcgagggtatcggtcaagatacagctaccaatctcatgggctgcgatttacgaccatacgtccaggacaaaccttggaaaactttcgatctatggtgaatggattagctataacagacgattatactggtccggagggtgataatgagggatggttccttggcccacaattaagaacaagaggttcagtgcactcagaccggtggaatggttcggtagctgaacttctcgacatgcataccattgctgtattcccggtaagtgggtggtggaagtatcgctcaggtgaagatcgctggcaaaataccgtaaagtactcattgttgattagcattgaagtaccagacgagtctgtaaatatctatactgaagttgagaatatagtcgatatctctgtctctatttaa

SEQ ID NO: 207458 - DNA, 612 bp, Klebsiella oxytoca
atggataaaaatacgggatttacttcgctaattgatacattaaagcaaaacaaagacgtcatagcagacgcttgtgatgcaggccttgaagctgccgaatcaatacctttcgtaggctgggcgttaaaaatatggaatgtaaaaaatacataccaagaaagaaagttgtacagaaatacgaaagcgttttgggaagcctcggttataaaagatcctgaggcgttacgcaccaaatttgccactcaagaagccgctgaagagtttacagacaccttagttcaggtgctaattgactcagagaagccttacaaagcaaccatggtatccaatgtaacgaatgctttggcgttgggcagactaactcacaaagaagctaacgatatgattttaatcatactaaatgcttcagtcccagcattaaagtacttgcctaaattccatcagaggctgcatggtgggagatacattgcaacagccgcactggaggaaatcgatgaagacggggcgcatagcatgctgaactccatggggctaatctatcgattggctgatcaaactgccttatctaaggtgggaagagacattgcccaaatcgcatatcacggtctttga

SEQ ID NO: 207459 - DNA, 630 bp, Klebsiella oxytoca
atgaatcaatcacaattccagaaggcggctggcatcagcgccgggttagctgcgcgctggtttccgcatattacagccgcgatgaaagagtttggcataacagcagctatcgatcaggcgatgttcattgcccaggtagggcatgaaagcacgggatttacccagcttgttgagagcttcaattatagcgtggccgggttgaatagttttgtccgcgccgggcggctgacgcagggtcaggctaattcgctcggccgccgtcagggtgagccctctttgccactggagaggcaaagagcgatcgccaacctggtgtacagcaaacgcatgggtaataacggggcaacagacggctggttttaccgagggcgtgggctcatccagatcaccggcctgaacaattaccgcgactgcgggaatgctctgaagattgatctggttaaacagcctgaattgctggcccaggatgagtatgcggcgcgcagtgctgcttggttttatgcctcacgcggctgtttgcgttatcccggtgaccttgcacgcgtcacgcagattatcaacggcggacagaacggcatagatgaccggcgcgcccgcttcctgaaagcaaaagctgtactggtggtgtga

SEQ ID NO: 207460 - DNA, 234 bp, Klebsiella oxytoca
atgcgcaatgagagtaatgagtactacgatctggttaaacgttctacaggtgaagttgttggcagcatcagggcagcaggccgggttctggtatacacggcaaatggtgttacttctatgcgaccactgcttgaggacgagggagtatttaatctcaacgcaatgaccagttttctgcatcgcctcggctaccgggtaatcccgccttctgataatatgaaatcaacggcctga

SEQ ID NO: 207461 - DNA, 480 bp, Klebsiella oxytoca
atgggacctgaatcatggagcgctatagcgggttgtgcttctgcaattgcagcagtaacaagcttaattattactagtaaggggcttaagttccaaagtgaatcattaaaagaatcgaaacgcagaaacatacaggatttgcttgcttcattagcccagagggctaatgcgagtatcaaggaacgaatggatgcaacatggtcttttgctcagtttgcgaatgttatgctgtcaatagataccgccaataatgttgttgaaaggattgatgaaagcattggcttaagcaaggaagaggctgcaaaatattttattaaattgttagaccatcaaatcattagttcattcagggcaggacaacctccagatggcgcctttaaggagtacaagtctatagacgaggctctagtgatagtgaaactctggaatccgaatgctcatttccttggcttcaaagaagtaaattttataataaattga

SEQ ID NO: 207462 - DNA, 549 bp, Klebsiella oxytoca
atgactgcaattaatatcctagaaagagaacaattgccggtaactactgaattggcagatttgataaacagtaatccgtttgaccagaacatgtatgacaacttgtgtaggtttatgatttatttttccttggctgaatcgaaactggcgcatatgggggagggtattggtggtaccgataagttggccaaagtattgaaagcatataatggaattgataacgatgtaattaatgattcatatgcattttttgtaagacgttatcgggatactcctggctccgaggctcgttttagaaagcttgctccttctgattatgttggtgttcgccaaatgcgtaaatttgaagatttgcttcaactacaggcacctaccatggaagaaaaagtaagttttgtttttaaagtgattttccggttaagacataatctttttcatggagaaaaatggtcgtataaacttgaggggcagaatgaaaatttttcgcattctgtaaacgttctgctatcagcgttaatcctcactcgaggaagattgtggaatccttga

SEQ ID NO: 207463 - DNA, 258 bp, Klebsiella oxytoca
gtggatccttcactggaatatgcctgtaagcgaattctggagctggagcagttgttgctggtggatgttcctgaaaccgtttggcccgccgaggttgcaatggttctgtctcaagtagaaagcgccggggttctccaggcgcaccacaagcaacgattgcagcaccatatcaacagaatgtggctcgaaaaaatgccgataccgtcaattatcgccgcggcccgttcgctggccagcgccatggagaaatacgtatga

SEQ ID NO: 207464 - DNA, 864 bp, Klebsiella oxytoca
atggatggtggcactttacaggatataaagatatctcttagatatgacggaaaggatgctttaaatcatgagatagatctgaattgccttggagaatctcttaaggggttctctaaagtcctatctacagcggcgtcattctctgccacacaaaagtatagcaaatatattaattatcaagaagttaaggtgtatgctcgtgaggcaaaagctaactgttttacccttgatgctgccctaaacttcgtcactcagaatcagttgttctctgggatcgccgcaactatactgggtgcaattctacaatatatttttgcgagaaattccaacaagaaagatgaaatgaaagctttacagcagtctcttgaaaaagccatagaggcgctagggaacaaggacgcaggaaccatcgacaagttgatcgctgtgattgaccgaatggctgtagagttacgcccatctgtaaggcaggctgtatcaccaataggcaatacttgtgacgagatctccattgcaaccaacgttgatggctgcctcctcaaagtaaatgagcatgataaggctgaaattgacaagcttgatgacgatgaggtaatcgggcttcgtgagtaccgcgcatttctaacagaatttgacgcacacaacatgacagcaaaaataattttagaaggcgatgactccaacaggagaatagcttgtgaaataagcgatccttcggcaagcaagaaaaataacccatacatcaacgcccttggttcatacatatccactaaaggcgatccatcttcggtattcactatcaccgcaaaggctactgtcaaaaaaggccagataaacaggctatttattgtggatgcaaaataa

SEQ ID NO: 207465 - DNA, 498 bp, Klebsiella oxytoca
atgactgagcgcggaatgaaattctccaaattcactgagctggtagcacgcatctggtcaaacccaactacgcagcgtcgcgacccggagattactatctccatactctcacctggcagcatcggcgcgtcgcaatccgttgaagtagagtcaattcaggctggattcgactgggacgccgggcaggtgatgatctacccggctcaacctctgaccgctctcacgcctgagcaggtatcggaaatcagcgagagcgttcgcaaaggccagagctggcacgcctatgaggcttacaaaaagcacaaagcccagctggaaaacgcagcgcttgagcatgcgaaggttgcaggccagcgcgatgcgctgcttagcgctcttactcacgcgctggaatggatcgacgcggtgccgtcagaaacagctctgccagctatgcctggcttcgaccgtgacgaggtgaacaacctcatttccagcatcaaaggcggtgctgaatga

SEQ ID NO: 207466 - DNA, 414 bp, Klebsiella oxytoca
atgtcaacctctaagctcagaaagaatattaattttaaatacacagacactcatcaatatattatattagagtgtttaaagtcagaatcagtatcatcactaattttccacacacaaaatggaactaaagaacggataaatggaaccgttgcttcatggcattcaaagagcaattctgataagggcaaatctaaacccaagacattatcttttcctattgataaagaaggagtttatgaaataattggacaacagttaatctctggcctttattgtatttataaaggagcatatggaagattctattacagcccaatagatatttctgaaaaagaagtgttatttgaaaaattaaaagaaggtattagctataaagattcattatcgtcgatggggaaaactaagcttttttaa

SEQ ID NO: 207467 - DNA, 174 bp, Klebsiella oxytoca
atgaagtattgggtggacgtttctaaaggtagtgaatatattatacttagtcaactttctgaaaatgaaacatatttactcgtgaaatttctctctaacttgagctttggtttgagtttaagttggggaacatatgatgaaaaaggaaatatgaagctcgaaggagggtgttag

SEQ ID NO: 207468 - DNA, 612 bp, Klebsiella oxytoca
atgtattcatctaaaccaagtattgtatatggctttcatggaatggataaaacagcgggattatccattcttcttcaggatgaagaattcaaacatagtaataatttatatgattggttaggtggtggtgtttatttttgggaaaataattatgaacgggcaattcaatatgctgaagaagataaaaaaagaaagcattccaaaataaaaacaccatttgttcttggcgcagtgcttgaactaggtcgctgcttcgatcttttagatcaaaaaaatatagatttccttaagttttcctatgacgagttaataatttctttaaaaaaggacaaaaaggaaacccctgttaattctgcatttggtaaaaatgactttgattttaaacggagagaacttgattgcgcagtaattcgacatgcacatgagttggcaaaaaaagaaggaagagtttttgactcagtaagggctgctttcctagaaggagagcctctttatgaaggcgcaaagtttcatgaaaaaaatcatatacaaattgctgttattaaccccaattgcatcaagggaatttttattccaagaaagctttcttttgaagagcctaaccaaagttaa

SEQ ID NO: 207469 - DNA, 168 bp, Klebsiella oxytoca
atggatatggtagaattattaagaagggcgaaagaatcagcaaaacatcgctctgatgaagaaaggcgtcagattttaattgatgcaaagatccttaccaaagaaggtcattataactctcgtttctttacaaaagaaactgttgagaaaagtaaaaaaaacgattga

SEQ ID NO: 207470 - DNA, 1212 bp, Klebsiella oxytoca
gtgaaaaaatacagcgttaattcttttgtttttgaaagtggagaaaggttttgccatgtgatagataaaatatcaggagagcctttatattatccaaacctctatataactacacaagtcaggaacagatcaaagtcgatcaatacgatggaggctattggcggaaatctggcattactatatcgatttttttctctcagaggaatagatatcagagaaagaatagctacgttgcaatttctggatcttaatgaaattgatgatttggctgatttcgcttcgaaaaacttcaaagacaaaagaacaacatttttgcatgagcgtagtgttgttaaagaaccgacaaaatatttcaggttgaccgttattattaattatcttgaatggctgtgtgaagttcacacaatcggaactaagagtaaagataatcaaaaaatgatgcacagttttattgataagctaaaaaataaaagaccatcaaatgaaaacggatataaaaatcaaatccatgagaaaacattaagcagagaacagcttgatattttatttgagatagtcagacctggctctgaacttaatccttttgctgatgaagttcagtcaagaaaccgattgattatattactgcttttttcttttgggatcagggcaggagagttgttaaatcttcgcatcagggatatcgatttttcttcaggaatgattgtaataaaaagacgacccaatgataagtttgatccaagagttaatcaaccacttgtgaagacttgtgagagaatgttttctgtgggcaatactttaatggctgagttattttattatattatgcaggataggcgtcatgtgaataattcaaaaggtaacgattttctctttattacatataaaaaaggatattcacagggaaaaccattgtctttttctgcatatcataaaattattaatatgataagcgagacttcacctgaactggccgaactaacaggacataaattaagacatacatggaattatgagttttcctcactagtagatgggatggatgagattttttcggaggaaaaggaagaacaaatcagatcgtatcttatgggatggaaaacgggttctggaacggcgcaaatttataacagaaggcatttagttgaagaggcgcacaaaacttctcttgccatgcagaaccaactgatggagggatacattaatgaatga

SEQ ID NO: 207471 - DNA, 1362 bp, Klebsiella oxytoca
atgaatgatttaaaatgtcaggaagatagagtgtttttaaaagcaaaacagtctgactattcattttgtatcaatgatggaaagtggagattaaacagaaatagccttgttaatgttgaggcagtatctcttctccttgaatcaaaattaattgatggatatctgaatacgcttgctttttatgcctgccgatatagccccagctatgtatcgaaaataaataatgccatgaatgattttattagtaaggtatcccctgaatatattgatgaatcggttattttaaactacagagcttcacttcctaaatggaaaatgcagaatttagtgagtttgagatgttttttcaccagatggcattctctgggctactatggcattgatgaaaaagtaataacacttctgaaagcaacaaggttaaaagttaaagaagcagggaatatcataagacaggataacccggataaaggggcattgactgataatgagcatgagactctgaatcaggctatatacagtgcttacagaaataaaaaaatagcactgcatgagttttctgcggcattgttagcgagtttttcagggcgaagaccattgcaaatcatgtcattaaaattgaaagatatagtaaaagaaaggacacgcaatggcgaagtgaggtttcttataaatattcccagagttaagcaaggtcttgggttcaggcagtctttcaggtcattgaatattaataaatctatgtttgatatcctcaaccaacaagccagcgcctctgttgcacttattgaatctcaaattggcagggcacttaagccagcagaaaaggatgagattcccgttttccttgacagaacccattgtaagatgctggtcggaagagagaaaatcttagacttactagtttctgacagacttcatgcatcaaaacatactgttgatattatcctgaaaaaaatcattaaaaaagaaaatgtgatttcggaaaaaacggcacagcccatgaaaatgagtgcgcgcaggcttcgttataccattgggacaagactggcccgtgaaggatgtagcgtacaggttattgccgaactgttagatcactcttcaatcgccagtgcaggaatttatattgaaaaccttcccgataatgccgaaaaaattagtcaggcagtttctaagaaactggcctttcttgctgatgtttttcttgggaaagtgcagggggatagagccaatggcaatcatggtttattgacgaaaaaaacatgttcatcctgcgtcgatacttcaacaataccatgtcatagctgtatttatttcagaccattacacaataatgctgataacaaagaggtgatatatgaataa

SEQ ID NO: 207472 - DNA, 279 bp, Klebsiella oxytoca
atgactaaacaacccgaacactacaacctcgaaagcatttatgacgaaaaaatcagcccactgattcgccagattatcgacatttgcaaagagcacaacataccgatggttgcctcattcccctatgaaaacagcgaagagaatggcattggctgctgtactaccaaactgacctttgaaggtaggcacataaaagcatttgcagaggctacgtcaattattcgcggtaaccctcttttctctgcgttcacaattatgtcgggagtaaaggaccaatga

SEQ ID NO: 207473 - DNA, 723 bp, Klebsiella oxytoca
atgaacagcaatttaacagatgagcgaattgacgcacttttagaaaaagtaggcgtgttcaccctggagaagtcacaagacctctgggacgttgaggcggcactgagtgagctacaggaacgccgcaaggccgcaatggaaaagcgacctgtggcgtggcgttggagatggtctgacgacgtggatggctattggcgctatacggaggaagaacgcgagacacgtggaagtgtcactgtacaacagctctatcaccatgcgccgccatcgccggtaactcaatcggagcccgcagggtggcaatttaagtctgtaaatggcgactggattgggcttttgggtgaatcaggtaaagaccaggccattaaggaaggatgcgaggtcaggccgttatacgctgtcccgcagctaacgccgctagtgctcactgatgaacagatcgacgctgtactcgatgctaacggaaatatggcatacgtcattgccgataagcgggagcgcttgcgtatgtttgcgcgtgaaattctccgcgcagctagcacccagcctgagaaccaacagaccagagctctggttatgtggattaagcgtctttcgctggcgcttcgctctgccagcccagataacaaattacccaaagcggcgatcggctatctgcaaaacaacagtctcatcagcatcactgattgccttcgggggaaaaatgaagagcctcctgcgtaa

SEQ ID NO: 207474 - DNA, 1086 bp, Klebsiella oxytoca
atgaaaactcgtatcgcgtcactctcactggtcattaacctggccaacaaaaacgaaatccagctttttcctgctggccactttcgtgcgatggacggtcgcccggaagaatgcccggatggctggtttatcgatgcggatatagcgacggctctgatcgctgcggctgaagagcgcacaaccccttatgtactcgactacgaacatcagacattacgggcaaaaaacaatgggcagccagctccggcttccggttggtttaaaacgctcgaatggcgcgagggtgaaggccttttcgccaccggcgttgactggaccgaagtcgctgcggcctacatcgataaaaaagagtatcgctttatttcccctgtatttctgtacgacaccgatggtcgtgtcagaacgatccttcatgcagccctgaccaatactcccgcactggacgatatggacgaggtcctgctcgctgccgcatcgctcattgcatccactacctacgaggacacaacgatggatgaattactggagcagctccgctggttcctgggcctgccgctttcggcaacgaaagaggatgtgctcgccgagctgcagaagctcatcaacaaaatcaaggcagctgacagcgaagccgctgcgggtcttgcctggattaacgggctggaagccagcgtcgctgcgctgacgtctcaggttgaaacccctgacccggtccgctgggtctccgttgacgttatgaatcaggcgatcgagcaggcccgcgcctccggcgatgagcagattgcgcagctcaccctgcagcagtctaccgaactgattcaggcggcgctgtcggatggtcgcctgctgccggcgcagaaaggctgggcggaggcgctggccaaatccagccctgacaaactccgtgaacatctgagtaaacggcctgtcatcgccgcgctgtcccgcacccagaccggtggtaatcctccggccggcctgccgtcccgcacggttgaagagccggaaagcgagctgaatccggctgtactgagcctgatggggcttgatccgaacgattttaaagagggaaacagcaatgtctga

SEQ ID NO: 207475 - DNA, 399 bp, Klebsiella oxytoca
atgcctgaaattacgattacagcaaagcgcgacggcttccgtcgctgtggtgtggcacaccgtgacgtgccggtgacctgggcagatggcagttttacggacgagcagatcgccatcctgtgtgccgagccgtcgctggttgtccatatcggcgcactcagcggcgatgacgacaagctgaaggccgcactgggtcgtgttgaggagctggaaacggtcgtcctgcagctcaaagatgactcagttggtctgatggctcagctggttgagatgaccgctgaccgcgatcgtctgcaggaggcgctgacggccgcaggcagtgcacccgtctcagaggtaaaggaaaacgctgctgacgatactgctgccgctgagtcttcggcgaaagcgaaaaagtaa

SEQ ID NO: 207476 - DNA, 204 bp, Klebsiella oxytoca
atgcatgccgttgatatgatacttccaccgcgtagctatccgggacgcgttgagcagggcggtttaatccgcgaacagggccagcgcttccgcgaggccattttgtctcgcggcacgggttttgatttaactgcgctttatcgccagtggcgcgagcgcacgcttaagcttgagctgaggctggaaaaccgcggactgggttag

SEQ ID NO: 207477 - DNA, 636 bp, Klebsiella oxytoca
atgacggccggggcagagtcaggggccggtcttacgctaacaggttccggtcctgtcagctggcggcacaaccgtgactatgcaggcattgcagatttagcaggcaacgtttgggagcaggtgacgggagtccgtttctgtggtggtgagctacagattatgacgaataacaatgcggcgatgggctctactgaccattccctgtcgtcaactgcgtggaaggcggtaagcggtgttgatggttcactgttgacgccaaccggtacggggaccgccgggacagattcctgggtgccgactacgaccaactcagtacgaatcgctacaacggggaccggaaattacacactgatttacggcgagaacacattgttcaccagtgccaaaaatcctggcgctacgccggtatcagaagctgcactaatggtgttgcgcagactaatgttgttcccgctggcgggcctggtttccgatgattcgctgtcgtactcaaaaggaggcgaggtgatgacactgcgaggcggtgcatattcgaacggtacaggcggcggtatcaacgcgctactcgctaaccgtggacgtacttcagtaagcgcaactaactctggtgtacgtccggtatattacaagccgtaa

SEQ ID NO: 207478 - DNA, 219 bp, Klebsiella oxytoca
atgatgccgccttcaatcggcatatcaattattctatctcgatggaacttttttaattttaagttacatttagtaacaaataatcttgagctaatattcgcgcgtcttctttcggcgcgcttttcttatctattcttcatttattacaacagatacatccccatccctgattttatttcttttattaatttgctgttttaccagtttattcttttttga

SEQ ID NO: 207479 - DNA, 492 bp, Klebsiella oxytoca
gtgggcaaagtaacggctccggtcccactcggtacgtcacacatcctcgctgagtttcactgtggtgagcctgtactggacgaatggataaagcaccggggactaaaaaatcagtccctgggggcggccagaacgtttgtggtgtgccggggaaatgcttcacaggtgcttgcctactactctctcgcgaccggcagcgtcactcatgccattgcgccgggaagcctgcgaaggaatatgcccgatcctgtacctgtcatcatcctggcccgtcttgctgtcgatacgagttatcacggccagggactgggggctgatttactgcatgatgccgtattacgttgctgtcgggtggctgagaacattggcgtgcgggccgttatggttcatgcactctctgacagtgccagacagttctacatacatcacggatttatcccttcacaaacgcaggatagaaccctttttttacggttgcctctcattacttag

SEQ ID NO: 207480 - DNA, 267 bp, Klebsiella oxytoca
atgaaatctgatgttcagctcaacatccgggcgaaagaagcccagcgggctctgattgatactgccgctgagattctccacaaatcacgcactgattttatactggagatggcctgtcaggcggcggaaaacgtcattcttgaccgccgtatgttcaatctcaatgatgaacagtacgccgagtttatcgacatgctggatgcgccggtcaccgctaacccggcgatggagaaactcctggcgagaaaaccgcagtgggcaaagtaa

SEQ ID NO: 207481 - DNA, 396 bp, Klebsiella oxytoca
atgattgagtctgttcgatatacctggctacttcttaaagatgagcctttgtatgttccacctatattattattgattggtactgtagttatttcctggtattttgttcagataatgttcacaccctggtggggtaaaacactctgcctgatgatggcatttttactttgctattttttaattgttggtgcgattgaacctgaatctacatacaaagatattcagaagaaaaaagaaagcattgtctacacgctgaaaaactgcagggtctccgcttttgaggcacagcaggcgggactgattggtacaacaaaagatgcctggtcctgccctgacggagtaactcgctaccttccagttaaatacagagataaggggcggcagaatcatgagtga

SEQ ID NO: 207482 - DNA, 405 bp, Klebsiella oxytoca
atgactgcttattatcttgatggtagtaatattacctggcttagctatgtgtgcttatttcttttcctcgccgggtttgtcgcggcactggccgtgtttgttatccctgaaaaaattaatctgcgggtccacagaggtaatacatttatcttcagtgtgctgataacagtggttgcgtttatcactatttttgtcttcacttcccggtcattcacgatggatgagctagaagccgggaaacactggaagagtgactgcaagctcctggaggtgaacattccaacaggtacgtttactgatactgtcaacaaactggattgtgcgggtgtcatcattaatgtccctaagattcagtatgacgggtatatccgccagtgggaattgtataaggataaaaataaatga

SEQ ID NO: 207483 - DNA, 381 bp, Klebsiella oxytoca
atgaaaacacatggcctttttaatcagtacagtaaagggaaagtgctatatccgtttatcctggtatttatcatattaagtgcgatgtcgtggctgagcaccggcgcgatgccgatgttaaaatccgttgtgctatttattattatcctggcgactccgctgctgatggccatgctggccatgacacgcggggcgctgatgtttttcctgggcgcgctgggcactcagtttaccgtcgccatgctggtcacgctgtttaccgcgtacagcctgtcagcggctgccggatttggtgccgtttcaattgtcatctacgtcctcatcacggggttcagtgatgaaaagaccgatgccggtaaggaggataaaagtgatagttag

SEQ ID NO: 207484 - DNA, 228 bp, Klebsiella oxytoca
gtgatagttagctttgctaaacatcctgttgtcgatttttctctgaggctggtgctgacgataattattatctcccctgtggtgtatttttcatgggatgccgtcaaagggacatcgggcagtgattatattgagagtgtggtttttatccttatagtcggctttttctggttgatgagtcacctgtttatttctgctttagtagggattttgcaaaaaagaaaataa

SEQ ID NO: 207485 - DNA, 387 bp, Klebsiella oxytoca
atggataacctaatcagtaaaccctcagaagaaagttttaataaagtcagagaacataccgcggatgtcaggaaaagactgagagtttttctttatttgttttttatgtttgtagtcgctgcttttagcttgtggtttatgacggataagttttttgactggctgaccgttgaattgctatccagaggcgtaacggtagagaaaaatataaaagacctctggaatatcttgaaaaattttgttccgtttatatttctttcgctatctgctggctgccttgcggtttatatcttttttggtttgctgaattctttatcgtacgccctggatttcgtgtttttcaaatggacaagaaacaataatggaggtggcaaggatgagaattaa

SEQ ID NO: 207486 - DNA, 627 bp, Klebsiella oxytoca
atgaaatctatttttttgatagtgattcaatatgtgtcatgtatcctggctggatggcacctcccggaaacccttttcatggtaagtgcctctttgatgtggttggttgtttttaactatgtgttgtatcagataggtaaaaccaaaaaacaagcattagtgaagggcggaaacattgtcggcttaatgactgtttctttattctctctatttggtccagtgatgtgtttgtttgctatttttatgtacccattgtatatgttgaatgttcagcttggctttttctcatttaaaaaaattggttcgaatggttatggcattaaacgtagagatggtaaaatgcaaatcttaaaaccatttgatgtgcaaaaaaatacatttgataccaatggctttctcgggaaggagtatccaacctcatttaataataatcggaatgactttagtgtagctccaaatccctatgaaccatcatttgaatcatcagcatctgaacctgggcggtttcatgaaggtgttagtcataatgggtttggtattgatggggtcaatcctgcgaatggcctcccaatgatcgggaatgttgatgtttctggaaatccatatggagttgatcggcatgattag

SEQ ID NO: 207487 - DNA, 591 bp, Klebsiella oxytoca
atgactgaagaaaaacgccctgtactgagtctgaaaagaaagccggcagcggataccgcagcggccgggtccgttgacacgcctggtgtggtacggcgaaaaaaagtggtggtggtcacgacgcctccggcctggaagctgaagaaagaaaagctggcacaggctaaacaggctgctgaagccgccgccagtcagccagcacaggaggctgtgaaagcggtcaggacaccatccccggtacgttatcttcgtttactgccgccggatcaggccatcatgaccctgaaagcgttctggccacaactgtttgacggtgactcgccgcgtctgctggcgacggggatgcgagagcagctgtttgccgatattgcgcagcgggacctgccactctctcataagcaggtaattaagtgcctgaaaagcctgacgcgctcagaatgttatctgtccctgatgcagactggcgccccgcgatataacctcacaggcaacgtagtggcgacggtgacacaggaggaggagcgttacgcaaaaggacggatactgcaggagcgtctgcgctccgggcgtattcagggtcagacgggttaa

SEQ ID NO: 207488 - DNA, 621 bp, Klebsiella oxytoca
atggcaaagatattaatgatgacaggcagtgccgttgttgtgctgagtctgctggggttcctggtgctgtttctgaaggaacgtgcaacagggaagacatccccggtcctacaagcgctgaaagcggcgggtattcgtaccggagaggctgaacagagactgtgccgccagcgggtctgggtgggtaatgactcactgatgacgccgcgggaacagcatttttaccgggcgttgctgaagcacacagaccggaaacgctggctactgtgcccgcaggtgcgagtggcggatatcgtcagcctggcaccccatatcaggcctcgctcccggacctggtggcagctgttcaggatggcgtcacagtggcactgcgatgtggtggtggtggatatcaggacctttgccattgtggccgctgtcgaactggatgatgcctcgcacctgaaaaaacatcgggttcgccgggatattctgctggaagaggtacttcgccaggccgggattccgctgctgcgggatcgggactcagagaaactggtcaggtgcatgagggattttctgaagcaccgtgagggtgacaccgacaagatatcactgaacgtcgtcaggagtgaaagctaa

SEQ ID NO: 207489 - DNA, 576 bp, Klebsiella oxytoca
atgagtattgcgatgagagccccccgtaaaacccctgtcagccggtggtggttgcccggcctgctcagtctggcgctttacacgccagtgacggcagtcagtgccgcgactatcgagaccggcttttccccggaaggaatggccctgcagctggtcctgaagaccattgattctgcacagcaggacatacgactgatgggatatgccttcacgtctccggaagtggccagctccctggtcagagcaaagcgccggggtgtagatgtgaaagtggtgctggactggaaggcgaacgcaggtaagaacaataaagccagccgtgcagcaatgaatctgctggtcaatgccggcattcccgtgcgaacggtcagccagtacaagattatgcatgataaggtgattatcactgacgggcggaatgtggaaacgggctcgttcaactacacccgtgcagcggcgctcagcaactcagaaaacgcactggtcatacgggattatcctgtgttggccaatacatacctacagcactggcagagccgctgggaactgggaaaagactggaacccttcgtactaa

SEQ ID NO: 207490 - DNA, 447 bp, Klebsiella oxytoca
atgttcaaatataaaaggactgtagcaactgtaatttttttaatcattgcatactgcatatggattgcggtcagaccagcgaagataatcagagtcgataaaggtgctgtttttgtagaacatttaccaatgacaacagaaggaaaactaaagtggtggatgaataacaaagaattattacagcaaaaatatcacgtcatcaataagcagtataactttacagttaccatcatgaattttaatggttatgaagaactacctaaaggggtaagggacgggtctatcgatgactatacctgcttcgatgatactaatcaaaagcatgaaaaatgcgtgtataacaatatagcaataattattagaggcaaccttgatggaaaacaatttataaatattgatggcaaaacatatacccagacacaagacggaaaagttgagttaaaatga

SEQ ID NO: 207491 - DNA, 810 bp, Klebsiella oxytoca
atgaacgcaatcgacagtaggctgataatcttctcaacccaaaaaaaattcaatgacagaaatgccgatgatatgcaaagcggcgacattgatgttgaaacattaaaaaggcattaccatctggggcaagtctcaacttttatcgactggacaacttttggtccctcatataaacacccctatctgaattcaataccgccagcaagcaaagaaaaagccattgcaatgctatatgatgagttaagatcgcagtcgtatgttttttcttttcagggaccctatcagggcctaatcaaagatcttttcaatcatatgcaacgaaataatggaagagattatcaaaatccagcaatgaataatgcatacagaaacttaatcctggctgataattccccgaacagcaccagagccataataaaaagagcaatcgagcagtttgattttagcaaatcgaaactgaccaaagaaaatttcaccaatgatctatataaaagtcatttaccaaaatataccagatggaaagactgggttaatggtatgggtattaccgttcatgacgtgaacagtacagagatttcaattgagagtctcgtacttgaaggaaataaatatactgcggttatcaaatacagagcacaggaccattttggattagacagagaagatatactgaaacctaaatttaattcgatttccttttttaggatatggtttgtacttcagcgtgcaaagcatttggctcaaaaaccattcttcactaattttgaagccacaataacactgacaggagaagccaatgttcaaatataa

SEQ ID NO: 207492 - DNA, 1224 bp, Klebsiella oxytoca
atggcatcactcacagtcaggacggttcaggctctcatcaaagcaggagaaccagggaagtttggtgatgggcgaggcctgtatctgaaagtcccacctaaaggtgagccgtattggatgcttcgatacacaatcagctctaagagacgagaaatcaccttaggtaaggtatctcatctatctctgtccgaggttcgtagccttgctgaggatactcgaagaaaagttgccaccgggaatgatcctattgctgagaaaaaactcaatcgccctaagcaactgaccacagtagatggactgtttgaagactggcacaaagacctcgttaaacgattaaaacatcctcacatacctgaacgggtttaccggaaagatattgcccctactataggtagacttgctttggtaaaagttaaccccctcgatgttcggtcgatcctgcaaaaaattacagatagcggaaggccaaccatctcaaatgatgctctgctttacatgaaacaactttttgatcacggcattaaacttggtctggttcaaagcaacccagcgactgctttcaaagtgaatgatgccggaggagttgaaaaaagcagagaaagagcattgagtctggatgagattactcatgtttttaaagtgttcagggaacactctgacagcttctctcgtgataactaccttgcatgtgccctgctactactccttgcagttcgcaaaagtgaactaaccgaggctccttgggcagaattcgatttggatgagaaaaaatggtgcctgccaaaagaaagaagtaagtctggtgttggcatagtcatcccacttcccccgctcgctatcaagattctggaagagctaaagatcagagcatgggattcgccttatgtcttcccaaaccgccgcgtgagcaaatctcagcacatgggtaaagacactctaaacagagcaattgccaagttgtttggagctgaaccaggcaagaagaagcgaccacctaatgtcatgggacacattgattacttcactgtccatgacctgagaagaaccagtagaagcctacttgccttactgtccgttcctccgcatgtggcagaacggtgtctgaaccacaaactcaaaggtgttgaagggatctatgacaggtatgactattttgatgaaagaaaagaagccttacaaagagttgcagagaaaataagtttcattattgagagtcaggtttaa

SEQ ID NO: 207493 - DNA, 1176 bp, Klebsiella oxytoca
atgctcattgcgtacgggatcagcaaaggcgttatgagcagcctggcggataaagccagcccgaaagtctttatggcctgcggcctggtgctgtgcgcgatcgtcaacgtcgggttggggttcagcaccgcattctggatcttcgctgcgctggtcgttctgaacggtctgtttcaggggatgggcgtcggcccctcttttatcaccatcgctaactggttccctcgccgggagcgcggtcgcgtgggggctttctggaacatttcccataacgtcggcggcgggattgtcgccccaatcgtcggcgccgcgtttgcgattctcggtaccgagcactggcagagcgccagctacattgtcccggcctgcgtggcggtggtgttcgccatcagcgtactggcgctgggtaaaggttcgccgcgcgaggaaggcctgcctgcgctggaagagatgatgccggaagaaaaggtcgtgcttaacgctaaacacgcggtaaaagcgccggagaatatgagcgcattccagatcttctgcacctacgttctgcgcaacaaaaacgcctggtatgtctcccttgtggacgtgtttgtctatatggtgcgtttcggcatgatcagctggctgcctatctatctgctgacggtgaaacatttttccaaagagcagatgagcgtcgcgttcctgttctttgaatgggcggcgattccgtcgaccctgctggcgggctggctctccgacaagctgttcaaaggacggcgcatgccgcttgccatgatctgtatggcgctgatttttgtctgcctgatcggctactggaaaagcgaatccctgctgatggtgacggtgttcgcggcgatcgtgggctgcctgatttacgtgccgcagtttctggcctccgtgcagaccatggaaattgttcccagctttgccgtcggctccgccgtgggactgcgcggatttatgagctacatctttggcgcatcgttaggcaccagcctgtttggcgtgatggtggataaaatgggctggcacggcgggttctatctgctgatgggcgggatcgtctgctgcattctgttctgctacctctctcatcgcggcgcgctggagcttgagcaacagcgtaagaacacgcagcagcaagaagccgagctggcgctggccgacgcacaataa

SEQ ID NO: 207494 - DNA, 1218 bp, Klebsiella oxytoca
atgtctgacgtaaacgatattctgaaaaaagtaaccgcctccattgaagaggcgaccagcaaattcaactccaaggctgaggatgctctgaaggaggcgcagaagtccggcaggctttctgaagagacaaaggcttcagtggataagatggcgactgaactgaacgccatgcgcgaagcagaaaagaccctcaaagccgcgctcggcgaactggagcagcacgtagcccagatgccgctgtcaaatgctgcaaaagtggtcgaaaccgtgggccaggtggtgattaactccgaagcattgaaaacctttgcggcgagcgtagaaggtggcaagcgccttagtattccggttaatgcagccctgctttcaacaggtgttgctgatggtgttgttgaaccccagcgtttgccgggcatcgataccacgccaaaacagcgactgtttatccgtgatctgattgctccaggtcgtaccggcgcgcctgcaattttctgggtgcagcaaaccgggtttactaatgcggcaaaagttgtcgcagagggtaccaccaagccgtacagcgacattgagtttgcaaccaaaatcaccccggtcaccaccatcgcgcacatgttcaaggcgtccaaacaaatcctggatgactttgcccagttgcagtcgacggtcgatgcggaaatgcgctacggcctgaagtatgtggaggaacaggaaattctgttcggagacggtaccggcgttcatcttcacggcattgttccacaggcaactgcctttgctgctgcttttgaagtcgagcagcagaacggcattgatgatctgcgtctcgctatgcttcaggcgcaactggcgcgcttcccggcatccggtcacgttctgcactttatcgactgggcgaagattgagcttacaaaggacacgctgggccgctatatcctggcgaacccggcggcgctgaccgggcccaccctgtgggggctgccggtggtggcgaccgaagcgccggcattccagggtaagttcctgaccggtgcattcaacgcggcggcgcagctcttcgaccgtgaagatgccaatgttgtcatttctactgagaacgccgacgacttcgagaagaacatgatctcgatccgctgtgaagagcgactggcattggcagtaaaacggccggaggcatttatttacggctccttcactgtaccggttgctggcggtcagtaa

SEQ ID NO: 207495 - DNA, 429 bp, Klebsiella oxytoca
atggatgtacccattcttggcgccataaccgaaatcagtcccccaattcttaacgttctggagtttaaagccgccgatttcaaaattctgcgtaccgtaataaatcagccccgtaccgcgccagccatattcgtcgccaatccagtagcgtggacccgccccagcaggaatatcagcatagtacgccacatcagcgccgctgagtttagggtaacccgtgccaatcaggcggacattttccgttatttccaggtcgaggcacaggccaaacggatcatccggattgacaataacaccggcagcgcgaaacagattgtcgtgcacgccgtcctgcaatttaatctcaacattgtcgagaatgacccagacattgctgcggtgaataaccgcttcggagatgatgaactgctgtttaacatagtcagatga

SEQ ID NO: 207496 - DNA, 336 bp, Klebsiella oxytoca; identical to SEQ ID NO: 163082

SEQ ID NO: 207497 - DNA, 252 bp, Klebsiella oxytoca
atgagcattgctgaaaagcataataaaagtcttcatcaggtggtcttacgctggctgctacagataatcatactgatcattcctaaatcagtgaaatacgaccgtctacaggcaaatgcggacatttttacattagaactgaccgaccaggaaatgcaggaaattaaaaagctcgataccgggagaagctgtcttttagaccgggatcatcctgacactatccgggcaatgagtcagcacagatataattag

SEQ ID NO: 207498 - DNA, 756 bp, Klebsiella oxytoca
atggttattcatgaacgccgggagaggatactggccaggctgacctctgagggttacctcaacgccagccagctatcagaggaatttaatgtagacagctctacgatccgccgtgaccttatttatcttgaaaaacacgggcacatcatcagaactcatggcggtgtgttaccagtgctgtcgactgaagggcaggatacgccttacagcattcgtaagagtcgccatcattttgaaaaggtcgcgatagcagaatatgcggcctcccttgtgcaggacggtgattcagtaattctggataacggttccaccgtctatgaactcgctgcacttctggccctgaaaaagcatctgacggtgatcactaacgatttgaatatcgccatactgctcagccagtatccggcaattaatctgaacgtgacaggcggcgcggtagccggaaattcttacacgctggtcggtcccgacgccacgcgtaaatttggtgaagtttatgcagactgggcttttatgggtgcagaaggtgtgcacccggagtccggcataaccaacgtcaacgcggtagaaatccctaccaaacttgccattctgaatgccgctaaaacgcgggttatcctggctgactcctccaaaataggctacagagcagtctcgcacgtctgcccgctgagtagcatcgacatgattattaccgatcgaaaaaaatcggagaaagtaattgcagggtttggcgataaactcaggttcgcctga

SEQ ID NO: 207499 - DNA, 1014 bp, Klebsiella oxytoca
atgtctactccctatgaacttgatattgccatgcaacctgaagcagttctggcacaaataaacaaccctctgcccgaagcactgcgccaactgaaactgtccgactatgaccggattgtactgactggaatggggtcctctgattacgcgcttattcccgttgagagagcgcttattgctgcaggcctgccggtgtggcgggtcgatgccggtcgcttgctggatatgccagagctggtcaccgacaacacgctgctgtgggcaacatctcagtcgggtatgagtggtgaaatcgttgcgctcctgaagcagggcaagcgcccaaaaaccctcattggtcttaccaacgatgaaaacagcgagcttggtcagcaggcggacattcttattacgctgaagagcggtgatgaagctacagtcagctccaaaagctatctgaacacgctgattgcctgctacaggacgctcgcactgatgctggggcagagtgaaaaagccgtatgtgattcggttaccagtggacttgataccatcagagatctgataaatcagcgacaagcagtacaaccgttttctgacgcgctcttcagtgcaccccatcagcgcgttgcctatattgcgaccggtgcatatgcttccagcgcactcactggtgctcttattaccaaggaagcttcaaaggtcagtgcagaaggctttatcggcggcgaattccgccatggccctctggaaacctcgggcaacggcatgctggccgtgttaatgggtaagcctggtgacgagacgctggagaagctcgctgcagaaatgcaggctaatggcacaatcgtggtcacaattggcgaagccgcatatgccggatcggcactgcttcctgttcctgaaggcagcgaactgctccagctcatctgcgggtttatttatatcgagcacttcacagtcgaactggcaagccacaacggctttgttgccggtcagttcctttacggacagaagatcacggtggccgtatga

SEQ ID NO: 207500 - DNA, 912 bp, Klebsiella oxytoca
atgacaggtaacatcaaggcaggcatagacattggcggaacgggaacccgaattatcctgcgggatgacaagggaactctggatacgcgcacaattgcgacggcagagtttgccgcaatcgacatacacgatcgtgcgggcgcgttagcgtcccacgtattatctctggttcccgcgggccggaaactggaaagtctggggatcggtgcaagcggtccggtagataccacgctgggcatcatcaataaccgggacacgctggaatgcttttcctttttccctctggtcgatgagctgaaggcgcgattgggggtcagggtaggcatcgacaatgatgccgtcgcggctgttctcggcgaatactactttggagcaggaaaaggcagtaagcgactgctgatggtcactctcgggaccggcatcggtgtagcgcttctggaaaacggtcaacccttccggaccgttgatggccagcatcctgaagccggtcacattcctgtatcaggcaatccggcgacctgttactgcgggctgcggggatgctgggaaacgctggcatccagaacgtggctgcagcagaaccttgagtcgcttctgcctgacatcgcttttgagaaacatgacgttaatttctacaaaacggtggcgctccagagagaggacgtagccagtgttttccaccggtacggaaattatctgggaagaggactggcaacgctgctgacgctttacggaccggaccttaccattctgagtgggagcgcggcacattattacccgctgttcaggcctggactggaggaagctctttgccgtgcagacgcctacgccactaataactggatcgttccttcagagttaggggatgtggccggagctctcggcgcgacaatgattccagaattaacttag

SEQ ID NO: 207501 - DNA, 1389 bp, Klebsiella oxytoca
atggtcaattccgaaataaataatggactaaaacattcagggaagattactaagttcagctttttcattatcatgtccataattatatcgtctgttggcggaattatttttggctatgacaccggtattattggcggcgcgattgtctttatcggtaaagaatttcagataaatgattatatgcagggcgttattgtgagcatgtccttgctgggtgcaatgattggcgcactggcagcagggccgctggccgataaatacggaagaagagttaatctttttatttcgggggtctgttttgccgcaggcgcggtgatttctggtgtgagcgagagtattgaattactcacggcagcccgtattcttcagggcattggcgtgggcgcatcttcagtgctggttcccgtctatattgctgaacttgctccggcaaaaatacgcgggcttctggtgacctcctttcagctcatgattacggtcggtattgtaatagcctatggcgttaataccgcagcggaaagtcagggtgaatggcgctttccggtcggaattgcctgtgtatttggcatcgctctcgcagctggcgtactgtttgttcgtgagtcaccgcgctggctgattgctgtcaaccgttatgctgatgcgcgttccacgctggtgaagctgcgcggcactgatgatgtggatgaagaaatccgggaaactgagcgtttaaacgccctggaagaagataatattaaatggcgcgatctgctcagtggccatgtacgcccgatgattatgattggtgtgctggttgctttcttctcgaacgcctgcggtattaacctggtgatttattttgctccgcagatcctgcagaccagtggattcagttcttctgcctcctggataggtacggttggtcttggcgtcacaaacgtaatattcacgatagtgggaatgctgattgttgaccgcgttggccgccggcctctgcttattatcggcgctatcggcctgaccatcacgctggttattctggcagtgcttttctctgtaccagcctttgaaggaagtggatggattgccctgggggcgctgctggtttatatcgtcctttatgctgttagtcctggcatgctggggttcctgatgatctcagaaatctcgccactgagagcacgggcgaaggtcaccagcctgtccatcttcgtcattttcgcgactaatctggtcatcgcgctattgtccctgcccatgcttaacgggctgggtgcttcgaccacgttctggctgttttcagccatatgcgtagcgttcagcatcttcagtttctatgttcctgaaacgaagggaaaaagccttgaagacgttgaaatgtatttcaaggaaagaacaaaaaaataa

SEQ ID NO: 207502 - DNA, 747 bp, Klebsiella oxytoca
atggctgagaacaattttaagccgtttgctgttggttcaggtgcaaacgtgtcctcacagactgactgggaaaatctggttgcattatctaccgggtttacagccggcattgctcgatctgaccagatcaataaagcactgcgacaggcaacggtaattgcgagcgttctggcgcagtttatcgctgataccaccaattcggatgtgcttgatgacggggatacgactgcgctactcgctaaattaattcaggcgcttagcctgagcggcgatgaccggtttctcaaagttgccagccgtttgtctgagatcggcgccgctggtgccactgcacaagcctccgcgcgtacaaacatcggcctgggggattcagccaccagatctgtgggaactgtgcagggaacggtcgcagcaggtgacgattatcgtattaccggcgcaatgcagaaagacgaaaacctgaacgatttgcctgataaggctgcagctcgaactaatctcggcctgggcgcaatggctaccagagacaaccctccgtttattgatgagatcggagcctgtgcactggcctggtacgacggcgcggtgaattataccgacactgtaaacggtggcgctcttttcccatcaactgccgatggtggtcatgcaaccgtcgcattatccgggacctggcgctgcctggggcagacggaaacaatcaatgaccagcacaaaacgactctttggcagaagattgctaattaa

SEQ ID NO: 207503 - DNA, 492 bp, Klebsiella oxytoca
gtgagtacaccggtgattttgtcgcccgggcaaggcgcttgcgccacggcccggggaaatagcacttcgcccgctcagacttcccccggtcgcgctgcgcttaccggggctacaggttcaccgccgtttgccgttttgtcgcccgggcaaggcgcttgcgccgcggcccggggaaatagcacttcgcccgctcagacttcccccggtcgcgctgcgcttaccggggctacaggttcaccgccgtttgcagttttgtcgcccgggcaaggcgcttgcgccgcggcccggggaaatagcacttcgcctgctcagacttcccccggtcgcgctgcgcttaccggggctacaggttcaccgccgtttgccgttttgtcgcccgggcaaggcgcttgcgccgcggcccggggaaatagcactgcgcccgctcagacttcccccggtcgcgctgcgcttaccggggctacaggttcaccgccgtttgccgttttgtag

SEQ ID NO: 207504 - DNA, 438 bp, Klebsiella oxytoca
atgaccgaaaataatacttttaataagatcgttgtgagtaagcattcccgtaatggaagcgttaacgaagcgaagctctcacacagccagcttcgttctcattgcgtcagtgtcagattaaatgatgaagagctaatgcttctcaatgagagacgtggccgtcatcgtaaaggcgagtggcttcgcttatctttacttaataaacttcctgctgtcgttccagctattaatattgaagcctggaaaacccttggtgagatttcacagaagctgaacaaggttgtcgctcatctggatagcaaaagccagggaagctctctcacgaagacagaactcttcgtagtgaagcgtcaggtctcagagcttcgcttgcatttaattaccgctgatctgtggagagcttcccatgaagggaatgcaaaaaatccgcaggggtaa

SEQ ID NO: 207505 - DNA, 591 bp, Klebsiella oxytoca
atgagatatctcatgatgaagcgcgtaatgttagcaatccttcttccgtttcttgttggatgtttatttggtactaaagcattatcagagtattgggttgtgtggatttttgtttgtgcaatgttgatgattacagcctggggtgcgtggttaaaaaataaaaacagagataccatctttagctacctgaatgataataaagatggcgtatttatctacaaatttcataatcaggagatgcgattagataaagccaaaaaacagctttatttaaaagatgggttaaacgaaaaaacctacgctttctccgatgttgaaagctgggaatataacattagcgcaggtggtcaaatcctcacttcaggtcttaatcctacaaccaacttaattaacaataagattcttggtgaaaacattaatgacacaggattctttatcaaggttaaagacatcagaaaccctgagtggcatattcgattctttcctcaagaaggatcttataaagatcagaagggattaattagcttaaaaaaacagatgatgcagtggatgaccgtttttgacttaaccgtaaacgctgatacaaagtaa

SEQ ID NO: 207506 - DNA, 291 bp, Klebsiella oxytoca
atgaaaaaaatcatgctactattattagcttccatgttgctgacaggctgcaacagtgaaccatctgatgcaaatatttctcaagccatgcagaactttatgagtgggatgcatggtacactgaattcttctaagaaaattgcctgtaaggatgaagagagcgatggcagttatctctgcactgtagagttcgatgcaaaattaccaatcgtaggcgacagtgcatcaacactggaattaaagtttattaaatccgataatacctggaaagcaatggcaccatctaaataa

SEQ ID NO: 207507 - DNA, 414 bp, Klebsiella oxytoca
atgaaaaaaacaaatattaacttaatggaaagatatcttcttctgcttgatcgattcgttgataaactctctgaatctggcttctcagagcaacaaattatcgaacaatcatacctgttttgtgccgggttctacattaaataccagcctgaaatagaaaagctaacgttctcaaacagagaagtagtattgaattttttacttctttcttattattgctatatcaataatattgaaaatgacatgctcgataaagagcgtatgaaaaacgtatgctcttcacttatcaatttcattgtgagcaatggtagtagaaccgaaaaagtctacattaatgagagaaggaaacatgaggcttctaccctaaaaagagaattattgatgaaggataaaaggaaaaaatatggactgtaa

SEQ ID NO: 207508 - DNA, 396 bp, Klebsiella oxytoca
atggcaaaacatttaacaagaaaagatataaatagaattaaaagcaccatccagacatggaatggtaagttaacatgggattcattatgtgaatctgtaaaaccacatattggaaagaaacccactcgacagtcattgagtatgcacaaagatatagtgaatgcatatctattgaaaaaggaaaaattaaaacaggatgaaaatcctcttaaaaaacctgctaacctgagaattgctgcacagaggataaaaaatctggaagcggaaaatgaaattctgaagaagcaaaataccagatataaagaacagtttacactatggcagtacaattcatataaatatggacttaagccacaccagctaaatgaacctttgcgtgcaaaaaacgataactaa

SEQ ID NO: 207509 - DNA, 1296 bp, Klebsiella oxytoca
ttgctcgctatagccgaaattttttcccgacaggatgaagaactcagtgagagagatctgtttacagcctcagcttttgcgctactgatgtgttcaccaagtcgtgcctcagaaatactggccttgcgtgctgactgtgaaattacccgaaatgataaaaacggggtagagcgatatgggctgcgtttttattccgtaaaaggctatggtgctactatcaagtggatacctgacgtaatcgtgcccgttgccagaaaagccattagcagactgcgcagactgtctgaaaacgcacgcacttttgcaggatggtatgaatcctcgccggataaattttatagacactcgctttgccctgaagtaagtgaagataaaccccttgatgttattcaggtttgccacgcgcttggttatccactaaatgataagaagcaatgtattgaaaaactgaagcgcacgagtctcgacgggggcacttcgttcctgaatccaaaagacgggcattacacactgagaacactatggaaaatgataactggattattacctgcggattttccctggtttgatgaagagaaatcagtgaaatacagcaatgcattgtgtcttttgaatctgcatcagtgccatgagctgaaaatgacagttgattacgtattatacaggccaacctatgacttctttacgcaggatatagagaaggcaagaaaaaacagacaggtaatgaaaaatatctttgcgcgttacgactatctggatgattcaggcaaagcgttatatctgcgctctcatcagccaaggcatttgctaaacacacttgctcatctcggtgaattatcagagctagatatcgcaaaatggtcgggtagagtcagtgtgatgcaaaaccgagactacaaccatacttcgcaggaagagatgcttgaaaaagtcgggacactgaagctggggaatcatcgttattgctaccagcccaagcctagtgagattctgcctgtcgggactggagtgtttaatgattcagagagtggggctattcacttaacacctcatggatattgtattcacgattacgtcatccccccttgcaggaaattatctgaaaccgcccattatggatgggtagggcatagcaaaatgagtgaacagcaaagagaacaaagcatcaaaaaaatccgctcactctggcaaatggctaaagatgctgtggatgatgatcattatggtgccgatagatgggtcgctcactacgaaaaagtgttgtccattttagacaaaaagatcccgaaaaattaa

SEQ ID NO: 207510 - DNA, 561 bp, Klebsiella oxytoca
atgtctgtattttctaaggtttttacacctatagattacgtgcgtatcaagcacccagagaaacgcttttttgactggattctgccagtgctaactgcagcagctatcaccgttgtaataagcatattacccaaatctgtatcgatcattggtaaagacagcttggtatctttggtgaatggcatccttcagatactgtcaggtttctatattgcatccatggctgctgttgcaactttcagcaaagaaggtatggatgatgtgatgcaaggtgagcctccgaagcttaagaagcaaaaattaactaggcgtaagtttcttacgtatctttttgggtatcttgcgttcatgagcatagcgctatactttctcggcggggcgctacaattaacgagcaccagtatcaaggaactacatctttcatcgattcctatagtcaaaggtatcttactgttcttctacctaactgctgtttgtaacatcatatatacaactgcattaggaatgttttttatgattgacaagatgcatgatgagaaaaccaaattaataatcaaatag

SEQ ID NO: 207511 - DNA, 936 bp, Klebsiella oxytoca
atgctgttaggggataacgaccgttttttgattaaatgttgtgttaccttaaaaaggtaccctgatgatgccccagatatgccccttatcaactgcatacctgtcttaaaacaacgatttttagcaaatgaagctgtatatgaactgaataaaggacgctcagttattcggttactcgctttgcaggacgatggtgaatacttaaaacttctatttcaatacataaataaggatgcatcggatcctgctttttccaacataaagaccggcgcaacgcgaattgaaaagaagcaaaatgatgagggtatggggtactctgcccatatattaattaagaaaacgccaagtgatcctcatttccctgactgctacgaagccattcttgaagaagttccaggcatcacgcgcgcactcctagcccaagcgttaacagctttcctgcgtgagaataatttttcttttatacgcaaagatggaaaaaaagagctcaagtgtaggccaatttttgagatcgatttcttagctgctacaactctggagcaatcgctttctactggctatctttgtggtctcgttgccactcgtcgttttaaagacaactcattggatgacgacggtacagttatgattgaagaagagacgcttaaactgacaacaaagatccgtcgcggtgaaggagcaatccaagcaatcaaagctgcttatgataagcttcgcggacgtaagttcactacattgagaatttcttacaaagataaaaacaaacgagtagcttcggacatcgttacgatcggcaaagaaatgagtctacgagagctagctacagcacagcttgctcagagagataaagccatcttagcaacgacaattgctgtatgccagacatcacttcatgctgaacttctcggaaaaatgcaagcgtttatggtaaagtaa

SEQ ID NO: 207512 - DNA, 540 bp, Klebsiella oxytoca
atggctaacctgaaaacaaaactcagtgcggccatgttggccctgattgcggcgggcgcatcagcgccaacgctgatggatcagtttctgaacgagaaagagggtaacagcctgacggcttaccgtgatggttctggcatctggacgatttgccgcggtgcaacccgtattgacggtaagccagtcagacagggcatgaagttgacgcaagccaaatgcgaccaggtaaacgcaatcgagcgagacaacgcgctggcttgggttgaccggaatatcaaggcccctctcacggcgccgcaaaaggtcggtatcgccagcttctgcccctacaacatcggacccggaaaatgtttcccgtctacgttctacaaacgaatcaatgctggtgaccgcaaaggcgcgtgtgaagcgatccgttggtggattaaagacggtggccgagattgtcggttaacgaaaggccagaagaatggctgctacggtcaggttgagcgacgggatcaggaaagtgcgctgacatgctgggggatagaccagtga

SEQ ID NO: 207513 - DNA, 486 bp, Klebsiella oxytoca
atgctgggggatagaccagtgagccgcttaaaagccattatcagcgctgttgtgatctgcctgatagtcagcctcggctggctggctagccactaccacgacaacgccaccgagttcaaaaggcagcgcgataaagtgactgagcagctcagcctggcgaaagacactatcgctgacatgcagacccgtcagcgagacgtcgcagcgctcgatgccaaatacacgaaggaattagccgatgcaaaagctgaaaatgatgctctgcagcgcaagcttgataatggtggtcgggtgctcgtcaaaggcaagtgtccagtgtcagcctcaacccaaaccgccggcgccgccagcgtgggcgatgatgccaccgtcgaactctctgcagttgctggacgaaacgttctcggtatccggtccggaatcctcagcgaccaaacagccctgagggcgctgcaggaatacatcaccacgcagtgcctgaggtga

SEQ ID NO: 207514 - DNA, 228 bp, Klebsiella oxytoca
atgaaaatagttgttttttctgataatggagatcatgtcgttgatgcggaagatggaaccttgcactgggatatgatgaattctgatgggatggtttctcaaagtcctgtcgagatgtatgtttatagagagctatcagctcataagtttgcgtacattgctaaattccgagacgtatcatcagccgaaattaatgaagctgttgtaaagcacggatacgacgtatag

SEQ ID NO: 207515 - DNA, 1428 bp, Klebsiella oxytoca
atggcggtggaaaaactgattgtcgaccatatcgatacctggaccacggcgctgcaaacccgctccacagcggggcgcggcagctcgggcaagattgacctgtacggcattaagaagctgcgcgagctgattctggggctggcggtgcgcggcaagttggtaccgcaggatccgaacgacgaaccggcgtctgaattgctcaaacgtattgcggcggaaaaggccgagctggtgaagctggggaaaattaaaaagcccaagccgctgccggagattagcgaggaggagaaaccgtttgagctgccggaggggtgggagtgggtaacactggcgaccataggtgaaatagtcggtggaggtacgccaaagtcagataatccacaatactgggccaaaaatggtattaagtggcttactccggcagacctatatgggctcaaagggaagtacatttcgtctggagcccgtgatatttcacccacaggactgtcaaactcatcagctaggttaatgccaaaagggagtgtacttttctctagccgagcaccaattggatatgtcgcgatagccgatgcagaactatcaacaaaccagggttttaaatcttgtgttccatatatcaaagatagtgcagaatatatatattacttcctaatggcatcagcaaaaaaaatagatgcagaggcaagtggtactacatttaaagaagtatcaggggcaattgtatcgaaaatattatttcctttaccgccattaagtgaacaactaaaaatcgtctcaagggcaaatgaacttatgtccctctgcgaccaactggaacagcacaccctgaccagtctggacgcccatcaacagctggttgaaaccctgttaaccacgctaaccgacagccagaacgccgatgaactggccgaaaactgggcgcgtatcagcgatcatttcgatacgctgttcaccaccgaagccagcattgacgccttaaaacagaccattctgcaactggcggtgatgggtaaactggttcaaagcagtgatgttgtcgagtataaaaagctaaaaacgtttctttcttttggcccaagaaatgggttttctcctgtagaatcaaaaaataatactcggatcaaagtcttaaagcttggtgcaacttcttatggagaactaaatatacaagaatccaagtttgtagatattgacatcgataataacagtcatctgtatattaatgagggtgacattttaattcaaaggggaaactctgcaaattttgttggctgtaatgttttggtaaaagaaaatcacaaaaatatcatttatccagatctaatgatgaaaataagaacaaatgaagatctcttacccgaatatgcttctatttggctatcatcacctttagctagggaaggtgcgaacaagtccctgatatga

SEQ ID NO: 207516 - DNA, 564 bp, Klebsiella oxytoca
atgatcattccttcaaagctgatccgcgccgctctggtgtgcgttgctaaaaatgatgcccgctactacctgtgcggagtccatatcaccccgaaatacatcgagggaaccaacggtcatgtagcactgcgtatgcagcatggaatcaggacgaagaaaaatatcatcgtccagtttgaaggctgcgtgccagtcaaggcggaaacaacggagctgatcttcaataaggagccgatcgcaattcatcgtgaccagcacctaaatcgcctgtccattactggcattaagctactgagtggatgcttccctgacttggagcgcgtcatccctaaaacacgggactttagcgttagcccagctatccaggcggaatacctgagctatccggcaaagatttttggacgtgaagaaaagtttgtccctgttcagcttcgtccatcaggtgagttcgacgcagtacggttccaatttaatgagcatatcaaccgcatgtacggaaaccccgagctggtcgttatgccttgccgtgataattattttaagagggagaatcatcaaccatga

SEQ ID NO: 207517 - DNA, 159 bp, Klebsiella oxytoca
atgaaaatcgaatttaaagatcaaggatcggtttcagttattacggtaaccagcactgtctttgagttccgccggcacaaccgggcggttgatgtggcgttgcttctcacgactgaaatgaccagccagagaagtaatgccagtcagttaagcaactga

SEQ ID NO: 207518 - DNA, 2658 bp, Klebsiella oxytoca
gtgacagaacaaacctcccgcctggccattattattgacagctctggggcagaaaagcaggctgacaatctcgcaactgcacttgtaaaaatgacgcaggcaggtgaacgtgctgccaccagtgcagggaaagtgacaaaggccactgatgaagaaaaacagtccctttctgaacttttagatcgtatcgaccccgtaaacgccgcgctgaacaaactggataaacagcagcaggatcttgcgaaattcaaatccaaggggatggtagataccgatacattcgatctttattcaaagaaaatcgaggaaacacgaaacaggctaacaggatttcgcgacgaccttggtaaaaccggccaatccgccgcccagactgcctatgccatgcgcatgatcccggctcagatgacagatattgttgtcggcttatccaccggtcagtctccgtttatggtgctgatgcagcagggcgggcagttgaaagatatgttcgggggtattattcctgcaattaaaggtgtatccacctacgtcatggggttggtaaatccatttacagtagctgcgggggcagttggtcttctcacttatgctgtttatcaaaatcggctggacattgaagcggcaacaaaaattgctacagagtcgcttggcactaacggtgatgctgccgagcgtcttgcacttaatatggttgcgatatccgataagacggggctggcgatcgaagacgtcggcaatatgtttatcactacgaatgacggtgccagcgaggcagtaaataaattaattgatgtggggtttagttacgatgaagcacgacaaaaagtctcacaatataaagattcggctaattttacggctctgaatgcagatattgatatgcatcgtcgagagatcctgaaaataggcgactcatggacggctgcggctataaaggtcaaaaattattacacagcagcggacaagggtaagcagaatgttgcccttggtggtgcaatagaccccacaatgagatttatcggccaggctatcgacctgcaatcaacgatgaatgttttgaccattcagggtaataaagctgttgcagagtctgttgactggattaataaggagtatctggcggcagacagagttgccggtgcagaagctcggttaaaggaggcaagagagcagtccagaaaaattgctttctcaggaaataaagaagccatcgaacaggcaaatgcgctaattgctgtacgagaaaaggaacttgagcaggctaaaaaggctggacagcctaagacccacaaaggaaaagcatataccgaggacgcggcaacccggctgcttgatcaaataaaccagcagacagctgccttgcagtcccagctggatgccagtgacaagcttaacagcgcaacccaggcgcgggtaaagttcgaacagcaaattgctgacctcaagtctaaaacgcagctcacagccgaccagaagtcgattctttcccgttcagatgaaatcctccaggcgtataagcagcaggaggcactgcaaaactccgtaaaaaccctggatgattaccggaaaatgcaggaacaggtaaagacgaaggatgagcggaccaacgatctgcttaaaacccgtcttgaactgctggagaaagccaaagcaaccgggcaactaaaacccggtgaatatgaaaaaacacgggcagatatttatcaaaacaccgatatgcaactgccctcgacggttcgtaatgttgtaggaaacctgacacccacaggagggcgactctctggaacttttgaggggatgcaggggcaaatcaatgaatatgaccaggcgcagcaggagctccagcgctggctggcagctcaggaggaagcttatgcgaaggccggcgaaataactgccgagggtgaggccagaatgacgtcgattcgtcagcgtgcagcggatgcaaatcaggtcatcgaggctcagaaaaacaccatcatatctgcggccacgcagtccttgtttgacagtaccgccgacatcatgcgaacggggtttggtgagcaatcggcaatctacaaggttgcttttgctgcgagcaaggcattcgctatcgcggactcaatggtgaaaatccagcaggctatagcaagcggtgcagttagcgcgccttatccggccaacatcatcgctatggcctcaatcgctgcgcagaccgccagtatcgtctcaagtatccaggctgtttcaggtgtaggcttcgcctccggcggttacaccggccccggtggtaagtatcagcccgcgggtattgttcacaaaggtgagtacgtcttcgaccaggagtcaacgaaccggatcggcgtgtctcagcttgaggcacttcgaaatggccaaccacttgatgcaactctggggcgtacagggtttggtactggtgtccagaacgttaacagcgacaacagcagcaagaccaccatccatgctcctattgagcagcatttccatacgccgcccggtgtgacacctgatcagatggctctctccatggctcaaacgcagaagcgggcgacaacggaagccctggatcaggttgctgcgcaattgttgagaggagatgggaaagttggtaaggcaatgcgcagtaaatatccaggcagagggttagagtga

SEQ ID NO: 207519 - DNA, 1422 bp, Klebsiella oxytoca
ttgtataacgttgtgttctatgatgccgccaaagctctgattgcatatcgtcctgtattctccagttcgggttacgttattattcctgaaaacgccgcgtactgggcgcagcagataatcaccgacagaacgccggactggtctgctgtctcgattgtttattacaactatgtttacaaggacgagctgcataagttgctgtcgtcagagcgcgagcgcctcggactggactatcccaacgaatattatttacaggatttcagcggcgataccgatatcgagtggattcagaacgcgatggactgggtgcacgatgctggtggcggctggttaatattgtcatcggattacgtaaaacagcagttcatcatctccgaagcggttattcaccgcagcaatgtctgggtcgttctcgacaatgtggagattaaactgcaggacggcgtgcatgacaatctgtttcgtgcggcaggggttattatcaatcctgacgacccctttggtctgtgcctggacctggaaatcacggataacatccgtctgattggcacaggttacccgaaactaagcggtgctgacgtggcatactatgctgatattccagcaggggctggtccacgctactggattggcgacgaatatggctggcgcgggacggggttgatttattatggagcgcaaaattttgaaattggcggctttaaactccagaacgttaagaattggggaactgatttcggttatggcgccaagaatgggtacatccatgatatagacctttggcaaccgaacaagaatggagacggaattcatttcaccaacggtgccagccacatgcgtgtccgccagattttcggctatgcacgcgacgactgtctagccatggttaatagtgatgactcccttgtttacggccctgataagaccccgacggaaggttcgattcgtcagtggatctacccgacttgtcctttctggtacggatgggccggaaatgaagctgtgggaaccagtaacgatattcacgacattactgccacgaatatcggattaaccggtaatgaacaggtcagcaccattctgaccacgcagtttaaaatctacaacgtgacgataagcggcatcagtagcgttaactacatgacacccggtcgtggctgggatgaggttaatgcgatactgaaatcgtatgccgggttcggggatgcttcccgctatcaggcaggcaatgtcagcaacatccgcatcaataacatcatcgagtgtgcatcaaaaaattacagtatcgatataacactggaagggcgagatatccgcgtcaatcgttatatgaaactggacacccgtgcgaaaacaaagggcgctctaaatatcagcagctcggcggccccgtacgtcacaacctctaatattgtggaataa

SEQ ID NO: 207520 - DNA, 507 bp, Klebsiella oxytoca
atgctcgttctcgagaacaactgtgcggagaatctgatctcggcaaaccatttcttgcgcgatcgtgaaccctggccgccgatgcaggcctatgacaacggcctggatgatgcctatggcttgctgcatataaacggcagtaataattcggttattgctaatcatatttccgaaacgattgatgtccagtatctcaagccgcagggaataaaaccggtcatcatccgccttgtttccggcaaagggaattatattgcgaataaccatatcgtggcgaccacggagacgtcagcggcgcaggcgcagccctccgaagaggatgcctgctttgcggcgcaggtcagcgctttgctgacgacggccaggttaaaagaactcgatgcggtcgccgtgcaggtagaaaaagaatccgcgcaaaacacgatacttgatagcggcagtgacgcacaggtggtcatagaccgagcgcgtaatgccttcagggcgacaccggttgctggaaattaa

SEQ ID NO: 207521 - DNA, 813 bp, Klebsiella oxytoca
atgtttctaatgaaaagttgcgaaaaagaattcaatataaaaactctgggctcgatacggattggcactttgtatggttttaggattttagagaatgatgaggtaagagatatacttgaaggacaatatgattacaagataagcataaaaaattccgtaatacctattgaagtgtttggttatttatacaaaggtttcttttcattagaagactttgattatccgtacaatacactttctatccgcccaaacattcgctcagctgaaggtttaattattggtggtaaatttcaaatatttaaccatgatgcaagggtaaccaactcacaagtaattctaaccagtctgcatcataattgttttgtgttttgtatgtcattgtcatcagacatacctcttaaaccaaaattcaagggttatgatgatttttggttctttagcttagatagaagaaaattgttttcagatataatcaaagagaagatcagagactgcatcttaacaaaccctgaagaatatggcgtaattattgaaaatgacaaccaattggagattagagcatcacatgaccccatcaaatataggagaaaaaatattaatttaaacacttccaatgttagcacgttaatagcagcaataaaggaattggataaaatcgcctttaccaaacctctaaaatacaaagatgacaatgaatatagattctgctttgaagtctttgttaatggaacgccaatatcaataacaaagccatatatcgacataaaaatggatgtcgaaacgacaaggaggatttttcaaaaagaagaataa

SEQ ID NO: 207522 - DNA, 282 bp, Klebsiella oxytoca
atgactccaggccgtggctgggatgaagttaatgcaatcctgaaatcgtatgccgggtttggtgatgcttcccgctataaggcaggtaatgtcagcaatatcagtattaataacatcattgagtgtgcatcaaaaaattacagtatcgatataacactggaggggcggaatatccgcgtcaatcgttatatgaaactggatacccgtgcgaaaacaaaaggcgctttgaacatcagcagctcagcggccccgtacgtcacaacctctaatattgtggaataa

SEQ ID NO: 207523 - DNA, 282 bp, Klebsiella oxytoca
atgctccagcacaaaatcagggaggcgttctgcgcctctatctctcgcaacccgaaagggtatcagtacctacgcaccagtgactttgtcaactctctgcgccggcgcggcatccacttgtcagaggtggaagctaactcctggacagcgcgggaacaaacgtatttcgtcgataagacgcctgaccatagcgaaaacaggctgtggatgatggcagggatggggaggggctctgatggtgctagtcagggttgttggagactccaatccatagttttatga

SEQ ID NO: 207524 - DNA, 546 bp, Klebsiella oxytoca
atggatattattgctcaaaaaaagaaaaatgtgttggccgttggtcgcttgacatatcaaaaaaattttgaagctttgataaaaatttgggcaaccttacctgaacctatacgtagtggttgggaattacatattgctggtgatggcgaaaataaaaatacgcttagaaagcttgtttcagaattaaatgtaacttcatcagttaagttattgggtaatgtttcaactattaaaactgagtatttaactgcatcagtactatgcatgacatcgcggtatgaaggtctacccatggtattaattgaggcaaaagattttgctataccagtaatctccttcgattgtcctactggcccagcagaaattattacagatgatggtttcttgataacaaatgatgattgttatgctttcgaagaaaaacttcgtctacttttaactaatagtcagttacgagagaagttaggacataacgccttcaccaacagatctacctatggagcgcaaaaaattttatccgaatggagcacactaattaactcatga

SEQ ID NO: 207525 - DNA, 2484 bp, Klebsiella oxytoca
atgagcaataatttttctgttggtgtgatgattggcggtattgtcgggagcagcttccgttccgccgtcagcggtacacggcgggcgctggattctctcggcgacacatcgcgccgactgacggagcagcaaagcagcctgtcacgcgccatgcagcgttacggtcaggtgggttctggcgtagcctcacgtctgaacaatgacctgcaacgggtcagcagaacgctggagcaactcaaccgccagcagtcccgcctgtcggcagcgtctgccacaaccgatgccctgagagccaaccggatggcgctttatggtcaggggattgagacgtgggcgcaggccaaagccgcttacagcctcgtttccccggcgattcagcagtcagcctcgttcgacgacaagatgattgatatgtcaatcacggcgaaatatgacgataaaacccgcgccagtctggggcagcaaatccgtgactggtcgctaaaatacaaccagtaccagagcgacttacaggacgctgtagggtcgcttatcagtgacaatatcgacagcgtgtccgaaattggcagctttatgcccaatatagcccgcgctgccactgccacccgtaccacggggacggaatgggcgaaggtcgccgccgtctggaaaaactcgctggatggcagcgctaaagatttcgccaaagtgcaaaacatcatggcctttgctggcgaccaggggtcttttgaaatccccgatcaggtcaaatggatgccgtcacttgcacctatgatgcgtggtatcgccgaaggtaaagaggctatggcggaaatcggagccagcttacaggttgcccggattggtgccgggtcgtctgacgaagctgccaacaacctccgaaacttcctcaccaagatttttgcccgcgacacgcagaagcaatttgctgatatcgggattgacctccagagttcgctgatggcgtataagtctgcgggcgtctcgcccattgagggcatggtaaacatcatcggcaggtatctggaagccaaaagcccggaagcgctggcaggcttcaagaaggcgatgaaaatcaaggacgacaactcccgtgaccttgcgctacaggaactggcgaagaatttcggtctgggtgagatgttcgctgatatgcaggtcatggcgtttgtccgcccaatgctcgccaacatggacaagtaccgcgaaatcagggctggcgcacttaaagcggcggataaagacctgctggcctcctcctatacagagcggcttaaatcgccactggaggcgactaaagcgctgatggtcagcacccgcgaactgtccattaccctcgggagtcagctatccccctcattcgtgtcaatgacacagcaactgattccggtgattcattccaccgggcaatggatagcgcagcaccccggcattgttcagggtgtggcaaaaaccgtgggcgcattgctggggctgaaaatcgccacggtcgggctgaaactcggcctgaatctgctggtatcaccattcgccgggttgtggaaaaacgccgtactgctgcgcactaactggctgttactcaaaacagccctgagtgatggtggtaagctgcgctggctggcaaccggattcagtaccgtagcgaaaggagccgggacgctgggtaaagtgctggcgggcggtctgttcaggggcgtaatggtcgtcgcaaaagcgtttctctggtttggtcgggcgctgctgatgaatcccataggcattgcgataaccgtcattgccggaggcgcataccttatttaccgcaactggggcgcgataagccgttggttctcacagagatgggaggaagtcaaagcggcctttaacggtggggttctcggtgtcagtaagctaatcctcaactggtcgccgctggggctgttctacaaggcgtttgcgggagtcatgaagtggtttaacatcgaccttcccggccagtttacggagtttggcggtcatctgattgatggactggtgaacggtatcaaaaacaagtgggagtcgctcaagaataccgtcaccgagatgggcgacagcgttggcggctggttcaaggaaaagctggggattcactcgccaagccgtgtatttatgggcttcgggtcgaatatcgcagaaggggcggcgattggcattggtcagtctgcatcactggcgctgaaagcctcctcgcggctggctgatatgatggtgccggatgtaccgaaagtaccccccgtattagagcgctatatgcgcggcgaccttaccttaccgagaggccgggactctcattcaccagcaggcgcaggcggcgggattaacgtcattaacaatatctatattgatggcaagaacaagtcaccagcaccggatgtggctaatgcgcttaagctgtctattcctgagattgaaagagcactggaagctatccttgcccgtaaacgccgggttgcttacgactga

SEQ ID NO: 207526 - DNA, 594 bp, Klebsiella oxytoca
atgaaacctgttatttccctcattgaagcactgaacgccgttaaaaataaccttgcctccctgaatgagcagaaagaaaagctctctcgtcgcattggtgagattaacggtgaaataaccgcattacaggatatgccgttatcgcttaatgattactgttcctttattcctgaatatattgagagatttgggcaggaagaataccagtcgtttaagcgtgctctttgcaacagttccgtcagtgaagggaacgccgaacgctggggcaatctggagagtgagaacggcgatatttccggcctgttccgtctggcggggctgggcgggaacgtctccccggctgataccgggatggcagttatgcgcaagctctgctttttcttcccggatgtggtcgccacccgcctgaccgaaacgctcaaaaaggataaaagcgtggcgtggggcaatgacaaacttccgtcactggcagagcgccgtaagaccgtggcggcgctggtcagcgaacgcacggagcttgaaagcgcactggataccgtcagcgaggaaattgccgggattaccggaatcagcggcctgtccctgaccgaatga

SEQ ID NO: 207527 - DNA, 615 bp, Klebsiella oxytoca
atgacagatatcaatattggtaactggagaacagttgagatattccgggcgggaacacatatcgcgatggagggacaggaaatcagtttttccgacgaggatatcgacaacatggcagcagcctataacggctatcatcgcgcgggttatggtgcgccgctgtgtctggggcatccggccagtaacagtcccgcctatggtgaaaccaccggactgataagtaaaaacggcagacttttcgcgctggttaagcctgataacaggttgctggatatggttcagtcaggtctatataaaaaagtgtctgccgctttctacaggccgggagaagcgcgtaacccggccggaactggtgcctggtatcttcgccatattggttttctcggcgcacaaccgccagccgtaaaggggcttgagcaggtggagtttatggaaagcgcttacccggtttgttttggtcacaatgaatcacacgtttatttctcagagttcgacggcatagccgacagtcagagggcagcgcagcaccttttaataaaggatgtaagcgaagcctgcaacgtctcctattccgaagcgctcaccctcaccacaccttttatctggagttattaa

SEQ ID NO: 207528 - DNA, 528 bp, Klebsiella oxytoca
atgattacaagagagggattgtacgcaacatctgacactctgggggaaatgggggatgcgattgaagattttctgactgatgcgggctattcacaacttcaggcaagtagtgcagcaaataaaattgttttgcatatatctgataatcttggtggttgccagaattacatgccaatagaatgtgaagacgcccctaaagcaacatcttttctgcatgagcttacaggtgtgatagcgcaggctttgcttacaatacattgcttttcggctcaggccgaaatcatttccccggaaattacagaacaccttagaagggtctttaaaggtaacaatttctatatacctaatggcgcggccagaaactctttcgacagaaatgcgcaaatactttctgatttttatcagggagtatctcatcgcgaattatcaaaaaagtacggtcattctgttcagtggatttataagattattgccgatgaacgtaagaaagaaaaagagcagcgtgtaatacaacaaggtcaaatctaa

SEQ ID NO: 207529 - DNA, 291 bp, Klebsiella oxytoca
atgaaacaggctgaaactcaaaatactttccgtgcgatgccgtcattttcgcaaggtgcctctgatgatattatgtttttaaagactgatgctaatcaggagttaatttacgattctgccacttaccgacttgatgcagttcgtaagctacttgattttgcgtcaacattaggtacggacaaatcatgtgcatcctctgatgtttcgatggttacagatgctgctggcatactggttactgacgctatggcgctgcttgatggattgaggaaaggcagacaacctcaataa

SEQ ID NO: 207530 - DNA, 732 bp, Klebsiella oxytoca
atggatacaatcaagtttaaccattcagacgcaacaaaccaagctgacgcgatcagtttactgttggctaagagcgacgatgctcaggctgaggctatggatctgattcgtgccggggttcagttgcatttcatcaaagacagtacacctcatggagaatttatggggcgactcactgagttaggaatagcacaccgccccgctattaatgccatgcgtattgccctcaaattcggcataaccaatacgccacgtgcagcaatcgctaaaacaggtatcggtaaaacgaagttaactttgcttacccgtctggatgaagtagcactggatcttcttgccagtggcggggcatataaagaccacacgtttgatgatattcttcacatgagcgccagagagttacagcgggttatctattctggtgataatagttcacaggaaagacagttggtcgataaaccgaatataactcctctgccagttgataataaatcccccgaagataacgaaccagcacagcctgtagaaaattgggaaggtaaaaaacaatattgccgggaattattcagagtggcgttgcgttattctggtgaaactgaactggatatactgaccaagtccattgaagaactgattgcctgttcactggcagataaatactgtcccggactgaatgcagccagttatgaagtttataataagtttatgattaaccggagggctgcgaaatga

SEQ ID NO: 207531 - DNA, 345 bp, Klebsiella oxytoca
atggcacgacctcagacggttaatcagttacccgactctatcaagaagaaactgaataaaaagttgaccgaaagttcattcagcggttacgttcaacttactgagtggttaaactcgctgggatacccggtttcaaaatcatcagtgcatcgctatgctgaacgtcgccgcctgtcacttattgcagggagcgatacacccggcgcaacagctaatattgtggatacgaaacttcgctgtctggagattgcctcgctctgtttgaaaacggacgaaaagctgccagcagatgaagtaacaaaatatgctgagattttgatggggtggctttacgaccagaaataa

SEQ ID NO: 207532 - DNA, 789 bp, Klebsiella oxytoca
atggtaaccgcgaacgccacttctcaggcggcatcgaccggcgcggcggtgtcgataagccatctgcatcatgcttttatcctcggcaaacggacggtgccggtgctggagaatatcagcctgcagctgcggcccggagaaagcgtcgcgctgctcggcccttcaggctgcggtaaatccactctgctgcggctgctggctggcctggagccgcagcaggccgggcaaattcagattgatgaggcggcgatgggcgggccggggcccgagcggatactggtgtttcaggacccgaccctttatccgtggctggcggtgcggcaaaatgtgctgctggggccgcaggcgcaggggaaaaaggggcttgagccaaaggccgacgcgctgattgcgcgaatgggtctgcaggcgtttagtgaggcgttgccgcgccagctttccggcgggatggcgcagcgtgcggcgctggcgcgcgcgctgctgaatgaaccgcgtctgctgctgctcgacgaaccgttgggcaagctggattcgcttacccgcatcagcatgcagcgggagctgatcgccctgtggcagcagcagggctataccagcctgctggtcactcacgatatcgaagaggcgctgctactgtgcgatcgggtgttaatcatgtcgccgcggccggggcggattatcgccgagtttgcgctgccgctggcgtatcctcgccatcgcgacaatccgctgctgctgcagcatcgtcaggatattctgcgtattcttggccagggagaggattggtaa

SEQ ID NO: 207533 - DNA, 135 bp, Klebsiella oxytoca
atggcaaccttaacgtggggccacgcggtccagtttgttaatcagccggaagcggcggttcaggtattaagcgggcaaaagctcaacgcggtggccggcgggcgccacccgggttggggacctgaaatgtgttga

SEQ ID NO: 207534 - DNA, 330 bp, Klebsiella oxytoca; identical to SEQ ID NO: 15599

SEQ ID NO: 207535 - DNA, 231 bp, Klebsiella oxytoca; identical to SEQ ID NO: 15595

SEQ ID NO: 207536 - DNA, 480 bp, Klebsiella oxytoca; identical to SEQ ID NO: 15594

SEQ ID NO: 207537 - DNA, 909 bp, Klebsiella oxytoca
atgggacgcacaaaatcacaaccagttgaactaatggaagatgcaccgctgagtgatggcctcaacgttaatcttaatgccatgaccgaacatcgcctcgaaatcatgcagcagtttggtgatgggctgccgtatgaacgtgatcgtattgtccatgaaacacgcttttacatggcgcagagtgctgaggcaatgctggaggcaggtaagcgactggtaattctcaaagaaaatgaaccgcatggtgacttcactgagatcgtaactgggcaacttggattacccaaaagtacagcgcaccgaatgatgcaagcgtcgttgaagtatttaacaccatcacttgaatcaaaagtcccgacgttgggacatttgggtaaatcgaagctgtttgagttaatgacagaagatgatgagtctcttacagagctggctgatggtggcactgtagcaggtttaacgctggatgaggtagatcgcatgagctgtcgggaattacgtcaggctcttcgcgaagcccgcgaaaccaacgcagcacaacagcgcgtactggccgacaaaaacgaaaaaatcgactcactttccacaaaactggagaagaaatcccgtatccagccgcctaagcctgacgaagaggtgaagaagatgcgggcagaagtgacggcgttagcggttgaggcggaatctgccatcgcggttcgactgtccagcgcctttgagaccctgtgcgcatactgcgctgaaaacatgattgatacccccagagactttatggccggtctggtctgccagctggaaagcaccgcgcgtggcctgcgctcaacatttgacctaccggacgaaccgactggcaacgccgccccttcatggctgactgacccgacgccagagattaacgggcaggaggcataa

SEQ ID NO: 207538 - DNA, 654 bp, Klebsiella oxytoca
gtgtggactagcctgctaaaaaatctgccgtggcgcagtctgctgctggcagtggtcataaatgcttttctgattggactttattacctgggctacaaaagcgggcatgaaaacgctacgcgtgacggcgataaggcggtcagtgagttgcagtcagcattcgacacatacaaaacggagcaggcaactcttgagaacgctgcgctgcgggcctgggcaaaacgatatcaggagcaggttgctgccgggcatcaggccgaagccagttaccttgagcagattgctcagcttgagagccagaacaaactactacaggggcaaattaacgatgtcacacagcgctggattgatgaaaaaggcaagagccatcccattgagtgcgtgtttactcgcggcttcgtgcgccagtacaacgccgcgctcggatatgacaacgcatccgtcaacaccggtcattcagacacaactgccgccgctggcaccggcactcgcgcagcgtccgggcaacctgaagccgctgacgcctggctacgcgactcaggcgtctcccagcgtgacgtcctcgccaacatcatcgacaacgcgaagcagtgccgcatctggcgcggccagataaacgggctgctggacgaacgggaaggattacagaaatga

SEQ ID NO: 207539 - DNA, 357 bp, Klebsiella oxytoca
atgggtacaactcaacaggtcattctggccaccactgtcgtcgcacttgcggccctctctcagcagcgttttgtgggggccgataacgccccctgcaaggccggagccgtggcgctcggtgtggccgaggtggatgccgctgccggtgatgtagcgccggtcaacgtactgggtattgttgccgttgaggccggtgccgcgattgctaaggggcagaacgtccagtcggatgcaaacgcctgcgccgttccccagacagccgccacggaagatacccctgcgggcatatctgccgggattgcgctggatgaggcgctggccgaaggtgacgttatccgtatcctgcgcggggtgtga

SEQ ID NO: 207540 - DNA, 498 bp, Klebsiella oxytoca
atgaggcgctggccgaaggtgacgttatccgtatcctgcgcggggtgtgatatgtactgcaccctcgcggatttgcttgaacaggttcctgagcggacgctaatccagctcaccaatgaggagctggacttcgactcgcccgcgacggtgaaaactgaggtggtggacagctgtattcgctatgccgatgaactgattgatgcccatctgcgcggacgctataccctgccgctggcggagataccgaccgttctgcgggacattgccatcacgctggtgcgttaccggctctacacccgccgcccggaaggggctgtcccggataccgtgaaggatgaccacaaagaggcccggcgacagctggaggggttgcgtgacaacaagctgacgctggggctgcagtccactcaaaaagacgtgcctgagtccggtgaaatccgggcgcgggcacgtcgccctacctttggcgggcgcgatggcttactggagaaatactga

SEQ ID NO: 207541 - DNA, 294 bp, Klebsiella oxytoca
atggtggtacccaaagttgagcgcaaaacgatagacgacctggtagcgtcgctgaattatcagacccaccactttccgggcaccacgctgaccattgctgttgcactgatgccggatggctttatggtcagcagtggattcagcgccacggcgcatccggggctgtttgatgaagagaccggcaggaaagtagccatcgctaaagcgcagcacaatgcgactgaagcactgtggcagtttgagggatacaggctgaagtcccagctggcatcggggaaccacgatgaccgttga

SEQ ID NO: 207542 - DNA, 315 bp, Klebsiella oxytoca
atgtcacaaacccaatccgatacttttaagctgtcctaccccttcaccacagctgctggcaccagagttgagcaggttgaactgaaacgcctgacggtcaaagacctgaaacaggtgcgcaaaatcagcaaagacccggctgactgggacgaaccgctgattgcccgcagtaccggtattctcccggaagacctcgataacatggatcttgctgactacatggagctgcagaaacgatttcagcaagtcactgggctgggtaagagcgacgaaaacgctgatgcaggcgcaggggctgctggcgaggtggtttag

SEQ ID NO: 207543 - DNA, 267 bp, Klebsiella oxytoca
atgttcgccgtcgacggcgggtttaaccgacataagctggcagcgaggctcccagcgccggatggcatcgacggattcgcgcaccacatgcggaatagcccggtcgatgggccagtcgatataaaggtgcagattgctgccgaactccgggcgatgcgggtcgctaccacgaggagttcgcaggatgatttgaatagcctgccagatatcatccagcccccggacgatttcgccgggagcctgcagggccggttgccagaatactga

SEQ ID NO: 207544 - DNA, 858 bp, Klebsiella oxytoca
atggcaaacctacctgaaaccccgcagtgggaagaaggcatctaccagattgaggtctctgaccccgttctgggtgggcctgacggaatttctaaccgtcagggtaaacaactggccagccgcacgctgtacctgaaacaacaggttgagaaaggcggtacagaccttgcgaaacacatcgcggcagcagacccgcatacccagtacgcaccgaaagccagcccgacattcaccggcacgccaacagcgcccacgcctgcaaatagcgataacagcaagaagctggcgacgacggagtttgtggccaaagcacttgcggcgcttgcaggcagcgcccctgagacgctggatacgcttaaagagctggcggatgccctcggtaacgatccgaattttgcgaccacggtgcttaacaaactggcggagaagctggccaaagaccagaacggcgcagatattcctgacccggcgctctttgtcaaaaaccttggtttgggggaattggcgaaaacaccccgatatcttgtcactaaaggctctaatgcaaatggttggtacgaggtttacagcgacggattcattcgacagggcatgaagtttacaaacaataaccctttaacaatttcaacgcccgctgccggggaggtggtgccttttcctacagcctttaaatccacaatcactaatatcagccttgctctgaatgcgggggttgataatggactggagtttcctgggtttacatccgaatctctcagtgcattgagagttttgtcgatggccgtgacaaatggtgctaacgccacaggttcatatttaacaaagtttgtaggttatatcgtagtggagggagtttga

SEQ ID NO: 207545 - DNA, 399 bp, Klebsiella oxytoca
atgtggttctggaatcctgtttattgcaatgaagccttaccaggcattcatgatttatctggctgtattgaaattgatgatgatggtcatccttttaaaatgggggaactgccagccggaaaaatgtggtcgaacgattccagtaatcatccggccctgattgatatcccaccactctcaccggaagaggaaattgcagcggcagaagtcgttaggagtcagctacgtgcgactgcagatacggaaatagcctggagacaagatgctgttgacactggaatcgcgacagaacaggaggctgctgaattggttgagtggaaaaagtatcgggttctgcttatgcgcgttgatacagcaaaacccgtctggcctacacctccggttcaagcggccagctaa

SEQ ID NO: 207546 - DNA, 432 bp, Klebsiella oxytoca
atgaattacatatactccgcaataaataactctttttacccttccagcatgaaagatgattatcaacgagccgatacatggcccgacgatgctgtcgaagtcgatgataatatttaccttgaatttactgctgacccgccagaagggaagatgcgtatcgccggtgagaatgggttgccagtttggggcgatttaacaccaccgagacgcgaagaaatgattaaggcagcggaacagcaacggcagcaattgattgattctgcgatgcagtcagtcagcgtcatccaactcaaattgcaggcagacaggacgttgactgatgcggagaaagcgaagctgaatgccgttctggactacatcgacgcggtgacagcgacagatatcaccaccgcgccgggaaatattagctggccgcttgaaccggaggtgtag

SEQ ID NO: 207547 - DNA, 378 bp, Klebsiella oxytoca
atggataaatcagccctgcagaaattgctgatgacatgccgtcagcaggccgaacagttccgccgcttatcacggcttgctcatcatagcccggcagaggaactcactttgtcgtggcattcactgttaacagcagcaacctcactggaatcgctctgttgttcctgcgacaagctccttgctgaactgggacaactcgaccgttctgaaacgcagcttattgttgagcgcgatgctgctcaagagacactcagcgccatttacgaagcggtgacaggcgcagccccggaatggagcaatgtttttacctacatggacgctattgatgaagttgatgagttgatggccgcaggggagaaaacatcgcatgtccactga

SEQ ID NO: 207548 - DNA, 126 bp, Klebsiella oxytoca
atgatgttaatcacatcgcaggataataaggcggtgcagatgacgtttaatatgaccaaagatttagttgaacagtatcaggaagcggcaaaagcctctttgctttccctgcagttcgcgaagtaa

SEQ ID NO: 207549 - DNA, 240 bp, Klebsiella oxytoca
atgcgtcaggaaacccgttttaaattcaatgcctacatgtcccgcgttgctgagctgaacggcatagacccggacgacgtgagtaaaaaattctccgtcgagccgtccgtcacgcaaaccatgatgaacaccgtgcagatgtcctcggcctttttgcagaaaattaatatcgtgccggtggatgagctgaagggtgaaatgattagacatgagataaatacagggttatccgtgagataa

SEQ ID NO: 207550 - DNA, 345 bp, Klebsiella oxytoca
atggcacgacctcagacggttaatcagttacccgactctatcaagaagaaactgaataaaaagctgacggaaagttcattcagcggctacgttcagcttactgagtggttaaactcgttgggatacccggtttcaaaatcatcagtgcatcgctatgctgaacgtcgccgcctgtcacttatagcagggagcgatactcccggcgcaacagctaacattgtggatacgaaacttcgctgtctggagcttgcctcgctctctttaaaaacggacgagaagttgtcagcagatgaagtaaaaaaatatgctgaaaatttgatggggtggctttacgaccagaaataa

SEQ ID NO: 207551 - DNA, 345 bp, Klebsiella oxytoca
atgcgtatacatgttactcttaatggcaaaaaaacaaccatatcgatagatgacttgctcttcgactatcttggtgcatggttggttgaacaaagacccaaactgcactcaaaacctaaagagcagtatgaccaagctaagtctcagattcgtaaatatgtgcaagataacgcagaaaaactcccatctaagaaccttagccagcacatacaaaatgccattttagaaataattatgccgaaagaattaaatgaaattctagagaaaagagggccaagatatgagaagaaaaagtttgatgtgaccacaattttccctgattgggaaaattatctgagaaagtaa

SEQ ID NO: 207552 - DNA, 192 bp, Klebsiella oxytoca
atgtcaactatcttgcgagataaaagccctaaaggggcaggtaaagccccgatgttcaatgtcaggatttcaccagaactgaaagaacagtttgaatcacaagcaaaaaaagaaggtgttagcttagggaattggctcaaagagcttgggagagcagagcttaagcgcaacggaattgacccgaaggcttaa

SEQ ID NO: 207553 - DNA, 744 bp, Klebsiella oxytoca
atggctaatgataagtctaacgattcatttggaacaaaccaagaaagtgttttatctgcggtggtcagtggcgtgattcacagttctcacgctaaaacgacatcggaggccgaaggcttggtttctttgggaaagaaaatatttgcctgtaaagaggaactgcaacatggtgagtttacgaactttcttcacagatggcgcataaacttgcccgatgcacgtaaagcgatgcgaatcgctcatgtgttcggcggtgacacaccacgagccgcaattgccaaaacagatatcggcaaaacgaagttaaatctgcttgcccggctggatgaagtgacactggatctccttgccagtggtggggcatataacgaccacacgcttgatgatattcttcgcatgagcgccagagagttgcagcgcgtaattcaatctggtgaagatattatttgcgaaagaacgctaaccaataaagaggatatctcatctttgcctgttgaggacgagttagataaaaaggcaggaataaaacaatcaggccaaatcgaagagaataaaaagcaatattgccgcgagttactcaaagtggcattgcgttattcagacgaaaccgaacttaacgcaataacaaaatttattgaacatatgattgcctgtgctctggctgataaatacaaccccggactgaatgctgccagttatgaagtttataataaattcgctattagccggagggctgcacaatga

SEQ ID NO: 207554 - DNA, 291 bp, Klebsiella oxytoca
atgaaacaggctgaaactcaaaatactttccgtgcgatgccgtcattttcacaaggtgcctctgatgatattatgtttttaaagactgatgctaatcaggagttaatttacgactctgccacctaccgacttgatgcagttcgtaagctacttgattttgcgtctacattaggtacggataaatcatgtgcatcctctgatgtttctatggttacggatgctgctggcatactggttactgatgcaatggcgctacttgatggattgaggaaagacagacggcctcaataa

SEQ ID NO: 207555 - DNA, 357 bp, Klebsiella oxytoca
atgaccaacaaacaaaaaatgcgtcaatctgccgaagtgcttagtgatatggctacgcacatttcctgccgccttgtcatgtacggtgtcgataaacgtcagtctgaatctatcgctgtagacatcatggcgtatctgtcagatgtatacggcgggcttaacctttacttcccaaaaggaacaaaagaccagaatgaagagaaatatgatctggtttttgcagactttaatgaaggtattcccatcgctgaaatagcgaaaaaatacggctattccctgcaatggatttacaacattatcgcccaaaaacgccgtgaatacagaaacagcctgaaagatagcgctgccagacactaa

SEQ ID NO: 207556 - DNA, 615 bp, Klebsiella oxytoca
atgacaaatcttaatttgggcaactggaaaacgattgagatattccgggcgggaacgcataccgcgatggcgggacaggaaatcagcttttccgacgaggatatcgacaacatggcagcggcctataacggctatcgcagcgcgggttacggtgcgccgctgtgtctggggcatccggccagtaacagcccggcctatggcgaaaccaccggactgataagcaagaacggcaggcttttcgcactggtaaaaccggatgataccctgctggggctggtgcgctcagggcgttacaggaaagtatctgcgtcattctataagcccggcgaggccagcaacccggcaggcaccggagcttggtatctacgccatatcggttttctcggctcacagccgccagccgttaaagggctggagcaggtggaatttatggaaagcgcttacccggtctgttttggtcacaatgaatcacacgtttatttctcagagttcgacggcatagctgacagccagagagcagcgcagcaccttttaataaaggatgtaagcgaagcctgtaacgtctcctattccgaagcactcacactcaccacgccttttatctggagttattaa

SEQ ID NO: 207557 - DNA, 594 bp, Klebsiella oxytoca
atgaaaccagttatttcccttatcgaagcactgaacgccgttaaaaataatcttgcctccctgaatgagcagaaagaaaaactctctcgccgcattagtgaaattaacggcgaaataaccacattacaggatatgcctttatcgcttaatgattactgttctttcattcctgaatatattgagcgattcgggcaggaagaatatcagtcattcaagcgtgtcctctgcaacagttccggcagtgaagggaacgccgaacgctggggcaatctggagaatgagagcggcgatatttccggcctgttccgtctggtggggttgggtggaaacatctccccggctgataccgggatggcggttatgcgcaagctctgctttttcttcccggatgtggtcgccacccgcctgaccgaagcgcttaagaaggataaaagcgtggtgtggggcaatgacaaacttccgtcactggcagaacgccgtaagaccgttgcggcgctggtcagcgaacgtaccgggcttgaaagtgaactgatggctgtcagcgaggaaattgccgggattaccggaatcagcggcctgtccctgaccgaatga

SEQ ID NO: 207558 - DNA, 2478 bp, Klebsiella oxytoca
atgagcaataatttttctgttggcgtgatgattggcggcattgtcgggagcagttttcgttccgcgatgagcagtacccggcgtactctggattctctcggcgacacctcacgccgactgacggagcagcaaagcagcctgtcacgcgccatgcagcgttacggtcaggttggttcgggcgtagcctcgcgcctgaacaatgacctgcaacgggtcggcagaacgctggaacagcttaaccgccagcagtcccgcctgtcggcagcgtctgccacttctgacgccctgaaatctaaccgcatggcgctctacggtcagggagtagaggcgtatgcacaagtcagggctgcttacagtcttgtgtccccggctatagaacagtcggcatcgtttgaagataaaatgattgatatgtcaatcacagcgaaatatgacgataaaacccgtaagactctgggagagcaaatcaaagggtggtcgctcaaatacaaccagtatcagagcgatatgcaggacgccgttggttcacttatcagcgataacattgacgggctttcagatattggcaactacatgccgaatatcgcccgtgcagccacggcaacccgtaccgcaggaacggaatgggcaaaggttgcggcggtgtggcaaaactcgctgaaaggcagcgcaaaagaatttggcgcggtacagaacatcatggcctacgcaggtgaccaggggtcttttgaaatccctgaccaggtgaaatggattcagtcgcttgcgccgatgatgcagggtattgcagacggtaaggatgcagtggcggagattggggccagtttgcaggtcgctatgattggttcaggttcaccggatgagactgcaaacaatttcaggaacttcctcaccaagatttttgcgcctgatacgcagaagcgatttgccgatttaggtatcgacctgatggggtctcttgcgaattataaagcagccggagtttcccccattgaaggtatgctggatgtaacccaaagataccttaatgcaacgagtccgaaagctctggctggttttaaatccgcaatgcaaattcaggacaacaaagcgcgggacgaggccttacaaagtctggctaaaaactttgggctgggtgagatgttcaccgatatgcaggtaatggcgttcgttcgccctatgcttgctaacatggataaatacagggcaatccgctctggtgcacttaaagcggctgataatgacctgctggcggcatcctatgctgaaaggctcaaatcgccgctggaagcaaccaaagccctgatgataaacacccgtgatttatctatctctctcggcgatcagttgtcccctacatttgtgtcagcaacccggcaattaatcccgatgattcagacaacgaagctctggatagagcaacatccgacgcttgttcagggtgtggcaaaaaccgtgggcgcactgctggggctgaaaattgccactgtcggtctgaagctcggccttaatctgcttttttcaccttttgttgggatgtggaaaaacgctgttctggtacacactcattgggtgaagctgaaagccgcccttggtgttggtggcaggttgcgctggctggctactggattcagtaccgtagcgaagggagccgggacgctgggtaaagcgctggcaggtgggctgttcaggggcgtcatggtcgttgcaaaagcatttctctggtttggccgggcgctgatgatgaatcccttaggcattgcgataaccgtcatcgccgggggcgcatacctgatataccgcaactggggggcaataagtcgatggttctcacagcgatgggaggaagtcaaaacggcctttaacggcggcgttctcggcgtcagtaagctaatcctgaactggtcgccgctggggctgttctacaaggcgtttgcgggggtcatgaagtggtttaacatcgaccttcccggccagtttaccgagtttggcggtcacctgattgacggactggtgaacggtatcaaaaataagtgggagtcgctcaagaataccgttaccgagatgggcgatagcgtcggcgggtggttcaaggaaaagctggggattcactcgccaagccgggtctttatgggcttcggttcaaacatcgcagaaggggcggcgattggtatcggtcagtctgcatcgctggcgctaaaagcctcctcgcggctggctgatatgatggtgccggatgtaccgaaagtaccacccgtattagagcgctatatgcgcggcgaccttaccttatccagaggccgggattcacattcaccggcaggtgcagggattaacgtcattaaccatatctatattgatggcaagaacaagtcaccagcaccggatgtagcgaatgcgcttaagctgtccattcctgagattgaaagagcgctggaagctattcttgcccgtaagcgccgggttgcttacgactga

SEQ ID NO: 207559 - DNA, 651 bp, Klebsiella oxytoca
atgtccacaataaagcctgatgcagtctggtatcctccgcagtttccgaagcagggacgatggttcacacgccttgtttttatcgctgtggcgatattgctggctggttgcgatcgactcgcgaaagaggagagcatcagtggcggtagcggcaccatagaagcggttaaccatacccactgggcgataaatcatttcagcgtagacgggcagtcagggctggatattatcggcccctggcaggggggcggtggtggctgctgttacggcgtgccaacgaaatggaaaccgggaatgacggtgaaagttgagtgggaaacgggtgtggcttttgcagatgatgtacctgaaattcctgagccgaaacgacctgatacctccgggatgaacgagaaaaattattatcaagtatggcaagtgtattttgatgaaaaacaagaatggtataggaaaattaaagcactgaataaagcgcatacaaaaatagtccctgttcccgattataccgggcaaaaaacctgcggaataaaggttcactttttaccctgcgatcaaataaaagtcaccaccagctgctacgactacggcaatccaaattatccgattaaagatccgatcaaaatggaggaacccaaagtatgtccacaatga

SEQ ID NO: 207560 - DNA, 519 bp, Klebsiella oxytoca
ttggccggcctgttcctgctggcggtgatgttcggcgtccatcagggcttcgtgccggtctatttcgcgctggtggatgcgcaggggtttaactcgctgtttccgatactggccatggccggggccggacaggttggcgcggcgctggcgcttttctggcgggcgaagcacggttctctgctgcgcacgcagattaaaggggcaattatccccggcttcctcggtatcggcgaaccgctgatttacggcgtcacgctgccgcgtatgaagccgtttatcaccgcctgtctcggcggcgcttgcggcggtttctttctcgggctcatcgcctggatggggctgccggttggcctgaatacggtgtttggcccgtcggggctggtggcgctgccgctgatgacctccggcagcgggatctacgccggaatggcggtgtatgccgccgggctggcggtctcttatctctgcggatttgccctcacctggctgttcggcagtaaaaacgttgatttaagctaa

SEQ ID NO: 207561 - DNA, 129 bp, Klebsiella oxytoca
atgcacggaggtactgacgagggagcaccaggcctgcgcccgcattacggcgaaggtttttacaacgcttacgtcagagacctggatggcaacaagctgacattcgcctattacaccgcactatcctga

SEQ ID NO: 207562 - DNA, 975 bp, Klebsiella oxytoca
atgctgcatattgtaaaatattttttagctttaactttgctatcgggaatttctagtgcgtttgctgattcgggttcttgcaagttcgagtcgatgggtacttttattcctgatatacctcaaatggcaatcccgagtgacctgcctgatggaaccgttctttacaggtctcctgtaagtcagctaaaacttaattgcacctatgatcccggacctggaattttcactacgggaacaggtgtctattattccacgacctcagatttcaattctttgcaaagtcaacgcaatggtattaaacttactatttatataaatgatgcacctattaattcagcagtggtagcgaaggaatttggtcgctcgagtcagggatactcttcagtgttcagctctgatgttaatatatattttacaatcactgttgacaggagcaggggctctctccctgagtccgggacccagttggtcggctcttttgaatcagtctatttttacataaaaagactggaatggccaagggcggttattggttttagaactccaaaaattacggctattccatgttcaatggatatgacgatttcgccgaatacgttgaactggggggcgatacaaacttcaaagcttgaaagtggtaatgatttctcaagaaatttttctgtcattttaaagaaaaagagttcatgcaccgtaaacagcgcagccccatttggtgtaaatatctggtttgaccgggctggacaaagtcttaatcctgatggttctcttgatttgaataatggtaccggacttagcataaaagacaatttaggtaccgtagtagcatatgatacaatttatcaaatccccgatgtaaaggtagagtcagttttaaccagaaatttcacagcgcagatacaaaaaaccagtggtaaagatataaaaacagggtcattcagcactgtgttagtaataaggatgaactattattaa

SEQ ID NO: 207563 - DNA, 753 bp, Klebsiella oxytoca
gtgagaaaatgtagatacataacgtctctctctccgttctggcagtatcttagagcatcaggatgcgactggaaaagaaaaggtaaatcccgtcagatatacggcgacgtggactttgatacacaagccgggaagcaactcaggctcccggctgatatctgctttcacggtaaggtaagaatcactcagactaaccagctatcccctaatattatctttgcgggtgatttccatattttacctgtcgcacttggaacgattaaggaaggcaggctcccccggctccggataccgaagagtacccgatttatgtccagtgtgtttctgaatacgtggcacggtgaatggccggaaaacattcagtttattttggggcattttttctgggcatactcatatatcaggaaactaccggaagtgttttccgttgctatagacatcaacctcagtggttcgggaattaaacagttgccgaaagaactgacagtgctgggtgatgctatcatgcccggaatacaaaccagaagactgcctgacaaaatgaatctgagccagtcgctgagactttcattttcaacactggaagcattgcctgcggagttgagcgtcccgggtgacctcagtattaaaaatacccgtatcagccagcttcctgttggtctctgtgttggtggaaacctgaacataacagggacaccaatcagccttattcctgaaacatcatttatctgtggtgaaatctttcgtgattaa

SEQ ID NO: 207564 - DNA, 354 bp, Klebsiella oxytoca
atggccttaatttttaaaaataccgtactgctttgccttgcatccagtctgttattatccggctgtaatggtggtacaccagaatgtaacagtgacgccgccaaggatgaagtgataaaaatggcactggggcgtgtcagtgatgatttcagattaaaactggaggagcccggcaactcattatccatcatcaatgtcaggacaacttcacacacttcatcaccggatattaatgaatgtgccgctgacattcgtgaggttctgtctggtaaatcgtacctgatcccgataacctaccgacttcaggaaaccgatgacggcaaacagttttatatcagtgtttccgggttatag

SEQ ID NO: 207565 - DNA, 177 bp, Klebsiella oxytoca
atgaaaaacagatatcgggtggagttttcaattaaaaaaggaaaggacttttccgggacgcttgctgaacaggtttatgccgaatcagaggccatcgccatcaggctggcagaagaagccattaagcgaaaaaaaccgggatatactattgcctttaataaaatccagaagcgctga

SEQ ID NO: 207566 - DNA, 384 bp, Klebsiella oxytoca
atgagaaaactgttataccccatcctgctgctgcctttactggctgaagcatccaccacgctgcacctgacaagtgacagcgcagatttgaccgttgaaatgaatcagaactcgtcagctcccgtgaagtttcacattattggtaatggtccgggcatgaatgatttgccttccgtctgcgaagtcagcggagaggctgagttctgggccggggctgactccgggctgtcgtggatatatttctcccctgacaggaaaagcatggtactgcttaaaggaagaaccgactcgaaatggacggtgctgagtttattaccggatggagtatgtggtctgggggcggagaactcactggatggcgtttatcatcgggtggcaaaataa

SEQ ID NO: 207567 - DNA, 528 bp, Klebsiella oxytoca
atgggcattaccgttaaagaagttgtttgcagctttgattacttgttttcatcgctctggcgcagggaattcgtgaaaacgctgcgcctgaatgagtgtaacgaaagggaacttttacccctggttcggtgctaccttcttggctggtttggcgaccatgttacccctgaggttaaaagtgtattaccgggggctctgagcgggtcgggacgactggattttatgattgatggtgtggcagtcgagtttgccgtcaggcgtcccggcgctcccagagctacgctgtctgcttatgtgcagaccacagagatgaaaaagctcatgaaacatgatggtctcgcgcttctggtgctgttcgatttctctcccttcccgttttcagaacagcagattgaagcctttcgcgactggccgtctctgggaagaggaaatcaccggaagtccgcatttaacgtggcgtatttttacgtggacagaaaatccccgctgactctgggcaaaatcattaagaatatacgggtcagctga

SEQ ID NO: 207568 - DNA, 378 bp, Klebsiella oxytoca
atggctcagttaacttcacatacagcggataaacaggtcggtctgcgtattcagatgcggcgcaaggagctggagatgacagcccagcaactggcagagctggttgatatatcccagcaacaactttccagatacgaaaggggaaccaacaaaatcaatgttgcacaccttgtcaacattgccactgtacttaatgccccaataggctggttctttatagattgtttttccgggccggataacgtgaatgaacccaggactgactatattccggttaaagatgcggagctcaaaaaccgctttgagcagatatggcctcgcctgacaagagagcaacgcaggacactgattttatttcttgatgagtgcattaagtaa

SEQ ID NO: 207569 - DNA, 699 bp, Klebsiella oxytoca
atgagcgataaaaaaatgaaaagtgtggctgtaagccgcgcggagagcgcaagcagaaaatacagcaccaatccaagcgcagtcagtcaccacgccaaaacaaaaatgtacaaagaagctggattgagtctcaaaaaggtctacttgggtgaggatgcactcagcaaacttgctgagatatacaaaattcagtacgggaaaaaactcaatgttaaaagcatcgatcccgtcttattgggggatcttctcagttactgcatcaatgccagctacaaccagcccagtatccaaaagatgttaccgaaaactgctactgttaaaattggggcagcaagaactccggctggtcagcagctctaccgctaccatcaaatggcacagggaacagaagaacgacctgatgcagttgcaatggagcccgtcttcaactaccgcaataaacgcgataagccgttatttcctaacatcaggcatgatgtccacgattttcttcataaggaaattgcagccaggacagaagcaagtagccgggatgacctcgacaacctggattgcgaagacaatgaccttgaagatgagtggactacgggtgaaattcagattatcagggatgttaagcttatagataaacagatacgccagtggaatgaggtgcctccaacgttagggaacagaaaaaggcaaaaatcaaaaccgtaa

SEQ ID NO: 207570 - DNA, 201 bp, Klebsiella oxytoca
atgactagccggattttgaagaagaaagaagtgctgtaccgctgtggtatctcaaacgcaagtctttaccgtcagatagcaaaaggtgtgtttccacgccagaggcttctgtcgcccggaggacgggctgtgggctggctggaatcagagatcgacgaatgggtgaatagccgtgcacaagcaaatccgtcgtatctataa

SEQ ID NO: 207571 - DNA, 1146 bp, Klebsiella oxytoca
atgaatgacaaaacagtaagctggcaacggattgatgatctgctgcgaaaatccatttttatgcagttaacatcgcagggacaagagatctattcccgcctggataagctggcctttgtctctgatttgagcgaagaagataatgagctgttgtttaagcggctaggagaaatgaagacgacacgagtttatagcatcaaaaatcgcaaaacgtcaaaaggtgagtgtggtgacctgtatcaccgcgcgctggagatccggttaacctgtaaacagaaggggcatcctgtgatactggtcattcactattgtcccacaacaaagcaacagggggggaagtcgggtgctactcaacgcggcgcagtacgtatggagctcagtccccagcactacaccccggctgaactgacagcgttgtttctgtggctcgggaaaaaagagcggcttggacggtatctgtatcgtgcgctgaaaaaagcatggataacggatgttcattttgcactggacgtcgtggggatacgtctcagtgactactatctccgtttgaagagagcacagtgcggtaaggtttttgagcccgacaatggtatgggtgggatactgattgggagttctgaatctaagcgtcacgcttcctgctatgaaaaagtggatgttgttagtagtgaagacggtggaagctacggtcagcaaaccctgctgacactgacatacggccagtatcgtgattttgttcgttttgaactacgtttatcccccggtaagagtgagatgctgttaaagcatatcaataagatggaaaatctgttgtcccgtttgacgttttatagccgggaactacgcaaggataaacgactggacccagctctggctgtcttgctggacaagggtatgagcatttctcaggcatttggtgagcataaaccatcagcggtggtgaatggccagagtgtgagtagtactaaaaaacaggcgggtaagcgccttgaccacctgctaaataagtaccgtgcgcacctgtttgactcagaggctatctgggaccagctaccgctggtagtggcgaaactgggtattcttgctcagccgcagtactgggagtatggaaaccgtcagaaatggcttgaatcacgcggggaataa

SEQ ID NO: 207572 - DNA, 1062 bp, Klebsiella oxytoca
atgactgataatagtaatcctaaaattaataaaataattcctggaagtactgttggaagggggagaagcgttaaaattgaaacttctcctcctgtacatgaatggtgcaatagtaatgcaaaaattcaatttggaaatagcttagacttatactcaacatgggatgagcctactgttattatttcagatggtgcctatggaatactaggcttcgaaggtgatacttctgatcatacttctatttctgaatggtatgaacctcatattgtagagtggagtaaaaaagctacgtcgcaaacaacattatggttttggaactctgaaataggttgggcctctgtacaccctctgttagagaaacatggttggcgctatgttaatgcaaatatatggaataaaggcaagggacatattgcaggtaatataaatacagcaaagataagacgatttcctgttgtgactgagctttgtgtgcaatatgtttttgagcctaaaattgacgacttatctttgcaacattggctttaccgtgaatggaaaagaacaaaactagccttaaaaaaagcaaatgaagcctgtggcgtgaaaaatgtagcaacccgaaaatatttggatcaggggcatttatggtacatcccccctccagaaatgtttgcgaaattagtcgagtatgctaatgagcatggtgatgtttccggtaagccatatttctctgctgacggtgttacgccaatgagctttgaagattgggaaaaaatgagagcaaaattttattgtccaatgggattcaccaacgtttgggaacgtaatactctcaaaggtggtgaaaggatcagcgttccaggccaattagctaaggctgctcatcttaaccaaaaacctttagatctaatgtcactgattattcaggcttcaagtgatgcaggtgatgttatttgggaaccctttggagggttgttttctgcatcagttgctgctcaccgtttaggtagaaaatcttttgcaggagagattgaccccacctattttcaaataggtatggagcgttttctctccttataa

SEQ ID NO: 207573 - DNA, 1152 bp, Klebsiella oxytoca
atgggatttgaaaggtgtcgcaaatgtcgtggtgttggaagaggaatttttgattgtcagaattgctctggcacaggtcgagagccaagggaaggaaacccttttggccagtgccacacctgctacggtgatggtgagtatgagcaattatgtcctgcttgctttgggataggcgaaacatattcacctaccacattaactgacgattcaaaatatattaatggcttagaaataatgaacacttctgatataataaaaattgctactgaacaattattaaaccttgaaagccgagagtttgatgtaattacagtatcaaaaccagtttcccctgatgcagctgtaaaccttgcaaaaataatttcgaaactatcacctatcgttggaaatctaattgagtttcatacttgcgactatctcaacacacaagatatatatgccgaattaggccattggattcgtcaagatccaggcttccctgatacaatttttgttagcgatgatataactcctacaccgggatttgagatcaaagcttggtttcctttagccacggagataacggccagatttaaagatagtcaaaatcacttttctgaggaccaaacttatgtagcaatgttagcatggttaccagagtatcttatttttggaaaaccaaaagtaattgatatagtaatagtttcagctatctccgtcgctagagcacgagatctacactatcatcgccctccggactatattgttcttgaaccggaagacacaacattaaggacaggaaatttacagcaaactaatacaaatggatataagtttcaagggactcatgagcagttttttgaagcacaacaattagttgcatcttggcaacctaatgatcaagaatatagccccactccagaataccaagaaatgcttagaacattaattgcaagatacccataccggttagatacaaattttgcaaaaatggacaggatagttcatccgcaaattgaagaattcaaaataagagtacataacactcgttttcacggaaaaacaattggagaatggaacaagcttttatctaaaggcaatgaaactgaaattttgattgctctgtccgaaacgttcggtatatccgacgacggtgataccgccgtcgaataa

SEQ ID NO: 207574 - DNA, 162 bp, Klebsiella oxytoca
atgttcagcgtggagacccaggtctgcgaaggggtgatcacttcatcgccggcgctgatacccagcgccatcagcgtaacgtgcatgccgccggtcgccgaactgacggcgatggcgtggcggttgccggttaatgcgcaaaacgcttcttccagcgcctga

SEQ ID NO: 207575 - DNA, 243 bp, Klebsiella oxytoca
atgacccttaactccatggttggactcagcctctacaagtcgctacgagctatcaaacctgataacagcgagcggcatgcccggaatttactggaacccaaaagcgagatcctgaaactacgggcacagctaaaacacactgaagagggacgggatatcctgaaaaaggccgcacggtactttgtaatgaggcccgacttaagtgcagctttatcactgagcaccgcactgtatagggtgtga

SEQ ID NO: 207576 - DNA, 636 bp, Klebsiella oxytoca
atgagctctagtattgaattttttttccagaactacgataatctgccgccaaaattagcaactgagctctatcgacttaggcgtagaacattccaggagcgactcgactggaaagtcgagtgtactggaaaaattgaaaaggaccaatttgataacaaaaacacaacttacttattggggatgcacgatggacaattgatttgtggggcacgatttatagattcgaagcaacccactatgatcagcgaaatctttaatgcttactttaatagtattagtctacctacagatataccttgctgtgaaataagccgcctttttttagataaaaaaatacgtaacgctgagaatttacatagttttccaatcagtaaagctttattccttgcaatgattatttattgtatgaagaaaaaatatagaggtatgtatgctgttgccagtcgcggtatgtatgctatatttcgtcatgcaaactggaaagtagaagtaatccagaagggtctctctgaaaaaggcgaagcgatatactatatttttatgcctgccagcgtaaatatcattgaagatatcattagtaaggataaaaacagtgactggcttcgagaaatgatgcagtatttacgctgtctttaa

SEQ ID NO: 207577 - DNA, 693 bp, Klebsiella oxytoca
atgacggatgcatattacaacgataaagatattaattctttaattcagaatgaattggataccttcttcggtgcgtttaaaggaactatctacgcctatgctatcatgaataagaaagacccctcgcaaatgcgtatatttaataatagtccagagtggtttgatttgtaccttgaaagtaaatatcagttcatagatcctgtcattattagagctttgcagtgtatagaggatttttactgggagaataaattaattttgcctggaggttatgatcttacacgaatttttcaggaaagttctcaccatgatatttaccagggacatacgttccctttgcatgattatctgaataatctggttgtattatccattattaatcataaggactctgatgttaatatagaaaagaatcgttcaaaattattgatttttcttaatcatttgcatcaacgaacactcgacagatacagcaaaattcagcagagaaaaaatgtatttttgtcaccgcgcgagcgacaaattctgaagtgggtaagctccggcaaaacttactccgaagtttcaattattttatgtattacggagcgtacagttaaattccatatgagtaatgcgatgaaaaaactaggtgtgaaaaatgcccgacatgcggttaaactcagtatggagctcaggttactggataactga

SEQ ID NO: 207578 - DNA, 267 bp, Klebsiella oxytoca
atggccagaacgatgacagttgatctcggggatgaactccgggaattcatagaatcactcatagaatcaggggattaccgtacccaaagtgaagtaatacgcgagtcactccgtcttctgcgtgagaaacaggcggagtcacgtctccaggccctgcgggatttactggcagaaggactgagtagtggtgatcctgttgactgggaaaaggatgcgttcctgaaaaaagttaaggccggaacgagggctgccggtgaaaaccgttaa

SEQ ID NO: 207579 - DNA, 297 bp, Klebsiella oxytoca
gtgaaaaccgttaaactcacaccgaaggccagtcaggatatggagaatatctggtactacagttgtcgccacttcggagaagagcaggttgacagatatattaatcagatatccggtatatttcaggttctgagtgaaaacaatattggtactccccgaccagaactgggtgagtatatctgcgcactacccgttgaacggcatataatttatttcctgcagactgatcatgatattattgtgatccgtgtattaagtcagcatcaggacgcgggccgtcacctcaactggcaataa

SEQ ID NO: 207580 - DNA, 243 bp, Klebsiella oxytoca
atgacagcactattgaaaatcagtgactacccgggttttattgtctgcactgtcaactatgatcttctcgaattcagggcgaaagagcctgattttcatctcatcctgtatgaaaaatattgtctgtggtatgaagagggggaaagaattctgtgcaaactggacaggagaatgctgctgcgcgacgattctatcgtcctggcgatgcctccagtggcaggagagagtggacggttctgttga

SEQ ID NO: 207581 - DNA, 237 bp, Klebsiella oxytoca
atgcaaggtaaaaatctctacagctcagcacacgccattacggcctatttcaataaggcttgtcttgctacacaggaggaaacgctcggcttaattgtcagcgaaattctgacagaaggtcagaaattaagtcgtcttgcaatttgtacaaagttactaagacgttcagaaatggcatcctgcgaagaagaaattgcacattataacaagcccatcgccctaatctttgaacgatga

SEQ ID NO: 207582 - DNA, 279 bp, Klebsiella oxytoca
atgcacagaaccaaagccgaaagacagagggataatctacttggtgaggttactatcgcaattctgaaggaacatggtcagattacttttgagtcattactttacagacttaaattcatggctctttcagagccggaaggagaaagacttgatgcactcaatgctgcattagtatggattatggtaaaggcccccttatatgcggatcagcagcgtatagtaaatgatgagacaaacgatgcggcctatatagaagatgattttaccaaaaaacactaa

SEQ ID NO: 207583 - DNA, 249 bp, Klebsiella oxytoca
gtgttaattcagaacgacggtaaaagcaatgccatcattggtgaagcggctctccgcctggctctggtaagaaaggatatcaacattttctctcttatcgccatgctggaacatatggctactagcgttgactcagataccagactgagagaactcacggaggccagaatctggctgaagcagttatccaagagggagaatgtcaatgttaatgagccttgtatccaggcattgatggactttaactga

SEQ ID NO: 207584 - DNA, 297 bp, Klebsiella oxytoca
gtgcattgtatattgaattttgtttatagcttcagcgcaaaacatgcgcaccctttgatcgtccgtattttcaccaaccgcatacaacgcactaataataaaatctgtagttatgattttattttcggtgatcctttctataacaatctgaccaataaggattttaatttcctggctgaattcctgatctactttactcaaaaaacctcccaaaagccgatttataaaaaaacaccaaaggtattagcaaaattaattctgatgacagtcagaattcaatcgggagataacccgtag

SEQ ID NO: 207585 - DNA, 801 bp, Klebsiella oxytoca
  misc_feature (461)..(498): n is a, c, g, or t
atgatgaagaaagtatgtggaatcatggccccaggtaatgttcaaaccacaataggggtatgttggaccatggtcccaggtggcgttcgggcgacatcggggtatgtgggaccgtggtcccaggtggcgttcgggcgatatcaggtgtatgtgggaccgtggtcccaggtaatgttcaggcgatatcaggggtatgtgggaccgtggtcccaggtggcgttcgggcgatatcagggggtatctgggaccatggtcccaggtaacgttcaggcgatatcaggtgtatgtgggaccgtggccccaggtaatgttcaaaccacaataggggtatgttggaccatggtcccaggtggcgttcgggcgacatcggggtatgtgggaccgtggtcccaggtggcgttcgggcgatatcaggtgtatgtgggaccgtggtcccaggtaatgttcaggcgatatcaggnnnnnnnnnnnnnnnnnnnnnnnnnnnnnnnnnnnnnngttcaggcgatatcaggtgtatgtgggaccgtggtcccaggtaatgttcaggcgatatcaggtgtatgtgggaccgtggtcccaggtaatgttcaggcgatatcagggatatgtgggaccgtggtcccaggtaatgttcagacgtactcgcaaatactgtcgtgcattcaccagcaagcgatgattagattcgtagatatttttatcagacacggaattatagtcacggtaaaaacctcatatagctggtcagaaatgactatttgtagtgaaaggtgtatatatctttcactatttaaatag

SEQ ID NO: 207586 - DNA, 768 bp, Klebsiella oxytoca
atgattgatgcccggaacctgacttacagcatcaatggacgtctcctgacgaacaacgtttcactgacgctgcccgacagtgaaatcgtggctattctggggcctaacggcgcgggcaagtcaaccttactacgccagcttaccggctatttgcaaccggacagtggtcgctgctggctgtttgggaagccattaaacgagtggtcgacggcggagctggcaaaagtacgtgcggtaatgcgccagaactttcatttggcgtttccattcagcgttttagaggtgatccgcatgggccgccacccgcgttgtacccgtaactatcgcgatgagattgaacatattatgacactgtgcggatgcagcgaattggcatcacgcgactatcgccatctctccggcggcgaacagcagcgggtgcaactggcgcggttgctggttcaactatgggagccggaaccatcgccaaaatggcttttcctggacgaaccgacatcggcgctggatatccaccatcagcagcatctgtttcgtctgctacgccaactggtacaggaacgacactttaacgtctgttgcgtactgcacgacctaaacctggccgcgcgctacgccgaccgaatcattctactggaaaaaggtctggtaattcacaatggaacgccgcaggaagtactgactgagcccgtactgaaaagtctctaccagactgaaattatcgtcaccagcgcccatgattcaacaccagttattctgttagaaaaatga

SEQ ID NO: 207587 - DNA, 993 bp, Klebsiella oxytoca
gtgttcagggattcacactcttccttcagcgtatttatcggcctgttgctgatgcttgcggccctcgtactggtgggggccagccagggggcgttaaaaatcacctttgcctccttgctggatgagcagtatcgcgatatctggctcaatattcgtctgccgcgcgtgctgctggcagtactagtgggcggcgcgctggcaacggcaggagtcattatgcagggattattccgcaacccgatggccgacccaggcctgctcggtgtcagtagtggctcagcgctgatggtcggcgtggcgattatcttcccgatttctttaccggcaatgttgatgctgtttgaacagatgatcttcgccgtcgccggcagtctggtggtatgcgcagccatctttctgatcaacctgcgccacagccatagcggtatgatgcaactattgctggccggtatcgctatcaacgctctgtgtggcgcagctattggcgtactgagctacgtcggcgatgaacagcaactgcgccagttgacactctggatgatgggcagccttggacaggcacaatgggctacgttacttgttgccacctcgtttgccctcccggctataatcgttactggctggctcgccagtacgctaaatctcttgcaactgggtgatgaagaggctcactacctcggcattaatgttaaacataagcgccagcagttgctgttgctcagctcgctgctcgtcggtgccgccgtctcggtgagcggcattattggtttcatcggcctggtagttccccacctgatccgtatgagcatcggcgctgaccaccgctggcttctgccctgttccaccctcgcaggtgcctgcctgctgttggtagcagacacgctggctcgcacgctggtacagcctgctgaaatgccagtaggtctgttgaccagcctaataggcggcccgtattttttatggctcattctgcgaacacggagagcgctatga

SEQ ID NO: 207588 - DNA, 624 bp, Klebsiella oxytoca
atgaacccatggctgattttcggagcgggtggtcaaggtgtaggggcgctgacggtcgagcgagcgctggcagaaaaacgccaggtcatcgcgctggtgcgtaacccggaagccgccgttcgcctggaagcaaaaggcgttcatgtcgtgattggcgatgcctgcaatactaagcgcgtggcgcaggtctgtcaggcagcaggcccgacagcgactgtgatctccacgatgggcggcacgcacgactatctggcgcaccgtacggtgattgatgaagcggagaaagcaggtattcgccgcatgatcctcgtttcatcactgggttgcggagagagttggccgtttctttcggatcgcgccaaagcggcatttggtcaggccgttcgggaaaaaagcctcgcggaaagctggctgcaaaccagcacgctggactatgccattctgcgcccggggggattgctgaatggagatgctaccggtaaagcgcaacgtttccagcagcaggaagtacacggttttgtccagcgtgccgacgtggccgctcatattcaggcactggacactgacccggccctaaatcaacaggcttacagtctggttcagccggaccttaaaccggcttaa

SEQ ID NO: 207589 - DNA, 495 bp, Klebsiella oxytoca
atgagtaacctctctctgcaggactttttgaaaaccgagccagacggcactctggaagctatcgccgggcaatacagtaccaccctgctggaggttgtaaaaaacttgccctcccataccctgataaccggcgacaagtttgatagcgtctgggataccgtttgtgaatggggcaaggtcaccacactcgttcactccgccgatgtaattctggagtttaccggcgagctgccgtccggcttccaccgacacggctacttcaacctgcgcggtaaaaaaggcatgaccggccacattaaggctgaaaactgcactcatattgctctcgttgagcgcaaatttatggccatggataccgcctccattctgttcttcaacgcggcgggcagcgcgatgttcaaaatcttccttggtcgcgacgaccaccgtcagctactgagcgagcaggttgacgccttccgcactttggccaccgtgctaaaaggggaggtttga

SEQ ID NO: 207590 - DNA, 1341 bp, Klebsiella oxytoca
atgctgaatatgacatatgagctggatctcaccccgcactttgcgcttgagggcagtcaacccttcaaagaccgcagagccactatgccatggcgcggagcaatcccgattgctaaagagcaactggaacagacctggctggaggtgctgagacacacaacgccgtcgcgtaagcgcctgctgtatttgcatattccgttttgtgcgacccactgcaccttctgcggtttttaccagaaccgctacgaggaagatcactgctcacgctacacagatgcgctgctgcgtgagattgagatggaagtcgatagcgtgctgcatcagtccgcgccaatccacgcgatctattttggaggcggcacaccgtctgcactctcagcgcgcgacctggcgcggattatcacagctttacgcgagaagctgccactggcgccggactgtgagataaccattgaaggccgcgtgctgaacttcgacgacgcgcgcattgacgcttgtctcgacgctggagctaaccgcttttctataggtattcagtcatttaacagcagaattcgtaaaaagatggcccgcacctccgacggcccgaccgctatcgcctttatggaaggactggttcgacgtgaccgtgcggcggttgtatgcgacctgctatttggcctgccggggcaaaatgccagactatggagtgaggatctgaccatcgcccgcgatatcggcctcgacggagtcgacctctacactctcaacctgctgcccaacacaccgctcggtaaagcagttgagaacggccgaaccagcgtgccgcaacccgccgagcgccgtgacctttatcttcagggctgtgactttatggatcaggccggctggcgctgtatcagtaacagccactgggcacgcaccacccgcgaacgcaacctctacaacctgctgatcaagcaaggtgcagactgcctggcgctgggttccggcgcgggcggctcggtaaatggttattcgtggatggtcgaccgcaacctgaacagctggcacgaatcgatcgccgcaggcaaaaagccgttgatgatgatgatgcgtaccgctgacagcgggttccagtggcgccatacgctgcagtccggcgttgaaaccgcgcgtgttcctctagaggtgctcacgccgcacgccgctcgccttgcgccgctgctggcacagtggcaccgcgccgggctgacgctggatgactcaacctgcctgcgtctgaccaatgaaggacgcttctgggcaagcaatattttacagtctcttgatgaactgattcaggagcttaacgcaccgcacaatgcggtagaaaccccatag

SEQ ID NO: 207591 - DNA, 828 bp, Klebsiella oxytoca
atgataaaaaaaatggccattggactgctggctcttacctgtgcgctaagcgcccaggcagccgggcgcattgtggtagcgggcggttcgctcaccgaactggtttacgcgatgggcgcaggtaaccacgtggttggagtggatgaaactacctcttacccgccggaaaccgtcgcgcttccgcatattggttactggaaacagctcagtagcgaaagcattttgtcactgcgcccggatcgctttattacctggcaggacgccggtccgcagctggtgttcgatcaactgcggtcgcagaaagtagatgtcgtcaccctgtcgcgcgtcccggcaaccgtcgagcagatgtacgccaacatccacacgctggcgaaaacgctgagtgttgaagaacaaggtaacgcgctgattaacgatatccgccagcgtctggagaaagttgcgcagagcagcgtcagcaaatcagcacccgtcaaagcgctgtttatcctcagcgcgggcggcagcgcgccgcaggtggcgggtcagggtagcgtagccgacgccattatgacgctcgctggcgccctgaatgtggcgcagcatccacagtatcgcagctacagtgctgaggcgctgattgccgccaatccgcaggcgattgtcgtgacctcacaaatggttgaaggcgacattaaccgcctgagcacaattgccgggatcactcgcaccgccgcgtggaaaaataatcggatcattattctcgatcaggcgctgatcctggggatgggacctcgcgttgccgacgccgttgaaacgctgcacagccagttttggccaaactaa

SEQ ID NO: 207592 - DNA, 2151 bp, Klebsiella oxytoca
atgcatatcacaacactttctcgaggaacattcgtgctctctgccctgccattgtttattgcaggtgccgtttcagcagccacggtacccaccgcacaaaacaaaatcagcaaagaagagacccttgtcgttactgcgaaccgctcggaaagcagtctctgggaaagcccagcaaccattcaggtcatcgatcatcagacattacaaaactccaccagtacctcaattgctgataacctgcaggatattccgggtgttgaagtaactgataatgcgctggcaggacgtaagcagatccgtattcgcggtgaagcttcttcccgcgtgctgattctgatcgatggccaagaagtcacctatcagcgcgccggggacaactacggcgttggactgctgattgacgaatcagcgcttgagcgcatcgaagtggtgaaaggcccctattctgtgctgtacggctctcaggctattggcggcgtggtgaattttatcactaaaaaaggcggcgacaagcccgtcgccgggacggtgaaagcagtctacaactcctcaaccgccagttgggaagagtccgccgctgcctggggcagcatcggccagtttgattaccgtattaacggcagttattccgatcagggcgaccgcaagacaccggacggtcgtctgccgaatacccgcaaccgcaacaacagccaggctgtttggctgggttataaccttgataaccagcattttggcctgtcgcttgaccgctaccggctctccacccagacctattttgaagattcagacggcaaatacgatgccttcagcgtgaagattccgaagctggaacgtgaaaaagtcggcttgttctacgatatggacgtggacggtgactatctgaaaaaaatccatattgatgcctatcagcagactattgagcgtcagtttgagaatgaggtgaaaacaacacagcccataccaagcccgatgattcaggcgttaacagtgcataatcagacccaaacctatgataagcagtacactcagggcatcacactacagagcaatttctctcttccggccaataacgagctggttctgggaacacagtacaagcgcgatcgcgtctcccaaacctcggacggcaacacgacgaataaatctgtcaccggattcatcaatactgaaacgcatacccactcctactatgagtctgagcagaataatacctctctgtttgcacaaaatgactggcgctttgcggataactggacatggacactgggagctcgccagtactggctttcttcaaaactgacacgcggtgacggccaatccacggcttcgggcatcagcagtgatatctctctcccgaaacagtcgacgaacgacagcgagctggtcacctcaaccagcctgcgttactccggttttgacaatattgaactgcgcgccgcctttgcccaaggctacgtcttcccgacgctctcccagctgtttatgcaaacggcagcggggggcagtaccacctacggcaacccgaatttgaaagctgaacactccagcaacttcgagttgggtatgcgttataacgacaatctgtggctggttgatggggcggtctattactcggaagcaaaagactatattgccagcatcgcctgctctggccaggcactgtgcaatggcaacacgacctcctcacgcggaggatattaccactacgataatatcaacaaagccagaacctggggtatggagctgagtgcggaatataacggctgggttgtttcaccctacgttagcggcaacctgatccaccgtcagtacgaaggccagacgctgaaaaccaccaatactggcgaacccagcgtcaacggtcgcatcggggtgaaacacacgctgatgctgagtcaggctaatgtgacctctgatgtctttattcgcgcggcttccagcgccaaagatgacactggcagcaaagaagtccgcactcctggctgggcgacgctgaatctggcagtcaacaccgaattcggcactgaagaccagtatcagatcaatctggccctcaacaacctggccgataaacgctaccgcacagcgcacgaatctattcctgcggcgggctttaatgcggctatcggctttgcgtggaacttctaa

SEQ ID NO: 207593 - DNA, 969 bp, Klebsiella oxytoca
atgagcgtgtcaaatcaacgttgtgcaggcattgatgtttcgaaaagcactctggatattgcaatcagcagtattgcccggcgattcactgtgccaaatgaagatggcggttttaatcagatactcaaagagttaaagcaaaatgaaactcaactgatcctgatggaggccaccgggggacttgagtctggtgtggctggctatcttcagtctgaaggtttcgacgtggttgttatcaatccccgacaggcgcgagattttgcccgcgcaatgggctatctggctaagaccgaccaaatagatgccagagtcctgctacaaatggcaaaagttattaaccagcatcctgagcgggaaaaatatattcgtcccttacctgatgttcacaggcagttgctggcagcaatggtggtcagacgccgacaattaacgatcatgcttacagctgagcggaacaggttgcatccgtcgcatcctcagaatcatgaaagtatcagatttattatttcggtattgaaaagtgaaatggctcgtatagaagctgaaatgttagcctatatttcgaaaaatttcagtgaattatctgcattattgagcgccgttaaaggtgttggtgcagcgactgttgccgtgctgctggctgaggttccggaacttggaacgttgtcacgacgtgaaattagtgcgcttattggggttgctccagtaaacagagattccggcacgatgcgtggtcgtcgaacggtattcggagggcgagcctccgtccgaacagctctatatatgtcagcccttgtcgggacgaggcacaacccagtaattaaagagttctatacacgcctcgttgccgcaggaaaacccaaaaaggttgcactgaccgcctgcatcagaaaaatactgaccatcctgaacgcaatgctgaaaaacaatgaagcatgggatccgttgtatcaccaacatgcttcgtaa

SEQ ID NO: 207594 - DNA, 507 bp, Klebsiella oxytoca
atgatccctgttaccctgcttgagatgactcgctccgatattcctgcagtgcagtcttttcttgttgagcatcttaatttgttttttaatgccggtagagtcatgccttcagtccatgaggatctctttaagttagaacagcagtatattttgcaggaaaggaatttgctgctttgcgcatggaatgaaaaacaggaattaatcgctacgctggcggtatgccaatatgatgacaggattgctgagttacgcgggcgctataatctgaatgaaactgcggaaatttgtcgctgctatgtggataaacgttaccgcaggcagggcatcggtagtaaattgattgcatttgctgaggcattctgcggacagaaaaaatataaaaccttatatcttcacacgcatcatttcttgcctggaggttatcatttctggttgcataatcattttagcgtcgtgctggatatgcaggatgaatggcagctgattcatatggagagatcgcattaa

SEQ ID NO: 207595 - DNA, 1056 bp, Klebsiella oxytoca
atgcacgctaattcaacctctttttcctctaaaaaagcgcttttggccattgctggcactactgctctactgcttacttccgggttttccagtgcggcaaaaaccgaataccctctgacgattaaaaactgtggtcgcgatattaccttcaatcaggcaccaacacgggtggcaacagtgggccagaacagtactgagattctctattcattgggactggccgaccgagtggtaggcacttcgctgtggtttggaccggtactgaatacttataaagctgcaaatgagaacgttgccgttattgcgcaaaatattcccagttttgaagggattgtggctaaaaaaccagatttggtcgccagccagtttgagtggcaaatcggccccgcaggtacggttgcctcttacgaacagtttagtgaactgaaggttcctgtttacaccgctccggctgactgcgcgaaagataacgaagatggcggtgatggtgttcgtaagcgcatgtttgatattgccatggtgtatcaggaagtcgccgatctggcgaagatcttcgatgttcaggataaaggggaggcattgattgacagccttaaagcacgtgaagtcgcagcgaaaaataaaattaccggaatggataagaatgtatccgtcgtgttctggttctcaagtgctgatctgcagctcgatccttatgttgcagggaagtttggccccgctgcatggatagcccagacgctgggggtgaaaaatgtgattgattctgcagaagagtggccaacggtaggttgggaaaccatcgctaaagctcacccttcagttattgtgctcggtgagatgagtcgtcgccgattccctgctgatgactggaaggtcaagatggaatacctcaagtccgatcctgtcgccaagctgcttcctgccgtcaaggaaaaccatctgccagttattgatgtacagacaatgaatgctgggatcagaaccattgatggggtggaaaaactggctgatgcccttgttgaatatggcttagcgcatccgcaagcctctcattaa

SEQ ID NO: 207596 - DNA, 1068 bp, Klebsiella oxytoca
atgagtgattctcgcaggatgcgtcgcgctgttggtcaacttgtggtaagagttggtgggcatgccctctgggtcagcgcgctgatttgctgcgtactgttagcaggaatttccattggcgaaacgcttatcccctggcggcatgtactcagtactttggcaaatcatctttttgatacgcactatcctgtcgatgcactggatgccgggatcatctggaactaccgtctgacccgagcgctggtttcagccagctgcggtgcgtgcctggctgtttccggcgttgtattacagtctctgttacgcaatgcgcttgccgaaccctatctattggggatttctgccggggcatccaccggtgcagtgctggtagctctcaccgggataggggccgggatcatcagtatgtcattgggggcttttataggcgcgctgacggcatttatgttcgtcgcgttattagcgatggccgcaggcggtagacagggcggtggtgtgacaacccaaattattcttgccgggatcgccagctcgcaacttttcaatgcgattacgtcactgatcatcacccgctcagcaaacgccgagcaggcgcggggtattatgttctggctgttgggcaacctgagcggcgtgcgctggcccgacgttgtcttagccattcctactgcactgatcggtgtcgcgctgtgcttctgttatgcccgccatctcgacgctttttcctttggtgcagaatctgcggcatcgctgggcattccggtaaaacgtacccgtgccgtgctgattgccgccgtcaccggtatgacggcgatcatggtctctattgtgggcgcgatcggctttgtcggtcttgttatcccacacgctgcccgtatgttggttggtaaccaacaccatcgcctgttgccagttagcgcactgattggggcgatttttctcatcattgccgatgttatctcccgcacattactgcccggacaggtattaccgataggtgtgatcacggctctggtcggtgcgcccgcgttttcaatcatcctgatcagaggaaataaggccaaatga

SEQ ID NO: 207597 - DNA, 816 bp, Klebsiella oxytoca
atgaccgtcaatcctgtattgcctcctgtgacctcggctgaagtcgttattgaggcatgtaacctgcgttggaaggtaaaaggcaaagcgatcgttgatgatgtctcgctcagcgtggctcccggcgagtttgtcggaattattggctccaacgggtcgggtaaaacatcactcatttcgttgttggctggtttgctgaaaccctcgtctggacacatcacgctacagcacaaagcactccaccattattcgcgccgccatcttgcacagaaggtggcgctcgtcgaacagcaggctgagacaggtgaacgtattactgctttgcaggccgtttcgctgggacggaccccctggcttagcctgctctcaccctggtccgttaaagatgacgatatcgtgcaaacgatgctggagaaggtcgatctccgtgaattacagcaccgctgctggcataccttttctgggggagaaaaacagcgcctacatatcgcccgggcgctggcacaacagccacagctgttgctaatggatgagcctactaaccatctcgacattcaacatcagattggcctgcttagcctggttaaacgtgaaaagctcacggtgattgccgctctacacgacctcaatcatgccgcaatgttctgcgatcgcatcatcgtaatgacatccggacgtatggctatgcagggaactccttgcgccgtttttacccgcgaaaaccttcatgcctggtttggtattgacgccattgttgaacatgaagcgggtagtgaaaattgttttattcgttaccaaagacctgatgaattttaa

SEQ ID NO: 207598 - DNA, 441 bp, Klebsiella oxytoca
atgaaatacctcaaacagagtctgaaagttttgtgtttacttgccatcgcctcttcagccttcgcacaaactcacgaagtgttgatgaaaaatcgtggatctgcggggccaatggtctatgagccggattatcttgagatccaacccggtgatacggtgaagtttatccgtaaacataagagccataacgcggcttcaatcgcagaattgtctccggcagattatcctggttttatgggtaaaatagatgaagagatcgaagtgaaatatgacaatgccggattttacggcatcaaatgtacaccgcattatgctcagggcatggtgatgctgattaaagttggcgatgccactttaccggacagctaccgcgcgtttaaagcgccgggaattgccgataaacgcttccaggatatctacactcgtatagacaagcagtag

SEQ ID NO: 207599 - DNA, 552 bp, Klebsiella oxytoca
gtggcggataacaaacataccggtgatgaaattcaggggcagcgcagggaatgcctgtgcagattgacgaaattcgtcggtgcggcaggtgttgctgctgctgtctggccgctggtttcggccttgggtccggatgagaaagcgcttagggagaatgaaccgattgatgtctctctcgcagggattgccgctgggcaaacagtcagacgtgtatggcagggaaagctaattcttattcaccaccgcacacctgatgagattgttgctgcaagaaatgctgactggcacacgcttgtcgatccacagtctgacagcgagagggtctctgatgcttatcctcaatggctggtggttcagggatactgccctcatgccggatgtgtacccaatgcccgatctggagggcagggctgggtctgtccgtgccatgggtctgaattcgatacctccggacgtgtaacccgtggaccggctaccgtgaatctggtcatccctgactacgcctttcatcccgatggtctgaccctgcgcatcggcgctaaggaagcctga

SEQ ID NO: 207600 - DNA, 1161 bp, Klebsiella oxytoca
atgatgagtgcgcgtgcctcttcgctccctgggcgtatcccttttcctcgctcggttgccggaatctgggtattcgctatcggtgctatcctgctggttatgctcgtcgtgcagatccttacgggtatcatactggcgatgttttacgtaccgacggctgagctggcatatgattctattattcatattatgcgcgcggttcgccatggagagctgttgcgcaatacgcatgctattggcgcgtcactctttttcttttcctgctatctgcatatttttcgcggcatgtactacaacgtgtaccgtaagccctggacgacaatgtggataattagcgtcacgctatacatcctgctgatgatgaccgcatttctgggttatagccttatctgggggcaaaaaagctactgggcggcaacggtcattactcgctttgcccaggctattccgtgggtgggggatacgctttacgcatatttagtcggcagccatacgccgggtacgccgatgcttggccgcttttttgttatccactttattcttccctttgtaattgtcatggtgacggttttgcacatacgtaccgtacagtcggcatttgcacaggcgatgaaaaagaggtttagcgagaaagagtccagaagcctgctgttcgattacaaaattaccgatcttgatgccatcaaaatcaccatttttttgatgctcttcgcctggtttttattcttcgctccgcactatctaagtagtgccgataactttattcctgcggatccaacggttaccccagcgattgttgcgccagaatggtattttcttccctttttctccatcttgcgttgctttcctaatgaattcgttgggttaactgcgatgtgtgggtcgatactgattttctatttccttccctggcttgatacttcccgggctcgtttccgccattacagcaaactggttaaatgcggattctggctgtgggtcatcaatgcctgttttttaggctggttaggatcgaaagcgctggttggtcccgaccttgttgacggtttccgtaatgaagagggctggatccgtgctgcatctcagctttcgacgctgatttggtttgcctggtttttaatcgtattaccctgccgtcgttttctggaaaagcaggactga

SEQ ID NO: 207601 - DNA, 804 bp, Klebsiella oxytoca
atgaatcgattattgaaattcagtgttctgtgtttttccctgttgggactggggtctacctgcgcacaggagcctacgcccgagagacaggactggagctttagcggcatcaatggtcagtatgataaagagcagcttcggcgtggcctgcaggtttatgaagagaagtgtcgcgcttgtcacggcatgaagtaccttacttttaggtcattgaccaggtccggtggcccggaactcacggttgaagaagcaaaaagtatcgccagcggctatcagttccctgatattcaggatgacggtcaggttggtgagcgggacggtacgttaaatgacagcttcatatcgccttacctgaacgagcgggaagcacgataccttaacaatggcgctgagcccgttgacctgagctatgtcgtccgcgctcgttcatacgatcgcggattcccgcaattcctgtttgatgcttttctgccctatacggagcagggggcagattacgtctacgcgctgttaaccggttatctgccagcggatcccgaactgaaggctaatcgctactttcccggcggtatgattaacatgccgaaaccgcttacgaatggagagattcaatggaatccaccatcgcaaaaagctgaaacggaagagcaatatgccagggatgttaccgcctttctggcatgggcagccgatccagagctctcagaacgaagaccgcagggaacttacgttatgagctatctggccattatgctggggttgctatggatattgcgacgaatgaagaggcgctcgccgaaatga

SEQ ID NO: 207602 - DNA, 618 bp, Klebsiella oxytoca
atgcttgaagccagaaagctcttctgcgagagagacgaacgaatattatttaaagatttaacattcgaggttaacgcgggggaatggatacaaatcaccggaggcaatggtgcagggaaaaccaccctgttgcgcttgctgaccgggctcgctcgccctgatgccggggaggtatgttggcatgggcaaccgctgcatcgcgtgcgggaatgctaccatcaaaatctattatggattggccatcaatcggggatcaaaacccggctcacaacgcttgaaaacttgcgcttttttcatcgtaacggagatagtcaacaatgtcttcgtgctctggaccaggtgggtcttgccgggtatgaagataccttagtgagtcagctttctgccggacagcagcgctgcgttgcccttgctcgcctctggctgacgggcgctacgctctggatcctcgatgaaccctttaccgctcttgatattaatggcgtagatcgtctgacgcagcgcatgtcgcagcatacggcgcagggagggagggtgattctgacaaatcatcagtcaatgaatgtgacaaccgacaatattcgccggatagcgctggctggcgagagggtacggtga

SEQ ID NO: 207603 - DNA, 660 bp, Klebsiella oxytoca
atgatatggaaaattttacgttttgagctgcgcgtggctttgcgccactgcgcggaagttgcgaatcctctgtggttcttcttgatggttattacgttgttccctctgagtatcggccctgaagcccggctcctggcacgcctggcgccgggcattatttgggttgctgcgttgctctcttcgctgctggcgctggagcgactttttcgcgatgacctgcacgatggtactctcgaacaattgctgctgttgccgctgccgttgcctgcggtggtaatggcgaagatgattgctcactggatggtgaccggactgccgctgcttattttctcgccgctggtagcgatgctattgggaatggacttctatggctggaaaattatgacgctgacgctattgctgggtacgccaaccctgacctttctcagtgcgccaggcgtcgggttgaccattgggctaaagcgcaacagcgtactggtcagcttgctggtactgccgctaactatcccggtactcatttttacgactaccgcgatggatgcggcttctatgcatcttccggtagaagggtacatcgcgattctggtggcgctgctgactggtagcgcaacaataagtccgtttgtgacggctgctgctttacgtattagtttgcagtag

SEQ ID NO: 207604 - DNA, 738 bp, Klebsiella oxytoca
atgtggaaaacacagcatcaattggtgaatctaccgcggatttatcagttctgttgcgtgctggctccgtggatgggcgtcgccagcacgctggtattggctgcaggttgggtttggggattcggtttcgcgccagcggattatcagcagggcgacagctatcgcattatttatctacacgtaccggcggcaatgtggtcgatgggaatttataccgcgatggcggttgccgcgtttattggtcttgtctggcagacaaaaatggccaatctgatattggtcgccatggctccgaccggcgcggtgtttacctttattgcattggtaaccggctcctcatggggtaagccgatgtggggaacctggtggatttgggatgccagattgacctctgaactggtactgctgtttctttacgtgggtgccattgcgctttggaatgcctttgatgatcgtactctggccggacgtgcggtgggcgttctggtgctgattggcgtcattaacctaccgattatccactattcggtggagtggtggaatacgctacatcaaggttcaacgaatatgcagcaaagcattgatcctgcaatgcgtatgccgcttcgcctggtgattctcggctatctgctgttgttcatcatgttaacgctgatgcgcatgcgtaatctgattttgatattggaaaaacgccgtccgtgggtaggtgagctgattttaaaaaggagttgtcaatga

SEQ ID NO: 207605 - DNA, 195 bp, Klebsiella oxytoca
atgaccagcgcatttgcatcctggagtgatttcttcgctatgggggggtacgccttttacgtctggcttgcggtgttgatgactatcattcccatggcgatgctgatcgtacatagcgccatgcagcatcacacgattttgcgggatattgcgcggcagcgcgcgcgtgaaatgcggatgcgagcggagcggtag

SEQ ID NO: 207606 - DNA, 480 bp, Klebsiella oxytoca
atgaatctccgatataaaaatcgttaccggatggtctgcgcggtgctgacgggtctgacgcttaccatagcgctgaccctctacgcgttacgttcgagtatcgatcttttctacacgccgggagagattatttacggcaagcgtgaaacacaacggctgccggaagtgggccagcgcctgcgcgtcggtggaatcgtgatgccgggcagcatgagtcgcgatccgcactcgctgaaggtgaatttcagtatttatgatgcagaaggtacggtgacagtggcctacgaggggatcctgccggatctttttcgcgaaggccagggggttgtggtgcaaggcgagcttggcgagaaaaatcatgtgcaggccagggaagttctcgccaggcatgatgaaaactatacgccgccggaagtagaaaaagcgatgcagaaaaatcaccgtcacctgaacagtattgctcaggataagtcatcatga

SEQ ID NO: 207607 - DNA, 1938 bp, Klebsiella oxytoca
atgatgccggaaattggcaacggattgctctgtctggcgctcagcgtggcgttacttctaagcgtttatccgctatggggtgctgcgcgtggcgatacgcggatgatggattcggctgggatttttgcctggctattgtttgccctggttatgggggcctttctggttcttgctcatgcgttcgtggtcaatgatttttccgtgacttatgttgccagccactccagcacgcagctgccgccctggtatcgcgtggccgcaacatggggagcgcacgaaggttccctgttgctgtggatgctaatgatgagcggctggacgtttgccgtggcgctatttagtcggtcaatgccgcgggatattgttgcccgcgcgttgtcggtactggggatgattggctccggttttctaatgtttatcttattcacctctaatccgtttgcccgtgtgctgcctgattttcccgttgagggtagcgatctgaacccgctgttgcaggatccgggactaatttttcatccaccgctgttgtacatgggatacgcgggattttcggtggtgtttgcatttgcgattgcagcactgctgagcggacgactggacagttccttcgcgcgcttcactcgtccctggacgctggcggcgtggattttcctgacgctcgggattgtgctgggttccgcgtgggcctattgcgaactgggttggggcggctggtggttctgggatccggtggaaaatgcttcgtttatgccgtggttagtcggaactgcgctggtgcattcgctgccggtaacggagcagcgtgccagttttaaagcctggacgctgctgctcgctatttgcacgtttgcgctttgtctgctggggaccttcctcgtacgttccggaatagtggtttcggtgcactcatttgcctcagacccgtcgcgtgggatgtttattctcgcctttatggtggtgacgatcggcggttcgctgctgctgtttgctttgcgaggacataaaattcgctcgcgggtcaataatgcgctctggtctcgcgaatcgatgctattgggtaacaatgtgctgcttgttgccgccacgctgatggtgttactgggaacgttgctgccgctggtgcacaaactgctggggctgggctctatttcgattggcgaaccgttctttaatactatgtttacctggctgatggtaccgtttgcgctactgctggggattggtccgctggtgcgctggggacgcgatcgtccatgcgcactgcggcggctactgattcttgtgctagtgagcacatttatgctgtcgctgctgtcgctatggctgtttgaaaacaagattgttgcgatggccgtggtcgggatggttatggcgagctggatctttgcattggcaatggcagaagtcgtccgaagagtatcgcgtgggacgacaatcacgcttagctactggggcatggttgccggtcacgttgggctggcggtgactattgttggtattgctttgagccagagctatagcattgggcgcgatgttcgcatgatggctggagatggtgttgatattcatgaatatcgcttcactttttttgaagttaaccacattaccggtcctaactatcgtagcgctgttgcgaccattaatgtgacgcggcgtggtaaagttgaagcagtactccgtgcggaaaaacgcacttacaatcgtaccagaacgacgaccgccaaagcggcgattgacggagagataacccgcgatctgtatgctgtactcggtgaagagttagacaacgggacatgggccgtgcggctgtactacaaaccgtttatccgctggatttgggccggtggggtgctgatggcgctggggggattgctgtgcctgtgtgatccgcgctatcgacagcgtcgttatcaacggcctcaggaggaagcgtga

SEQ ID NO: 207608 - DNA, 558 bp, Klebsiella oxytoca
gtgaagcgtatcgtcctgctgattccgtttattatttttatcaccattacgacggtgctgctatggcaactggttcgtggtgctgaaggcgaggagccgggtaaccttgagtcgacgttggtggggaagccggttccgggctttaggctcgagtcgctggaaaatcctggccagtatcatcaggcggatgtactgacgcagaacaagccgatattgctcaacgtctgggcgacctggtgcccgacgtgccgtgctgaacaccagtacctgaaccagctttctgcacagggaattcgggtgatcggtttgaattacaaagaccagcgccagaaagcgatagcctggttaaaagagttgggtaatccttatacgctgagcttgtttgatggtaatgggatggtcgggttagatctgggcgtctatggcgcaccggaaactttcctgatcgacgggaaagggattattcgctatcgccacgtcggtgctctgaacgatcgaatatgggagcgtgaaatcaatctgttatggcagaaatacagtaaggaggctgcacaatga

SEQ ID NO: 207609 - DNA, 789 bp, Klebsiella oxytoca
atgagattcttgctgggattgctgatgctgataatttccggttccgtgctggctaccattgatgtgatgccatttaagaatgaggcacaggagcagcaattccataagctgactgaacaactgcgttgcccaaaatgccagaacaacaatattgcggattccagttcggtgattgccgccgatctgcgccagaaggtgtatgagctgttgcaggaagggaaaaccgatagggagatcgtcgattatatggtggcacgctatggcaatttcgtctcctacgacccgccattaacttcgctgaccattctgctgtgggtactgccgattactatcatttttacggggtgcaggattatttatgtccgctcgcatcgtcgagtttggctcaagcaggaggcatttcctgacaaccctcctgtagagggaaaactgagtggatttgtcatttatgtgccgggaattattattgcgctggttctcggcgcgctcagctattatcagacaggtagttacaagcaggtaaaaaaatggcatcaggcaactgagcagatgcctgagctactgaatcgagccttgaatttgaaagaaccccctcttaatcaagaagagatagcccgcctgacactggctttgcatgcacgtctgcaaagcgatccgggcagtgtcgaaggctgggtgatgctgggtcaactcgggatgatgacagggaatattgatatggctattgatgcctatgtcaatgcctggcaactcgatccgatgatagctgatagtgtagcggcaccgtaa

SEQ ID NO: 207610 - DNA, 147 bp, Klebsiella oxytoca
atgtacaggccggactcttccaccaacaaagagcagtcaaatgctcagaccgagatccgccaactccagaaggacctgaagcacgcagcgatatttttggaatgtacgcttggttttcttgttcttaagtcacctgttgtgcgttga

SEQ ID NO: 207611 - DNA, 129 bp, Klebsiella oxytoca
atgaagtttattgctgcctccctcgaatccggggtcatgaccctccccctttttaccgagcgttgcgccgccggttttccatcgccggcggcagattacacggaagcggagctgggcctgaacgagtaa

SEQ ID NO: 207612 - DNA, 132 bp, Klebsiella oxytoca
atgcgcggcgccggaggcgcggcgatgtttctctccggcaggcgcagcctgcccgggttttcgcgcgggctgacaggcgccctccggcccggacgcctgccaccatgcttactgaccttttccaccctgtaa

SEQ ID NO: 207613 - DNA, 321 bp, Klebsiella oxytoca
atgcgtatgtctgtactatttgctctgacgtttattttaactgcccttaacctggtatttatgccattccatcccttcatgatgttatgggctttcggcctttccatcgtttttattcttgtcaatgtgattgccgacagactgcgtctgtggtccggtattgcatgggcgatggctgccgccgtaatggtcatttttatgcttagcgatgcacagcccgatgaagaaaaccgtgtgctcatcagttcattcgcatgtctcgtctcagcatggtatgccgtcgttcagctcagaaaagagaagggcgagtctctgtcctga

SEQ ID NO: 207614 - DNA, 417 bp, Klebsiella oxytoca
atgagaacctgggttgatacggatgagatttgtgagaatacacggaatatcgttaaaatgttatccacatcggaagttgataaattcagtgatgtcagcgaaaaaatactattactggaggagtgtctcgatgaggaagaatatgaatgtggttggttctcagatatagcatttaaacttctgaaggactttctcagaatccggattaaactcagaaagacagaccccgggcatcatctgattccggtgctgacgctggctgtcgatggactcagagaacaacttaaccttaactggacgcacgttaaggagttacttgagatggatgcagtcctggggcgtacccgcaactttttctggtctggttgcgcgacagcaatgatgcttgtactttccgctatcatttatatggcatga

SEQ ID NO: 207615 - DNA, 645 bp, Klebsiella oxytoca
atgcttcggtatttcgctctgcgttttgaacagcagttgctgtgttatttatccggcggtgtgctggcgttatttctgacaatactcattccgtctgtgacggtcatggttttcgtactcatcctggtcctgtcgacggcggtttgctggaccgcgctggctctgtacatctgcgataccgaccaggtaagaaaaacggaggtatctccccgggtccgggtacgagacgggtttcagattgtggccatcctgccgcgtcatgagaaggcccggattgagtgggacattctccgggatgatgaggtgtttcgtcagcaaaggcgggagcttgttgccctgaccgggcgggttatccgccgggggctgttacatgcgccggtagtgatgctggtcggtgcggtcattctcgcctgctgttttccgcaggacgccgtccggctggtcagtgctcttcgggctatgccagctgcagagcttgtgcatcagaccggcttcgctctgcgcagtgttctgctgttgtccgtgatatcggtcctgatagctgacgtggtggccgggagaggattactgaatgcctttcgccgtgccctgctcgacaggctgccggcagaagcctggtgtatcagaagagggacagaacgatga

SEQ ID NO: 207616 - DNA, 213 bp, Klebsiella oxytoca
atgaccggacccgataaatataccggcaggacctgctctgtacggttacttctctcgccggatggtctggtgctcatggcaactgcgaccggaggtgatgcagagctctgtaaagcggttatgtctgccattacacgggttaaactcccgcctcctcccgatgtggagacgtatcagcagttcagaaaccctgttctgcatttcagtccctga

SEQ ID NO: 207617 - DNA, 603 bp, Klebsiella oxytoca
atgactactaaattacatcccggatggaaacctggttttggtattgtatatacctggtttggaatggataagaatgggaggattggtgtttttgtaaacaattgttgggggcaaattccttatatccttttacaacaagactctgctgaaaatattcttgatgccatatctgagtatattcacgaagaatcagaggattatactacctttccacctgataaaaatggtgactttagtgttgatatgtacccagcctggactggacctaaaactaaagaaaaggtaaagcaactctatgatgaaatttctggcaataaaaatccattgagttatgggaatttatcaaaaaacaaagggttttacgtatactttgctgttgaaggtaactctcctggagaggattatccagttggttatgatgaaaaaactgatatgggggattattatcgacaccttgttcctaatgtattcggtagtatagaagattttcctgatgaactaaggtccgggatcgttgtatcaaacacaattaattttgatgtcgatagattaatatctaataataatgtaaataatcacttcaatactatgtatactaagtaa

SEQ ID NO: 207618 - DNA, 576 bp, Klebsiella oxytoca
atgaaccgcaaacaatttattcagagccggggcgccacctgtcgtaactggacctggagctggtcttttattaatcatgacgaccagctggtcatcttcggggcctgggacgttgagcgcgaccaggagcgcgcagtcatcctgcgggaagagtgggagtacaacgccagactcagaaagaatcccggttacacccaggcagttgagcatatcggttatatcctcgggggatacgacctctacaccttcaatatggtgcaggccaacagtccggatgcgccggacgtcgcggtcattcaggatttcgagcgccggctggaaaaacgctttctgagaaaagagggcgccgtctggtacgccgacttcacggccagtccgtaccctgaggaactgcccgttgccggcagttacagtgagggtgctacaaaaaccatcacctttaatgcatacgaacgcgacccggccgccaggcgggcctgtattgcgcatcatggtgccgtctgtcagtgctgcggattcgattttgagaaaacctggggcgagcacgggaaaggatttatccacgttcatggttag

SEQ ID NO: 207619 - DNA, 396 bp, Klebsiella oxytoca
gtggtacaccagtactacgaccacaacacgcagcagcataaacgccagaagctgagccagggggagatgctgcgccgttacgtcagccatatcccggccaggcattttaaaatggtgcgctactacggcttcctggccaaccgaaaacgtggcaagttgctgccgaaagtctatgaagccctggaaatgacgccacgcgagaaaccgcagaagccggggtttgcggtgctgatgaaagcgttcctgggtaccgacccgtaccagtgcatcctgtgcaagggccgactgcgttttgccggcgccatggcggccgagcacgccacaaaaatgctctcagacaggctgcagcgcatggctaaaaaacgatggcttcagaccccttttctggataagtga

SEQ ID NO: 207620 - DNA, 492 bp, Klebsiella oxytoca
atgtacataccgcgacctgcaaagcttctgttccagcacgacgagggctgggaacgcttcctcgagaagaatggccatcagctcaccgactggaccaaactctccgtcgagcgcatgctggcctgcggaacctgcgccatgggggtacgacgctattgctgcagttcgcctgactgtactcactcacgctttctctgccagacttgcaaatccaaagcctgcagcagctgcggcctcaagggcaccgagcaatggatcgccgaacagcagcacattctgcccgactgcgactggcagcacatcaccttcaccatgcctcacctgctgtggcctttcttcaacaacaactggccgctgctcaacgacctgtttcgctgcgccacccgtgccatgctcaggcacgcgcgcaagttgggcatcgaggtcggcatcttctgcgccctgcacacctacggccgccagctcaatcagcatccgcacatccacgtctaa

SEQ ID NO: 207621 - DNA, 273 bp, Klebsiella oxytoca
atgctagtgaccatgtcagataaaaaactcaaccggattaatgtcattcaggcagttattgaaaaacgtatgcgtcgtcgtgatgctgctcatcaactggatcttaccgagcgtcagacccagcgtctgatgaatcgctttcgtgaattcggtgctgcaggactggccagccttcgtcgcggacaactaggtaatcaccgactcccggaatcactgaatttcgataacgtctttcagcgcccgattctcaaggctcagataccacgcaggtga

SEQ ID NO: 207622 - DNA, 1329 bp, Klebsiella oxytoca
gtgatccaaattatgctgttgttgtttggcgttgaatttgtaagagataaagcaaaatatctgatgcttttcgggattttgtggagcgtgcttggcgtgagtatttttgtagacggcttagatggagtaacatatttccctttacgcacgtttggtggattactgctgcttgaaagtcttgtaacgctcagcatcgcatccggcggcgtgggggcgcaaaaagtcgtgctttacttcaaggggggaagcttttgcttcgtagccatattaatcctcccggataagccctacagtaacctgctgctggctatcatttttggcttaatcttattcgtgatcggcctgttcgtaatttcttctgcgtgggtagtcaggtatccccagtggaaaaggactatcctgagcggtgctgcgcaaattctgtttgcgcttttcatgttcaacccttatccgacgcactacaaagccacggtaccggttttcctaggaacgttgatgttaattagtggcatcaatacgatgcggcttgcgctccgggcgagtcaggttcgtgaaggaggctcgatattctacctgctggccccttgtgctctgcggtatgactttaaagagcacccgactcccccccccgatgaccataatggtgtccgtactgatttcagcggaccattaacggttcatatctggacaccggagggcacagctaatacttcccccattccccgacccgtaattaaccgttacatcgcggcggtggataccgatggcgttatttccaccgggcatgccgcacttgagctgcagcctgatatatatatcagcctctatcccttggccgatatcgaccgctcgccctccgaattccttaacaccctgaaagcgacccaagataataacgtgcctggtatgttccaacctgactataccaccgaggtggcaaactggtgctactcggaccgcaagatcctcttttatcagtacaacggaatggcattgcagcaatactggcagagctgtcggatgaacactacttacaacttaacctaccgtaattgctcaagcagcgtggcgtatgcgttagaggcttcgctggagggcgtgctttctgaccagagcaaaaacctgcgagccacgctgcgaacgctgttcatgcccgagttatggattgccgcccagctgcgtaagcgtgcactctccatggcctggacgccggggctagttatggattactcacgggcgctacgcagtattgttcatcctgaatctgagccttggtatcaacgactctccgacaaatggcgtgaacgccagagagctaggagatcgtag

SEQ ID NO: 207623 - DNA, 1146 bp, Klebsiella oxytoca
atgaaatttgttaacatagaagacttacgatgcagggcgaagtctaacctgccgaaaatattttttgattatcttgatggtggagccaatagtgaaacgactcttcggcggaatattacagattttggtcattggtcgctacgagaacgggttctgagaagtatttctagtgttgacctgagaactagtttctttggtgaagcgcatagtctgccggtgatgctggggccagtcggctttgccggaatgttatctaaaaaaggggagattgctgcaggaaaggctgcagacaaggcaggtattgcccagtgcctctcaactttttcaatctgctcactggaagatgttgctgcagtaaggaaggggccactttactatcagctatacgtttttcgtcagcgtgacttaacagaagatatggtttcacgtgcaaaaatcgccggtatcaaaactctgattatcacagttgatactgccgtaactcctccacgcgaacgtgatgttcgcaatggttttcgtgcaagaaaattcccagacctgtcgatgctgatgagtatgctaagacatccttgttggtgttcagacatgatttctcaaggtgttccacgaattggtaatatagcacgttaccctgatatgggatggtgggtgatggatcagtcggttaaattaagcgaacaaattgaccccactctttcttggaatgacatccgctggtttcgtgatatttgggatgggcgtatgattatcaaaggcataacatctgttgacgatgccaagcaagcccttgactgtggcgctgatgggctgataatttccaaccacggtggtcgtcagcttgatccggcaccttcaaccatcagtattctacctgaaattacacaagcagttggaaaacagactgagataatttttgacggtggtatacgacgtggtgctgacattataaaagcacttgcacttggtgcgaatggtgtctcactgggcagagcatatgcctatggattaggtgcaggaggagaagctggggtgacccgggctatcgaattgttaaaaacagaactcgcatactcacttatcctgatgggaatcggcagtattgaagaattacgtgcttgcggatgtgatgctcttcgtaaacagtga

SEQ ID NO: 207624 - DNA, 1671 bp, Klebsiella oxytoca
atgaaatcagtaggttcctttcttgtagattgcttgattgagcttggtgtctcgcgcatttatggtgttccaggtgattacaatttggaatttcttgagctaatcgaaagctccaatcatattaaatttattgggacttgcaatgaactcaatgcttcctatgctgcggatggtgaagctcgaattcagggtatttctgttgtccttacaacctatggggttggagatttggctgcattaccgggtcttgctggcgcatatgccgaaggagtaccagttttgtcaatctctggtgcgccacctttacacgcaattcgttcaaaagcattgttacaccatacgttagctgacggaaattatgaaaatgtcatgaactgttttcgtgaattcactgtggcccaggcactgattactcccgagaatgcagtagatgagatcaagagggtaatacaggcctgctggagggaaaaacgtcctgcgtatctgcaattaccctccgatgtttgttccattgaaatagacacgccgattcaagccctaaaaatagatataaattcaagtgagcgtagtcaattggatgctgcagcaaacctgataaccactcgtctcatcagagcaaaacggccagtattaatccttgatagtatggtacgtagccatcaattaaaagatcaggttggaaaactggtagatacgctgaacattgatttcacgacactaggatcagctaaagcaatattaccggaatcaagtcctcattaccttggtctatacaatggcaaggcatcgtctcaggctcttttcgacagaatatcaaaagccgatcttattctcagtctgggggtacgttttgttgattccacttcagcctggttttcacaatcactgaatccagcatctatcattgatatacaaccgttttcagtcactgcagataatgaatactttgccaatgttaacgtcagtgaattactggatgctatagtaaaaaatatgtcgtctgttgtttcatccattcagataagcagtgctgattccggttcttcccagaaagatcgcattgaatgtgaccagaaatggtgccaaaaaactttctggcaatatataaatcattttatctcatccggagacgttgttattgctgaaaatggcacctcactcaccggtttactgcaattgaaattcccggctggatgtgattttgtttgtcagagcatctggggggctataggctacacgttacctgctctgttggggacatcacttgcagcacaagaacggcgccagctactatttatcggcgatggttcttttcaactgacagttcaggaactctccacaatactcaggcataacctcaatcccgtcatttttctgattaacaataagggatatacaattgagcgaatgattcttggcgaaagttcttcttacaatgacattgctgactggaactacactaaattaccttccgtgtttgcaccgtctatgcccgttcattcagtggtagtgagtaatattcaggaactggaagatgcactaaatatagctactgtcccggagaaaccgattttcattgaagtaagattcgatataatggattccccgtacggtatgtctgcttttggtaaaatggccagggattacgattataaacccgtagttaagtaa

SEQ ID NO: 207625 - DNA, 237 bp, Klebsiella oxytoca
atgggccgttttgcagggatacttacagaagcttctggtgaaatcgaaacggcttacccgggttatctcggatcgcaggataccttctacgttgttagcaatctgaaaggcatgggccgtatctaccaacagactttcgtggatacgtactcgaaagtggcccactgcaagctgtatacgagtaaaacgccgatcactgcagccgacctgcttagtgaacgggcactgccgtactaa

SEQ ID NO: 207626 - DNA, 549 bp, Klebsiella oxytoca
atgaaacatcttatagcaacagcagtcatggcatcatctcttcttttcggcgctaatgcactggcggcctcatcgtcggcagcgcagaaggaaaactcacctgaacaatccggtggtacatttaaatattccacagagagtaagattgctgctgagcagaagaacgtgtatgacacgattgtcaagtatcagaatgcactgaatgccggcgatacaaaaaccatccttggcctgtttgctgatgaaagctattcacagtggaatgatatgctaacggctgacaatacggaaaaacgccaggggcagtacgatgctcttttcaaacgtgaaaaatttgagaccgatttcgcgtttgactctatctggatcaacggagataccgcggtcgtccgtactcaccaccatgtgggttctgttgtgacgaactttaaagagcagaaaactattattgacctgaaccgtgaagtttttgttctcagcaaaattaatggtgaatggaaaattttcctctataccttcaacaccaacccgcttcaaggagtggcgtaa

SEQ ID NO: 207627 - DNA, 642 bp, Klebsiella oxytoca
atgcctgcaaacatgaatctcacccatcacgcacgaaagactcgcagttgcagtcctgaaaaaactgccaggacacgacagcagatagtccgggcagcacttgaggtattctctgcacaagggtttgctcgcgccagcatcagcaatatcagcaaacgtgcaggagtagctaaaggcacggtatataactacttcccaacgaaggaatcactgtttgaagcggttctgaaagagttcattgccaccgtccgtactgaactggaatcttctccccgccgggacggggaaaccgtaaaagcatatctgctgagagtgatgttacctgccgtcaggaaaattgatgacgcatcaaccggcagagccagaattgcacgcctgattatgactgaagggagtcgcttcccggtgatcgcacaggcctatttacgggaaatacatcagccactacagaaagccgtgactcagctgattctggaagccgcatcagccggagagttgaaagcagaacatctgctccgcttccccagtttgctgctggcaccaaactggtttggcatggtgtataacgaaatactgaacccggcagcaccagtcagtacaggcgatctttttgaggccggaattgatgtttttttccgatag

SEQ ID NO: 207628 - DNA, 291 bp, Klebsiella oxytoca
gtggcgcagcagagctacattctgcccgactgcgactggcctctgcttagtgccctgttccgtgctgccatccgggccatgctccggtgggcccgtaaacagggcctggaggtcggtatcttctatgccctgcataccccggcagactgccggggtatgcagggcatatcagcgataaaactcagtggcagcgatatctgcaggcgcagtacggacgacgctggaagatgcacttcgcaaagaagacccgaggcgcctggcgaagcgtcaaataccggggccggtacctga

SEQ ID NO: 207629 - DNA, 192 bp, Klebsiella oxytoca
atgattcatactaacaatcccatcatcaaacacaaagcggtctactcaatctggcagaagagctcggtaacgtatcaaaagcctgtaaaatcatgggcgtgtcacgcgacacatattatcgctacaaggagctggctgaagaaggcggtcttgacgcgctggttaatcagaacctcagagtccccaacctga

SEQ ID NO: 207630 - DNA, 408 bp, Klebsiella oxytoca
atgggcttaatctgggcgttattcagcgtcggactggtgagccgtttcgatttcaccagaggcttcgtcatcgtgcacctttttctccagcgccacgatttgagcaacggtaagcacaatgccttctctggcaactttttcttcaagtgctttcaggcgcttacggaagttctccaggtcatgtcgttgccagatggagcgcacgacgctgccggagataaacacgccttttttacgcagctcattactggtccggtcctggccatcagccgggaactcaacaaccgtgcgttcagtggcctcatcggcacggttcttcaggttggggactctgaggttctgattaaccagcgcgtcaagaccgccttcttcagccagctccttgtagcgataatatgtgtcgcgtga

SEQ ID NO: 207631 - DNA, 531 bp, Klebsiella oxytoca
atgacgatgtgtcgggtactgaatgtcgcccgggctggattctatgcgtggctgcataaccctgtctcggcgcgtgataaagataaccagcgcctgctgatacttatccgcgactcatattccctgagcggaggcgtatacggttaccggcgggttcatggcgatctgaacgaaatcggggaaacctgcggtaaaaaccgggtgggccgtattatgcaactgaaccggattaaagccgtgcgcggctgtaaagctccgcgtcgtatcgctggcagaccttcagtggttgcgcctaatcgtgtgcagcggcagtttaccgttgtccgggccaatcaggtctgggtcaccgatattacttatatccgcacctggcagggctggttgtatctggcggtggttatcgatctcttcgcccgtaatgtggtcggctggtcgatgaaacccactctctcgctcgcgcgaactggcgctcgacgcgctgatgatgtcggtctggcgccgaaaaccggacggcgaggtcatcgtacatag

SEQ ID NO: 207632 - DNA, 267 bp, Klebsiella oxytoca
atgagcaggttaaaactaattgagttagggcgggattttttaaataaaaaaatcagcgtgaacgaatttgtttctaacatagtaatagccagaagggaatcctatggaagcgaagaagcaaataaagatatagatcattgtgcaggagagctatttattattgccgattgttttaatcctgaaccagacagagaaagttatgaatttgatgaggctggattaagaaatgaggttaaggccactcttgaaaaatttcatcttctttga

SEQ ID NO: 207633 - DNA, 495 bp, Klebsiella oxytoca
atggtttgtcgggttgtattaaattcccgggctatagcgctaatactgattccggcatcaatacgttctgcaactgcttgtttctgttgttcactcagcacgggtggacgaccaaaacgtttacctgaagcctttgctcgagcaatcccggagtgtgtgcgttcaagtagcaaatctcgctcaaattccgccaccgctgaaataacctgcatggtcattctcccggctgcactggtcagatcaacacctcctagcgccagacagtggacgcgaatatctgacgcagccagctgctcaactgtttttcttatatccatggcattacgcccaagacgatccagtttagtgacaatcagcacatcaccattttccatacgatcaagtaggcggataaagccgggacgttcactggcagcaacagagccactgatatgctcctcaatcaatcgctggggtctgatggaaaatcccgcagcttcaatttcacgacgctga

SEQ ID NO: 207634 - DNA, 729 bp, Klebsiella oxytoca
atgaatattgagaagaaaaaaagagtcgctgttgttaccggagcatcctctggtataggtgaagctatcgcacgtgaactggcaggaaacggaattacggttgtgcttttggcccgtcgattcgaacgtattgatgttttggccagcgagctggggcacggagcaattgcgattaaagctgacgtgacagagcgtgaatcgattgtggctgcggctaatcaggttgaacaaacgttaggtggtgtggatatcctgataaataatgccggtgtaatgctaacgggcccttttgattcaagccagcgtgatgaacaccgccagatgatagaaacaaacctcctaggagcaatgacagtaacagaggtatttctcccacaattgcgtcgaaacaagggcgatctcgtcaatatctcgtctgtagcaggtcgggtcgcaccttcagggtttgcagcgtatgcggcaacaaaatgggggataaatggatggtcagaagcacttcgggtggaactacagcctgacattcgcgtcatggtgattgagcccggcgctattgcaacagaattagccgatcatattactcacgaggaaagccagtctgtggcaaaatctgcactggactgggctatcccgccttccgatatcgctgaggtcatagcatttgctgtcaacctgccgaagcgcacgagtatcaacgagatattgatcagacctactgttcaaatgatgtaa

SEQ ID NO: 207635 - DNA, 1173 bp, Klebsiella oxytoca
atgagtcagccaaaaccccgtcctgcacaacgcactgaaagcctaaacgctttcagccgacgcaatttcctgtcttcttctgccttaatgggggcagggttgattttggggagcttacctgacagggcgcatgcaacgtcatcagagccgacagcaaaaccggcacaggccagacaaggttcacagacaatgccgacgcgaaaacttggatctatggtggtttccgcactgggtgccggatgtatgagtatcagcgctaactacggagcggcagcggataaatccctggggataagaacgatacgtgaggcacacgccagaggcgtcacgctattcgataccgccgaagtttatggaccttataccaatgaagaactggttggcgaggcacttgctcctgttcgtaaccaggtctttattgccagcaaatttggatttgatattcaacatggcgggttgaacagtcagccaaaacatatccggaaagtgctggaggcctctctcaggcgtttacgcactgaccgtatcgatctgtattatcagcatcgcgttgatcccggtgttcccatagaggacgtagccgggactatccaggatttgattaaagaaggcaaggttctacattttggtctttctgaagcaagtccttctaccatccgtcaggctcatgcgatccagcctgtcaccgcagtacagacggaatattctgtcatgaaccgcgatccggaacataatggtgtgctggatacctgcgaggagctgggaattggtttcgtcccctgggggccgataggcatggggtatctgaccggaacggtgagcgcaaacacgcattttgatcccaaaaccgacttacgctccacttttgaacgttttactcctgaaaacttagcgaaaaactggccctttgtggaaaagctgaaagctatcgctgacagtaagggcgccacaccgtctcagatcgcgcttgcatggcttctggccaaaaaaccctggattgttcccattcccgggacacgaaatatcaaccatctccgtgaaaaccatggcgctttagagatccagtttaccactactgagttaaacgaaatggataaagctatgtccgggcttcgcgtctatggtggtcgcatgaatcgtgcccagatggatctcgtcgagcctaaagcttaa

SEQ ID NO: 207636 - DNA, 1095 bp, Klebsiella oxytoca
atgacaggtttattttcttcattttcgctgaaagatattacgctacgtaatcggatagcagtttctcccatgtgtcagtaccaggctgttgatggctttatcaatgactggcacagtacccattattccatgctcgcacgtgggggggctggtctcgttgtcgttgaagccactgccgtagcacctgagggcagaattacgcccggtgatgtcggattatggagtgatgaacacatctcagggctgtcgtcgattgccgcagcaattaagacagccggggctgtcgcagggattcagctcgcccatgcgggccgaaaagccggctgtacgccaccatggcagggtggtgcacctctggatcgagatgatacacaggcgtgggagcccgtcgggccttccgccgtccccttcatacccgggaatgactatattccccgtgaaatgaccaaagataacatccgacaaacgcagcaggactttgcccgagcggcagagcgtgcctgccaggctggtttccagtggctggaactgcattttgcccatggtttcctggcacaaagttttctttcctcacagtcaaatacccgttcggatgaatatggcggttctcttgaagggcgtgcccgcttcttactggagacagtggctgaagtccgcaagttctggcctgataatttccccttaacggtacgcctcggcgtggtggaatttgatgactgtcctgaacattctttcagcgaatcactcaaattaatcggctggctgaaggatgccggaattgattttgttgatgtgggtctttctctggcaacgccaggcgagaacatcccgtgggcgacaaactttatgattccatgggctgcacgtgttcgccgggagaaaaacattcctgtcgggacaagctggatgattactcaggctaaagaagcgaatgaatttatacaggacggtaaagtagatgtgatctttttcgcccgcacattgctggctaatcctcactggccatatcgcgcggcgcgggagcttgaaacctccgacccgcacgctgtattacccacaccctatgcatactggttacaaaactggtccgaatga

SEQ ID NO: 207637 - DNA, 909 bp, Klebsiella oxytoca
atgcaggacttttccgtagaacaaagccttaaaattcttgctgagaaaattaacgagattgcacaatacgatggtgatttcacaactgtagttccgtcgttatcggtgcaccgacgaaatgcaccgaccattcccgtgcattgtatctatggcattggcttaggtgtggttattcagggcagtaaagaagtggtgctgggaggaaaagtaactggctaccgcgccgggcaaacactgctcaccacacttgagcttccggtcgtgtcacatgttgcgacggcgacagcatccgcaccgttcctggggatgatggtcactattgagcccgctgctgtgatgcagacggcggcaatgatcccttttcgaccagcggctaaatcatcggtttttgatccgctggccgttaatgagcttgacgcgggacttgctgatacgttgagaagactgctgtcactgaatgacgaaccacctttaattcagcatcttgccccgctcatacagcaggagatcatcattcggctgctgacaggcccctatgggagtgcgcttcgccatatcgcatcaccgggttcgcctgggcaacaaatttccggggccgttgcctggcttaaacaacactttactcagccagtcagcatagatgagctggcttcccgctcgtcgatgagcacgtcatcatttcgtcaccatttccggtcagtgacagggatgagtccgctacagtttatcaagaagctcagacttcaggaggcacgacagcaaatgctgaacagccatcttgacgcggtgagcgcggcgataaaagtaggctatgagagtgcttcccagtttagccgcgagtacagcagagagtttggcgagtcaccgctacgtgatatcagacgtctgcgtgaagaaataaaccagtaa

SEQ ID NO: 207638 - DNA, 579 bp, Klebsiella oxytoca
atggactggttctatattgttttgtttattgcagtatcgcttacctgcatccatccggccggtaataacatatttattttcttaaagcgcgctgaacggtggtcatggatagttttgttcgtcatgttggcagtcagtgttttcaccctccgttatactgatttttatgaatttatgcaaaaatattatctcttgtattcaggttcatggatagtttttctactaagtgcgtcgatattaatgatagtgagcgtcgtgcctactatgcgaactaacctgacattacgaagatactatgaattatatgattaccgtaatcaggggatacgtaccaatagagggatgtttatggggttatgttgtctctcactgatttcatattgtgggtatgcagccgggctttccggggtttgtgaatggatcatttatatgattgcgcctatggatcatctacgttatctggggtgggaatactcatcgcctcatctcaactgggcggcgctcttaatcggtctggcttcaagcattatttaccgtgtaatgtctgaacagtttagaaaccgctacaccaccgtctga

SEQ ID NO: 207639 - DNA, 858 bp, Klebsiella oxytoca
atgggaaacggatggcatgaatggccactggtactgtttaccgtactggggcaatgtgttgttggtgctctgattgtctgtgggcttgcttggtgtgcgatgaaagacgacgctaccgcaagacaacgtcttgtacgcggtatgtttttcctgtggatggtgatgggactggctttcttggcatcagtcatgcatctggggtcgcccatgcgggcatttaattcgctcaatcgtgttggtgcatccgcattaagcaatgaaatcgcggccggatcgctctttttcgtcgttggtggcatttggtggctgctttctattctgggaaaaatgccgcaagcgctgggtaaaatctggctgctggtctgtatggggctcgggattatctttgtatgggcaatgacacgcgtttatcttattgatacggtgcccacctggtacacaggctatacgacgctgacgttcttcatgacggtgttcttaagcggtccaatttttgcggcgttactgctccgcacatcacaagtaaagtttagcggatcgactttcgccagtatcagtgcactggcgctgatagtcagcctggcagtgattgtattacagggaatgtcgctggcgacaatacacagttcggtgcagcaagccgtggccctggtacctgattacgcctctttacaggtctggcgcatcattatgcttgccgctggattaggctgctggatctgcccgttagtgcgccgcaaagaaccccatgttgttggcttactgctgggtcttttactggtacttggcggggaaataattggtcgtggcctgttttacggcctgcatatgaccgtcggcatggcggttgccggctaa

SEQ ID NO: 207640 - DNA, 618 bp, Klebsiella oxytoca
atgacaacccagtatggattttttattgattccagtcggtgcaccggttgtaaaacatgtgaactggcttgcaaggactataaagatttaaccccggatgtcaatttccgccgcatctatgaatatgcgggcggaaactggcaggaagacaacggtgtatggcatcagaatgtctttgcttactatctctccatcgcctgtaaccactgcgaagatccggcctgtacccgggtttgtccgagtggtgcaatgcataagcgggaagatggctttgttgtggtggatgaagatgtctgcatcggctgccgctactgccatatggcctgtccgtacggtgcgccgcagtataatgcgcagaaagggcatatgaccaaatgtgacggctgccatgaccgcgtggcggaaggtaaaaaacccgtttgcgtggaatcctgcccactgcgtgcgctcgacttcgatcatgttgacgaattacgtaaaaaacatggcgatctggccgccgttgcgccgttaccagaggcgcacttcactaagccgggcattgtgatcaaaccgaatgctaatagttgcccggtaggagataccaccggttatctggcgaatccgaaggaggtataa

SEQ ID NO: 207641 - DNA, 2436 bp, Klebsiella oxytoca
atgaaaataaagatacctgaagccctcatgacagcaaatgtaagccgccgtagtctgatgaaagcatcggctgtcagtagccttgtccttgccagtaatgccgtcacgcttcctttctcccggatcgttcacgccgcagatagcatagctccgacacctgtggaagataaagcggtctggtcctcttgcactgtaaactgcggaagccgctgccttttgcgactccacgttaaggatgattcggtttactgggtcgaatccgatacaaccggcaacgatgaatacggtaaccatcaagttcgcgcctgcttgcgaggtcgctcgatacgtcgacgaatgaaccatccggatcgactgaaatatcctatgaaacgcgttggtaaacgcggcgaaggtaagtttgaacgcatcacctggggtgaagcgctggacactattggtgacaatctgcagcgtatcctggaagagtacggcaatgaagctgtacacgtactatatggtaccggtgttgatggcgggaatatcactaactccaacgtcccttatcgtttgatgaactcctgcggaggttatcttagtcgttacggcagctacagtactgcgcaaatcagggccgccatgagctacatgtttggcagcaatgacggcaacagcccggatgatatcgccaataccagactggtggtgatgttcggcaataaccctgctgaaacgcgaatgagcggcggtggtgtgacttactacgtcgagcaggcgcgtgaacgttccagagcgcgcatgatcgttatcgatccacggtataacgacacagcggccggacgtgaagacgaatggctgcccatacgccccggtacagacggcgcactggccgcagccattgcctgggttctcattacagaaaatctcgttgataagccattcctcgataaatattgcgtcggctatgatgaaactactctgccggccagcgcgccacgtaacgcgcactataaggcatatattctcggtgatggtccggatggtatcgccaaaacgccggaatgggcatcccgcattaccagtattccggcagataaaatcattcagttggcccgtgaaatcggctcagtgaaacctgcttatatctgtcaaggctggggcccacagcgccactccaacggagagcaaaccgcccgggctatcgcaatgctgtcagtgctcaccggcaatgtcgggatcaacggtggtaactctggtgcgcgtgaaggcacctgggatctcggcgtcgagtggttttccatgctcgataatccggtgaagacgcagatatcagtgtttacctggactgatgccatagaccatggtgcagaaatgacggccattcgcgacggtgtgcgcggtaaagagaaactggatgttccgatcaaatttatgtggtgttacgccagtaacacgctgattaaccagcacagtaatatcgcccatacccatgaagtgctgcaggacgacagtaagtgcgaaatgattgtcggtattgaacactttatgacgtcgtcagcaaagtattgcgacatcctcctgccggatttgatgccgacagagcaggaagatctgatctcccacgaatctgccggaaacatggggtatgttatcctcggtcagcctgccacctcaccgaaatttgaaagaaaacccatttactggatgctcagtgagattgcccgacgcctcggtccggacgtataccagaccttcactgaaggacgtacacagcatgagtgggtgaaatatctgcatgcgaagaccaaagagcgcaatccggaaatgccggattacgaagagatgaagcaaaccgggatcttcaaaaaaaaatgtccggaggagcattatgtcgccttccgcgccttccgtgaagatcctcagtccagcccgctgaaaacaccctccggcaaaattgaaatttactctgaacagctggcagcgatagccgacacctgggaactgaagagagatgagattatccatccacttccggcctatgccccaggttttgacggctgggaagatcctgcacgtaaaacctatcccctacagttgaccggattccactacaaagctcgaactcactccagttacggcaacatcgacgtgctacagcaggcctgtccacaggagatctggattaacccaattgatgcaaaagcgcgcggcatccagcacggcgataccgttcgggtgtttaacaacaatggacaaatgttgatctccgctaaagtgactccacgcattctccccggcgtaacggcgattggtcagggggcatggttgaaagccgatatgtttggtgaccagatcgaccacggcggatccatcaatattctgacgtcgcatcgaccctcgccactggcaaaaggtaatccatcacacagtaatcttgttcaggttgaaaaaatataa

SEQ ID NO: 207642 - DNA, 840 bp, Klebsiella oxytoca
atgtcgggaggaatgattcaaagtgctaacgttggtgtatcactggcgccgactattacggctaacagcaccttagttattgatttagcgaactatatatcatgtgcgaatcaggctgtacttccatcatacgacgtcatcaggactgaaaacggttcaaaatttatcgacatcctgaacgggtttaaaggtacatttacttattatggcagctcacaccctttcctgttaaccagccagactagctatatcaaacccggagatgataatgtctatcaaccatggagagcagctgtttatcttatgccaattagcgccgccggggggaaggtaataaaaacaggagaatattttgcatcactgaaattatataagttgctgatgattggctctggtgctccttcagatggacatggatatcctgatgaaattacctggaatctttatgcacttaatgatgttgttatccctacaggcgggtgtgatgttcctgcgcgtgatgtaaccgtaaacttaccggagtatcccgcttcaacggcgattccgttgacggttcactgcgggcaaaaccagaatctgggctactatctctccgggaccacggtagacactgcccactcgatcttcgccaataccgcttcggtttccccagcgcaaggaatcggaatccaattgacacgtagtggttctattgtcccagccaacagaacagtatctttaggaaccgtgggcacctccgcagtcaacctcggactcaccgcaacctatgcgcgcaccagcggccaggttatagccggcaatgtgcagtcgattatcggggtgacattcgtttatgagtaa

SEQ ID NO: 207643 - DNA, 669 bp, Klebsiella oxytoca
atgctgggatttaactctgcctctatgcgttacaaatttatttatctgactaagaatatttatcacggtatcgccatccattcactgtttgaagagtcatttcaggcctctaaattacataaaatctgtgatgctgatgttccatttttcctgattgataaatacattaacttcattcctttttcactacgttttggaaactcatgggctacatatgataaaatgtttgaacaggacattattcttttcaccaatcgtctgcagatgaaatggattcccttcagtaatattcttttcttcgtggatatgtataatcccgagcagacctcttttttgtacattagtaaagaagataccgtttctgatatctgtaataagttggatttttttatgcatcattgtgcggcagttgtaggtcgtgataagaaaaatcaatgtcccagtttcgggttcacgctgcgtgaacagcaaatcatatttcatatgttgaccggaaaaacagttaaagagatatctcaaatgctcgatgttagtgataaaagtgtttacagggggcgtgatatattgacacgtaagctggaaatacaattagagctgggtttaaaaagaaagcttcgtttgcgatataaacaagtcaccgcggaaaacaccgctatttactataaataa

SEQ ID NO: 207644 - DNA, 714 bp, Klebsiella oxytoca
ttgaacattcgtaggctttctcttcatatcacagtgatgcttattggtactctgctattttgcaaacagatccaggctgcaacctatgtaaatcaaacccgactcattgtgacggaaaagattcgggaagtgagtttttccattgtgaatgaaggtgatgcaccggtactgatgcagctttggagcgatcggggaacattgcttgagcggccagagatcataaaaatgccttttatcatcactcccccggtgtttcgtctggaaggaggaaaatcacgagcaatccgactgcagttggtagggtacactcaggatttagtcgctgatcgagaatcaatattctggctcaatgccttagaggtaccgcaaaagccgaatgtgagcaataacagaaatgtgcttcagatggcttttcgcacacgaatcaaactgctctatcggccagcagcaacagccaataccaccatagaagatgccgtgaaaatacttcgcaccgtaatctcttcaagcggcgtcaagctggagaatcgatcacctctccatatctcgcttcttagcgtgactctggcgggaggaagaacgctatcttcactaccaaatgaaggtactctggccccttttactgacatggagatcccattatctcatgttgagcccttggctgcggtcacatggattgatgactttggtgttgctcacgttaaccgcttctga

SEQ ID NO: 207645 - DNA, 1080 bp, Klebsiella oxytoca
atgagacacatcatacccaccttattacttttttttgcaggtttatgtaacacggcctatgccgatggcacttgggtcaactgcggacgtaccagcggttactatcagtatttcgacagtactactgttcaggtcggtaaagatgccgctgtcggagatttaattggaacatggttatcgtcctataacccgacggcttggacctgctcacatcgaactgctagcgaaagctacatcgttgcaatggcggttcagggttacccgccgtataccatctggggaacaacttctgtcgatgggcaaagttatacagtgtacaacactacagctaaaggagggctgggatacatcgcccgttggcgttatacagttaaaggacaaaccagcgactggtatcctctgacgattaccaacggggtgaatcagactccagcacaattgtttaacgttagctacgataacaatacggtttggaatataggtgtagacgtgcagctccgctttgtgaagactgccacaactttgacagcaggctcggtcccggtttttgacccgatgtatatgcgtcattaccagatttacaacggtaaggactcggcggggacagggacgtacatgatagctaacttcttgccggggggcctggttatttccaccaccggaggtacctgtactacatccgatgtccatgtaacgttacccccagtgagccgctccgatttcatcggcgtgggttataccgctgcccggactgatttcaatctcaactttacggagtgcccggcgggtatggctagtattagctatttattcacaccgacaacaagcattgtcaataacgctgagggattatttgcacttgacagtaattccaccgccaatggtgtagctttacaacttttaaatagtcaggacgtgccgatcacatttaatacagcttatttactaagcgcttatgatccatcaaaagaaaatgcgacttatagcgtgccgctacgagcggggctctatcaaacagataacaacgtttcttcaggaagcgtcagcggtgcggtcacatttaccttgagctacaagtaa

SEQ ID NO: 207646 - DNA, 2544 bp, Klebsiella oxytoca
atgagcaggtactacataataacccctgacacactaatgcctggtattcgtttaagccgtattgcgcaaattttttttattttttttgctctttctcgaactgcactggctgataacaatgagaatgtggattttaacagccagtttttgcgttcagatattgatgttagtgctttttctcaaggaaatcctgttcctcagggaaaatattctgtcgatttgtatgtaaacgagcgctggaaagggcgcacggaagttatatttgaaaataagacacataatgcaacagtggctgaaccttgttttgacctaaaactaatttcgctacttggcatagatagcaacaaagttcctgaggggatttttcagaaactgaaagacgggcaaacctgcgtgcgtatagtgtccatcgataaatcgctggatgctcgctatgatgttggtgcgcaacgacttgacatatatgctcctcaaatttggctgcaacgccatgcgcgtggctacgttagcccagcgctttgggacaacggtattccagcggcaaccttgcaatatgactataacgcctggaaagcggaaatatcaggagcggataatacatcaacccaataccttgggttaattggtggaatcaattgggacgtgtggcgtttacgctatcggggaacatttaactggagcaatggccagggctgggactatgacaataccagtacttacctggaacgagcccttgttcctctacgtagcaagcttgtgattggtgaatctactactgacggccaggtctttgacagtgttggtttccgtggattgatgctgacctctgatgatcgaatgttcgaagattcccagcgtggctacgcgccaattattaatggaatagccaactcaaatgctttggttcgtgtaagccagcagggggtgcgaatttacgaaaccacagtaccgccaggtccattcgtaattgacgatctctatccaacagggacgggtggtgatttgctggtgacgattaaagaagccgacgggaatgaacgtcgttttacggtgacgtatgcatcaatagccgaactacttcgtcccggtaccacccgctacaccctgatgggcggacgctatcacaatggttctgtcaacgaagatcccgaaattatgatgggaactttccgtcatggtatcaacaatctcgtcaccggctacacgggtgtacttggcggacagaattataagtcaattgccggaggcattgcgctgaacacgcctgcaggagcgatatctacggatattactcatgccaggacaacattgcgggataacatgaagcgtgaaggactgagtctgcgcttttctttcgccaaaattttgcccgtggtcggaactaacgtgaccctggctagttaccgatactccagttcaggctattacgacattaatgatgccatgttacttcgcgccggtcaggtctggaataacaatagatactccaatagtattaaccgtaaaaatcgtttgcagctcagtgctagccagtctatttcagatacgcttggcagcttcaatattagtgccagtactcaggattattggaaccgtagtgggcgcgacactgaataccaactggggtataccaatgtattcaaacggttcaatctaaacattaacgccagtcgtactcgcgatctagtaaaagatcaatgggataacaaaattgccattggcatttctctgccattgggaaatagtgctcaggctatgtatctcaactcaacctacatacaggagcgggatcatcacggggtacagaactcaatcgccggcacagcgggagaacataggcaattcaactatagtgcctttgccaatgtggatcattacaacgatagcagtaaccgaaccacgggtggtgtaaatggacacgggacttcaccatgggccagtatgggaggtagtttctctgctggtaatggttatcagcagtatggtttgaatttttccggaggcgcaattgcctacaaggacggtgtggtattgaccccaattatgggtgacaccatggcggtggtggaagccaaacatgcggcgggtgctcgtctgactaataataatagcttaagccttgacagtagcggaaaagcagcagtgccgtatctgacaccctatcggcagaatactatcgagctggatcctaagggactttccaacgacgtttcgctggatattaccagccagaacagcgtgccgacggctggagcggtcgtgttattaaaatataaaacagatattgggcattcggtactgtttaccgttcaatccagccgagagcttccttttggtgcaacgcttgttgacgagaataataatattgtcggctatatcgcccagggaggacaaagtttcgcgcgagtaaaaaatgaggaaggcacactacgagttcagtggggcgatacgcggactaagcagtgtcgtttcaattatcgtctgacttccatttcagcaggcgatgactcccagctgcgtcaaagctcagttgtgtgtcagtaa

SEQ ID NO: 207647 - DNA, 753 bp, Klebsiella oxytoca
atgttcaaaaatattatctccgtctttattttaattgtatcagcaagcttttctgccctggtacttgctgaagttgttattaacggtacgcgaattgtatttaatgctaaagataaagaatcagtggtacaactaaaaaataacggaaagaacccttatcttttacagctttggattgacgatggtaatccaaaagctaagcccagtgaggtgaaagtcccttttttgatcagtcctccagtcatacgtattgatcctaataaggggcaggcggtacgcattatgtcgacatcggttaatttgccaacaggtagagaaaccttattctggtttaatatgctcgaagtacctccaaaacctacagctctgttgaaaaatggcaataacatattgcaactatcatttcgcacgagagtgaaaattttttaccgcccagaaaatttaaaaccaacagtattacagtcttataaagatcttaagtttagtctgcgggggaacagtctgacagtaatgaatacttcaccttattatattactttcagcaaactggagatacgcaattcaataagcgggccattattggccgctgttgagaattttggacagcagcgaatggtagaaccaaataagagtatttcttatccattggcggttaaacaaaaaggtttgagtggcgctacggtattttatagcgtaatcaatgattatggtggagaatcagcaaatgagcaggtactacataataacccctga

SEQ ID NO: 207648 - DNA, 558 bp, Klebsiella oxytoca
atgcgtaattacaaatatgcggtttcagcattagctttgcttgtaacatctgcttttacaacttcagcattagccgtagatgggacaattactataaatggaaaaatcactgataccacttgtactatctccgttgacggtggtagtaaggatgcgaccgtgacattaccaaccgtatctgcaagcaccctgagcgcagacggtcagactgctggcgctacaccatttaagatttcacttagcggctgttcaggcacatcaatgaatacggccagcacttactttgagcctggcgcttatgtagatagtgtaactggtcgtctgaatattgatacaacggcgtctgatgctgcaacgaatgttcaggttgaattgctgaatgcagaaagaaatgcaattgttgcaggagcttctgtagctaatggccagaacgatatcccagtggaaattagtggcggtagtggtacgctcaattattttgcacaatatcacgcgactggcgcggccggcgcaggttctgtaaccactcaagtcgattacacaatggtttacgagtaa

SEQ ID NO: 207649 - DNA, 693 bp, Klebsiella oxytoca
atgcctctgatccgaaatgccttccagcgattatattttcctgtcgatatcatcgcccagtgtgtacgctggtatctggcctatgccctgagcctgcgtaatctggaggagatgatgtgtgagcgcgggattgttgttgaccattccacgttgcatcgctgggtcatccgcctggtgccgttactggataaggcgtttcgtcggcataaacgtgccgtggggcaccgctggcgcatggacgaaacctatatcaaagtcagaggccagtggaaatatttgtaccgcgccgtcgacagcatggggcagaccatcgatttcctgcttaccgccagacgggatgcggcagcagcgctgcgcttcttccgcaaagccatccgccaccacggcgagcccgaagtggtgaccattgataaaagtggcaccaataccgtcgctctggccacgcttaattccgacaaatccgcagaggaaagcatcaccatcaggcaaaacaagtatctgaataaccagatagaacaggatcatcgcaatatcaaacgcaggatacgtcagatgcagggattcaaatcatttcgccgtgcacagacccttctggccggcatcgagctgattcacatgatacgtaaagggcattatcaacattcgcacagtgatagattgtcacccgcagaacaatttatcttctctgcctga

SEQ ID NO: 207650 - DNA, 1605 bp, Klebsiella oxytoca
atgacccgtcaacgcaccgcgctgaatgctttagctttgtttcgtaaaagccatttagctctctgcatcttatctctcgccgctatggctgctgccgtaccttccgtttgtacggcggctgaagtaaaagccaaaaacgtgatcgtaatgatcaacgacggggctggctggggggcctgggacgcaacggccgactggcagtacggtggccgtgaccacacgccatacgcaggcttcccgataaaatatgccatgacaacctatccgctgaatgcgtctaaaaaagcgacctataataacgattcgttagtcaattacgatgcgcagaaagcgtgggataccaccccgaactccgataaggatttgccgtttaaaggctacgcgtatctggcaatcaatccaaccgacagcgccgctgccggtaccgcactggcatcaggtactaaaacctataacaacgcgattaacgtcggcaataacggtaagtcggtaagctttgttaccctcgttgcgaaagatcagggtaaagcgaccggtgtcgtcaccagtgtgccgttctctcatgccacgccagcagcgtttggcgcacagaacgcatcccgcaatgactatcatgccatctctcaccagatgctgacatccggaaagctggatctgataatgggaactggtctgccgggctttaactcaaacggtaccgagtgcgataagctggcgaaggatgagtctgctgcaggctgtggtgaagacgcgtatacctatctggcgaaagctgaagtggatcaactgagctccggtaaactcacgccggccggctccagcctgccgtggaaagtgatccgtagcacgaatgaatttagccagttggcaagtggcgctctgcgctatgaaggcccgctgttgggctctccaaacattgcgccgaacggtaccctgcagcagggacgccaggcagcaatcgtcggtaaagatgcggcaaatccttccggcgatgcgtatatccgcactgtcccgacactgaaaatcatgaccgaaggtgccatccagcacctgagcaaaaacgccaacggcttttttgtgatgattgaaggcggcgcaaccgactggtccgcacataccagcaactcctgtactggcaaaggcgactggggtaactcctacaaccctaactgcgtaggtgtcgaatatggtcgtctgattgaagagactgctgattttaacaacgcggtatcgtcagtaatcgaatgggtagagaagaatagtaactgggatgaaaccctgttgattgtcaccaccgaccacgataacgggatgccgatgggcccggacgcacagaaaacagctttcgaagcagttactaataaaggcaaaggtcagatgcctggtatctccttccgcccgaccggcaaccactctaacgcgctagtgccgctgtgggcgaaaggcgcaggtgcagaagcctttgcttcgcgtgtgcgtggcaccgatgcaggttacgctaaatatgtgggtctgaatgacgggaaatatatcgacaacaccgacgtattccgcgtcgtgaaggcggcgctggtcggttcaccagttgagaaagtcgcacagtaa

SEQ ID NO: 207651 - DNA, 312 bp, Klebsiella oxytoca
atgattgcaaaaaaattgattttgttatgcctgctggccacctttaacagcgcctttgccagcgatgccactcatgcacaactcattggcaaaatatttccgccgctgccccgccttccggcattctgtgaattcccaggaccaggttttggtaggttcccccgacactcaggcgataactctgcggcggcgctgacagagttaaaacagggtgcgctggtcacttatcttgacagccgcatcaaccagcgcggtaaggatgaggctttgtcgaataaatcggatttagataaaagcacctcctgtcattga

SEQ ID NO: 207652 - DNA, 1254 bp, Klebsiella oxytoca
atgtattttcccgaactggacaggagctggctaaacagcacctatcaccacgactgggttgaacaggaaggccggcggttgctggcattttaccgaaacgccgtttgccctctgggcggcttcgcggcactggacatccacggtaagcttcctgcggacagccagccggacacgatgctcacggctcgcatgacgcactgctatgcgctcgcctcgctgaaaggcgaacctggtgcacatacgctggccaaatggggcgtggactcgctattgaaccagctgaaggacacagaacacggtggctggtttgtcggactgccggaacagagccgtaacgaacccaagaccgcctacctgcacgtttttgtcacgcttgcggcctgtaacgccctgctcgccggcattgagggcgcagatcggctgttcacccaggctaccgacattctgacgactcacttctggcaggaagacgaaggcgctctggcagaatcgttcagctgtgactggcagcagcctgctttttatcgcggtggcaacagtaacatgcactgcactgagctgtttttacagcttgccgatgttaccggggatgcagtatggcgcaagcgcgcgctggctattgtcgaccgggttattcatcagcacgcccccgccaacggctatctgctggccgagcattttcacgaagactggcaggaatggcatgattttaatcacgataaaacggcagatgatttctatccctatggcgtgacgcctgggcacagctgcgaatggtcccggctacttatccatcttgaggccgcactgcacgcaaaaatggaaccggttccggtctggctgcttgaagatgcgaaggggctgtttgaggcaggcattcgctatggttggcaatccggcgactatccaggttttgtctacactcatgactgggataagcaacctgtggttgaaaaccgcatccactggacgattgcggaaagctgcgcggccgccagtagcctgctgaagcgcaccggcgatccgcactatgaatactggtaccgcaggctgtgggattacattgcgatctacctgatcgacacccgtcacggcagctggtggcacgagctggatgctcgcaatcagccatcagacgtggtatggagcggtaaacccgatctctatcacgcctggcagctgacgcagatttgtcggctccccttgtatccaatgatcggcaaagcgttggaaaaaggggtaagccaaccctga

SEQ ID NO: 207653 - DNA, 876 bp, Klebsiella oxytoca
atgcacaataaatactccattcatgcccagtcacagaccttaccgggttcagaagcccgactggatccacttgctgaagcagtgcgcgaagactatcgcggcagcgataagctggccggtaaaattgcgctgattaccggaggtgacagcggcattggtcgctctgtcgcacagcactttgcgattgaaggcgcgcaggttgccatcacttacctgcccgaaagtgaagacgagcggaatgatgccgagtcggtaaagaagaacattgaagaacgcggcgctacctgccgtatatatccggttgacctgcgctctgcggaaaaatgccggcagctgatcgccgacgtagtggctgattttggcgggctgaatattctggtgaataacgccggtactcagtacccggtagaagatattaccgagctcagcgatgaacaatggattaatacttttaacgttaatattcacagcatgttctatttaactaaagctgctctggcacatttcaaagacggcgatagcattattaacaccacgtcagtgaacgcgtatattggcccgaaaattttgctcgattactccgccactaaaggggctatcgtcagctttacccgcgcactgtcaaaccagattgccgcctctggcatccgcgttaatgccatagcgcccggtccggtctggaccccgctacagcccgctacgctgggtcagcacgatccgcagtcgctggaaaacttcggcagcgaaacgccaatgggacgcgccgggcagccaagcgagctgggacctgtttacgttttcctggccagcgcggactcctcttatatcagcggtcaggtaattcatcctaacggcggcactatggttggcggttaa

SEQ ID NO: 207654 - DNA, 1272 bp, Klebsiella oxytoca
atgagtaatgacaaagcaatgcaagtacaatttttaacgtggcttcagcagtcattcattgtcctgctatgggggctggttttttatttagccggattatcctcgctcaagtttgatgacccaacgtcgtcaattgcgattatctggtttccggctggcatagcatttgccgccttcctaaacgcgcgatggcgcgattacccggcgctcatcgtcatttttactctggtgacagcgctaatggatgaacattggggtaccccgctctccttcgcgttatcgctgttgtatgcctttttatcgattccttctacggtggctatagcttggactgtacgccgctttgcgcgtatgcatgatgacctgcacatcattctagtatggatagtagcaacgcttgctatcagtgcactcgactccctgattataggcagtagctatgcggtggctctaggcctgactccgctcagccttttctggcatggcttcatcgcagatgtgaccggcatcttctttacggcccccattgtgattggtattctgaacctgcaccagcaagttactgtaaacagcattgtttcgaagtacattggctttgtcctctggctagtgatgtgcgctattgctaatattgtatttggtcatgacctcccttgggtaacaaatcacgccatcacgctttacttcggtttagtctgcctgcccatcgccgcagttatgctgctttccatgttctggggcagtctcggtggttccgtcgccctgcttacgctgggcgctatcgtcatttactatactgatcagcataaagggccatttttcctgaatggcttagtctacactgaatccttactgctggcattaagctacctttcagccgcctcgctgctggtagtgttcgttcgtgtggtacggcgattaaccaacaaccgtcacaagggcggacatggggcattctatcgcctgtctcctacctcaggtgcgatccaatgggggaacacgctttccaagctgccaggcaatatgcagcccggcgggttaagccgcgttgatgatgtgctgcaacatgtacatccccgtgataaggacaagcttcgcgcgcactggctttctaccactcgtgaccaatacgccgctttgattttccgtattcagacacccaatggtcaatgggtgacgctagtcgaccgcggtactgcacgtatggttgccgacggtgaagatataattgtaggtaactggcaggtcagccgtttccatcttgccttctga

SEQ ID NO: 207655 - DNA, 276 bp, Klebsiella oxytoca
atgatgaaagcaaccgaaggcttcagccgtctgttgcctagtattgtcgtcatcgtgggttatacaatttcattttacggcctatcacaggtggtgaaaacgatgaatatcggtatcgcctacgcgatctgggcggggatgggaatatttctggtctccattatgtcgttcctgatttataagcagcgacttgatctcccggctatcgcgggtatggcgctaattgctagcggtgttatggttattcagcttttctcaaagtcggtaacccattag

SEQ ID NO: 207656 - DNA, 357 bp, Klebsiella oxytoca
gtggctatacatgacgccgggatgttcaccgtgaaagaaatcaaccgactcaaaatcattcaggatgttgtcgaccggcgacttaccacaagtcttactgccacccggcttgagatttctgacagacactgccgacggttacttgagcgctatcgtgaacataggccactttcactagttaaacgtcgacgtggccagcctggcaaccggcaactgatgccgggcctcgctgaacgtgcactgcttattatccgcgaacgctacgctgattttgtttcgactttagccagtgagaggctcgccgaagttcatgggctgtatcttgccacagagacggtacgcaagctgatgacatag

SEQ ID NO: 207657 - DNA, 357 bp, Klebsiella oxytoca
atgaaaacattaagctttaatgaaattcagcaggtttcaggtgcaggtattcttgcacaagagtttgggaatgcgggactgggctttggcagtgctgctgatcatgcaattaatgggggaaccttatcccagattggaagtggtttaggttttggtattggctctgtcggtgatggactgctgggtgcagccggagaagtcggcagttttggtgttaatgcagcggaaaagctggggccttcttttatcgaggctaagggacaggctgcaggaagcattgtaagtgccggtggtgacgctcttggtaagcttgcaagtgggattattggagcattaaacccgctccatattggttga

SEQ ID NO: 207658 - DNA, 195 bp, Klebsiella oxytoca
atgtccggctttccggataatgctgtcgattttattctgaccaacccgccatatatggtaggttttcgcgaccgttccgggcgcacgcttgccggcgaccggaccgacgaatggctgcaacccgccagccatgagatgtacattgagcaggggccagttattgttaaaaaaaccgccacagcaggtggggcatag

SEQ ID NO: 207659 - DNA, 339 bp, Klebsiella oxytoca
gtgaaaacgcgttacggcatagttgacgaaactgccctacagacatttctcgatgagtttgatacctgcagtatcctgcaggctgtcagtaacctcgaccgggttgcttacgggttaatccagatgcaggaagagctaagaaacctgtatcgcgtgtcagaagacctcatggcggacgggatgaatgaaaccgaccataaggttcgggattccgagtccatctggatgctggccgaagatatttcaacgatagccggggaatggccggatctcactgacgaagcgataggaatcgctgatgaaatggcaaaactagctcccgccccggacgatgcatga

SEQ ID NO: 207660 - DNA, 309 bp, Klebsiella oxytoca
atggataaaaggaaaagtactttactgttcgttctggtgctgatagtagggggcgttgtcgggtacaccataaacaatatgactgtatcgaggtacaatacaattaatgccacctgcaccctgcttaacgttgccgtggacaaccatatgttaagtcctgaacaagttgtcagccttggcagactgacaaaagaaaaacttggcgatgcacagtcagcaaaagccttcagactcagtgaggaacagatcaagtctgcatctgattcatcaaattgttcccagtttatggttggaatgagccagccatga

SEQ ID NO: 207661 - DNA, 483 bp, Klebsiella oxytoca
atgcgcttaacgtacaaaaatttccgatctccaaactgcccctgtagtgccaaggggtatcagggaacaggcgataaaaaggacgcaaaaatttgcgctgaagcagaggctcgcgcgaaagcagaagcagaccaaaaagccctattcgtgaaggcaggtattcgggatacaccggcttacacgctggagatggtaaaagcagctaataccatgctggcagcgccgacgatgatgatgcttaaccgagttcctgccgcgatacagctgtccgctatcgggaaaggggtaatgacggcactcagtgaactggcgggctggatagccggcgcattaccacgaggggctgaaggcctccgcaattgcggccgcgttcttggcggcacagtcatgacactctggtcattaccggtcggagaaagcagtgacaaaagatttagtggaattccttttcgcttcagagaatctatggctctttctatatag

SEQ ID NO: 207662 - DNA, 291 bp, Klebsiella oxytoca
atgcccaaagaattcttggggtttatacataggccatgcaaagcctggcgggcgggttcgaacgtaaacggaaaaatcagcctggggatccccgatgattacgccgtccggtatctcccggatgtactcaaagccttcggagaaaaatatccggcaatcgaaatctcactgttctgcgaaccttccctgacactcattcccaaaatcgaatctgggatgcttgatgttgccattgtcacccgggataaaccagggcgcggagagtttcttttcagtgaacaactggtatga

SEQ ID NO: 207663 - DNA, 219 bp, Klebsiella oxytoca
atgcataatatcagggcatatcttgccatccagctatgtacccttttgtttgggttgtccgccctcattggtgaacacgcccagagtgagattaatgcggttgtatttggaagaagtctgtttactcttgtcctcctgagcagcctgctctgcctgtcagacaacgctcgtcaggcggtcctctgtgcccggtggtacgacgggcctgttttacaataa

SEQ ID NO: 207664 - DNA, 918 bp, Klebsiella oxytoca
atgacaattcaacaattttacccgatcggtactccaggcaagccctggaccgggacagaaaagcagctatggcaacaaagacaaacgcgtttcagaagctataaaaatgatgtcctcgacgtacttcaggggcttattaagcgctatgacatcgttcagtatggtgagttgcaatatggtgatgatgtttatcctctgatggcggcaaagtcacaggaatgggatcagacgctcccagtcgcccttattaccggcggtgttcatgggtacgaaaccagtggtgtacttggtgctctggcatttttgtccgagtgtcaggaagactatgcggggaaattaaacttgctcgttgtaccctgcgtcagcccgtgggcgtatgaacgtgttgcccgctggaactataatgccgtcgatcctaacaggcaatttttctcgcaaggtagcgcagaagagtcgacaagcttaatcaaactcatttctggtataaaagggcaatttctggttcatgtcgatttacatgaaacgacagatacagatgaaagcgagttcagtccggcgctggcggcaagagatggccaactttatgaaccagagtctatcccggatggattttacctcgtcagcgacagacagaattcaaggctcgacttccagcgtgcaattattgaagctgtggagaaggtgacgcatatcgccccggctgaccatgaggggaacatgcttggttttccagtagtgagcccgggcgtgattgaatacgacaactgtgcatatcatttatgtgccacgatcaccgtagcccccttcaccacaaccactgaagtttaccccgacagtgcagaaacctctcccgaagaatgtatcagggcacaggtagtgactatccgtcaggctatcaatttcgccttatcaaactga

SEQ ID NO: 207665 - DNA, 309 bp, Klebsiella oxytoca
atgattctggcacaaaagccgtggattgttcctatccctggtaccacgaaactgcaccggctggaagaaaacctgggtgcttccaacatcattccattgcaggatgactcacgtcagataaacgaggcgaattacaacaaggatctttgcccactatttgcagtcctgcagactgatgatccacagaaaattgatgggtttttggacatagacaatatgcctctcagagaagaaccggagtgcattattaacgaactgtacctgtactcaaaaaaaccaatctataaacctgacaactttgctatatag

SEQ ID NO: 207666 - DNA, 195 bp, Klebsiella oxytoca
atgagcgattttttgccgttttcgcgcccgtcgatgggcgacgcagagctggctgcgttgcgtgaagttttgcaatccggctggatcaccaccggaccgaaaaatcaggcgctggaagaagcgttttgcgcattaaccggcaaccgccacgccatcgtcatcagttcggcgaccggcggcatgccgttacgctga

SEQ ID NO: 207667 - DNA, 210 bp, Klebsiella oxytoca
atggctgacaactgcatgatattccacgaaacacggatgaaactgcgtggcaaagcctttctgcgtgaactaaccgtttcatgctataccgcttcatctttggctgcatttataggaaatacgctggaagtcaggccccagatgcgttattggtcaagcgtccgcaacaatgttgatatggatctgatgaaacttagtcgtgtgcaatga

SEQ ID NO: 207668 - DNA, 2109 bp, Klebsiella oxytoca
atgatcgggatgtcattcagaaccctcatcagtaagctcgataccgggttacaccagcgcgtccccgttattcatcagaccgaagcggcagagtgcgggttggcctgcctggcgatgatctgcggatattacgggaaaaatgttgatctgatttcccttcgccagcagtttaatctttccgcccgcggtgccacgctggccggtgccataaccatggccactcaactgggtatggctacacgggcactctctctagatctggatgagattggtgtcctgaaaaagccctgcatactccactgggactttaatcattttgtggtgctggtgagtgtcggacgacagcggtttgtaatccacgaccccgccagaggccgccgtacggtaggtctgtccgaactgtctgaacattttaccggtgtggcgcttgaagtctggccggacagcgactttaccgcgaaaaccgtcagaagcaggatcagcctcatcacgcttatcagcagcgtacacggtatcaggggagccctgttcaagatattcagtctgtcagtggtgattgaatccatcagtctggttatgccgataggcacacaactggtcatggaccatgccatcccggccagcgatcacggtctgctgacgcttatctgcgtggggctgctgttttttattttgctgcgggcaacgacaggtatggtgcgggcctggtcatccctggtcatgagtaccctcatcggcgttcagtggaaaagcggtctgttttctcacctgatgcgcctgcctcttggctattttgaacggcgtaaactgggcgatatccagtctcgctttggttcgcttgatacgctgcgcgccacatttacgggtagcgtcgtcggtgccatcatggacggtatcatggtcctcggtgtgctggtgatgatgatactgtatggcggatatctgacctggtttgtgctggggttcactctggtttatgttttcatccgtcttttaacctacaactattatcggcagctttcagaggaagcgctggttagaggggccagagccggttcttatttcatggagacgctgtacggaatagccaccgttaaaatgcagggaatgacggagagaagaagtgttcactggcttaatcttgaaattgataccattaatacgggtatcaaagtgactaaaatggatttgctcttcggggggcttaacacgtttattgccgcctgtgatcaggttgtcattctgtggctgggcacttcactggttatcgataaccagatgactatcgggatgtttgtggcttttggcgctttccgggagcagttctccagccgtgttgcttcgctgacaagttttctgcttcaactgcggatgatgagtcttcataatgaacgtatttccgatattgcacttaatgaaacggaaagcaaaaagccggatattccctgccatgctggtatgaagccggtatcgctggaagttcgcgacctgagttttcgttatgacagccagtctccggctattttcagtcagctgaacatgacagtgaagcccggagaaagcgtggcaataaccggcccgtccggggccggaaaaactacgctgatgaaggtcctgtgcggattgtttgaaccggaatcggggaaaatcatcgcggatggtcttgatatccggcagcttggaataaacaattatcataaaatgatcgcctccgtcatgcaggatgacaaactgttttccggctcaatcagggataatatctgtggattcgtggaggatcccgatgatgcctggatgactgaatgtgccagagccagccatatccacgatgtcatcatgaaaatgcctatgggatatgaaaccctgatcggtgaactgggggaaggattatcgggcgggcaaaaacaacgtatttttattgcccgtgcgctgtaccggaaaccgggtattttgtttatggatgaggcaaccagttctcttgataaagaaagtgagagctttgtgaatcaggcgatcagacaattaaatatcacccggatcatcatagcgcaccgggaaagcacgatagcctcggcagaccgggtggttaccctcggaacagtgaattag

SEQ ID NO: 207669 - DNA, 1302 bp, Klebsiella oxytoca
ttgtttcgtaaggaggccgttaaacatcagagaatgagatggcgggggagagcgctgctgctgcccgggctcccggtgtggttggttaccggactctgtaattttttcctcatcacatttctgctgttcatcatcaccggtacctacacccgacgggttaacgtcacgggagaggtaacaacaaatctcaggccgatcacgatttactccggggttcagggattcgtcgtcaaaaaatttgcgaatgaaggccagtacgtcaaaagtggtgatcccatttatcagattgatgtcagccgcagcacccggagtggtgttgtcagtgacaatctgagaaaagatactgaaaaccagctcttgcagataggtaatattattgctcgtattgaaaacagcaaagaatcaacgctggcggcgctgaaaaaacaaaaaacgcagtatattgccgcatttgaaaaatcttctgatatcgtcaggcgggcagaagaagggataaaaataatgaaaataaatatggataattaccggcactatcagcaacagggactgataaataaggatcagctggccagtcagaccgcactttattatcagcagcagaataatttactgagtctcatcgggcagaatgaacagaacgccctgcagataaccagcctcgaaagccagatccagacacaggcggctgagtttgacaaccggatttatcagatggagctgcagcgttatgagcttcagaaagagctggccggtactgacgccagtggggaaatcctcatccgggcattatcagacgggaagattgattctctcagcgtcacggtcggacagatgattaatgccggtgacagcctgtcacagataatacccgcagggatcagtagttaccagatggttatctgggttccgaatgatgccatcccctacatctcggcaggggacagcgttaaccttcgctatgaggcttttcctgctgaaaagtttggccagtttgccgggaaaatcgagatgatttccagaacacccgcatcgctacaggaaatgcagacgtatccgggggcacctaaaaacagcctggctgtttctgtcccctggtacaaggtcattgtcaggccggaaaaacagttcattgtctatgacggaaaaacattaagtctagataacggaatgaaggctcaggcaaccctgtttctggaaaaaagaaaaatttatcagtggatgctttctcctttctatgacatgaaacacagtgcaacaggaccagtaaatgatcgggatgtcattcagaaccctcatcagtaa

SEQ ID NO: 207670 - DNA, 336 bp, Klebsiella oxytoca
atgagagaactgacggttgttgaactcaatgaagtatccggtggtatcgggctgggttttggacaggaagcaggtacattactagggcagggtattggctctgttgtcgactgggctgacggtactacaacagcaaccgcaccagacacagctctgggggctggaattggcgcaacggtagatgccggcgtggcaggtctcacatcaatcgctgaatggggtgttaatcttggcgggcatgctgctgataccgtcacgtcttcaatcggtaaaggaattactaacattggcggcgctattgttggcctgttaaacccttttaatccgttaaaataa

SEQ ID NO: 207671 - DNA, 312 bp, Klebsiella oxytoca
atggagcagcacataaccccattcaagggctggaattttcagcgtgacatcattctgtgggtagtacgctggtactgcaagtatggcatcagttactgtgagctgcaggagatgctggctgagcgtgatgtgtttgtcgaccacaccgcgatttaccactgggtcagtgttatgcgcctgaaatggaagaacggctgccctggtacctgcgtaaccctcccgatctttgcgcttggcacattgatgaagccagcattagggtcaatggtcgctgggtttatctttaccgggccgtcgacaacaggagtctga

SEQ ID NO: 207672 - DNA, 555 bp, Klebsiella oxytoca
atgttattccagcaactaaataatttcgaaaataaaggttttgttatttttgatttagaagataagctttattttatacaaaatgcagaatgctattattgtttgacgttatgtttatttgatgtgctttctaaaggcatctgtttcaataagcaagatatcaactctgttgatgaattaatgaagtcacttgggaaatggctcaacattgaatgtaactatgagagaaatgcaaatgggctgagtgagcgtgaatatgttgttattaagtccttatgttcagggtactcatgtattgaaatttctaagaccttgaacagaagtatcaagactgtaagtgtacagaaaaatagggcactaagaaaactcggcatgagaaatttgcaatcactccattgtgctatcatgaggtgggataatctcataaaatcaagatttttgaattcatgcaaagatgaaagtcattgtgacgatctttcaaacacaattgaaaattgccattccatattggccgcttctcttgtggaaccaaataactcatcaaatcgttcgtaa

SEQ ID NO: 207673 - DNA, 903 bp, Klebsiella oxytoca
atgaaacaggtcggcttacgcatagatgtcgatacctttcgcggcacgcgggacggggtcccgcggctgctggctctgctgagccagcacgggattcaggcaagcttctttttcagcgtcgggccggacaacatggggcgccatatctggcgcctgataaaaccgaagtttctgtggaagatgctgcgctcaaaggccgcgtcgctgtacggctgggatatcctgctggccggtaccgcctggccagggcgcaggatcggcgccgggaatgaggacgttatccgcgccgccgcgcaggagcatgaagtcggcctgcacgcctgggatcactatagctggcaggcgtggagcggcgtctggccgcaggaaaggctgacgctggaggttgaatgcgggctgctggagctggagcggattatcggtcgcccggtcacctgttccgccgttgccggctggcgcgccgatcagcgggtgatcaaagccaaagaggctttcgatttcctctataacagcgactgccgggggaccgggccttttctgccgcagctggggaacggcgcgccgggaaccgtgcagatcccggtaaccttaccgacctgggatgaagtggtgggcaacgcggtggatagtgcaggcttcaaccgctatctgctggactgtatccatcgcgacgcggggacgccggtctataccatccatgccgaagtagagggcatcgccttcgcggagcagtttgatgaactgctgaccatggccgcgcaggaagagatccggttttgtccgctaagccagctgctgcccgccgattttagcgtgctgccgcgaggtaaagtggttcgtggtgaactggccggccgggaaggctggcttggacgtgaacaattactcaattcgggtgtttga

SEQ ID NO: 207674 - DNA, 1629 bp, Klebsiella oxytoca
gtgctggtcaacggcgaaagcgaaactggcgtgacgctgcaccgcatggtgagccgcgccgatgccgggaatatcgtagcgcagaaaagcgtagctatcggcgaggatgaggcggcgctggccctgcatcgtaaactctgcgctgcggcgtcggacctgctggctcaggcgctgcccgcgatccgcgatggcaaaatcgaagagcgcgcgcaggatgaaagccaggcgacctgggtcggtcgccgcacgccggaagacggtcgcctcgactgggagcactccgcccggagcctgcataatcttgtgcgcgcggtttccgatccatggccgggcgcgttcggctatgccggcgcgaacaagtttatcgtctggaagtcccgcgtacgtgacgatctacccgccgccaaagcggggaccgtgctttccgtcacgccgctggtcgtcgcctgtcaggaaggggcattagaaatcgtcaccgggcagaccgagcgcggcgtttatatgcagggtacgcagctggcgcaggcgctggggctggtagccggagcggtgctgagcagcaaaccggtcgtggcgattaagcggcgtacccgcgtgctgatcctcggggtgaacggttttatcggcaaccacctgaccgagcgtctgctgcaggacgacaactacgagatttacggactggacattggctcagacgccatcagccgcttcctcgacaacccgcgtttccacttcgttgagggcgatatcagcatccactccgagtggatcgagtatcacatcaagaagtgcgatgtggtcctgccgctggtggcgattgccacgccaatcgaatatacccgtaacccgctgcgcgtgtttgagctggatttcgaagagaacctgaagattatccgcgactgcgtgaagtacgataagcgcatcattttcccgtcgacctcggaagtgtacggcatgtgcaccgacaacaatttcgatgaagatgcctctaatctggtcgtcgggccaattaacaaacagcgctggatctattcggtctccaagcagttgctggatcgcgtgatctgggcctacggcgataagaacggcctgaagtttaccctgttccgtccgttcaactggatggggccgcgccttgataacctgaacgccgcgcgtatcggcagctctcgcgccattacccaactgatcctcaacctggtagaaggctcgccgatcaagctgattgaaggcgggaaacagaagcgctgcttcaccgatatcagcgacggtatcgaagcgctgttccgcatcattgagaacaaagacggccgctgcgacgggcagatcatcaacatcggtaacccggataacgaagcgagcatcaaagagctggcggaaatgctgctggcctgctttgaacgtcatccgctgcgcgaccgtttcccgccgtttgccggtttccgcgaagtggaaagcagcgattattacgggaagggttatcaggacgtcgagcaccgtaagcccagcattcgcaacgcgaaacgctgcctgaactgggtgccgacggtcgaaatggaagagaccgtggaacataccctggacttcttcctgcgcacggttgaattgacggacaacggcaaatcatga

SEQ ID NO: 207675 - DNA, 540 bp, Klebsiella oxytoca
gtgaacgtcgaaatcgtggcgtggcggcttcgcaaaccggtggttgtagtcagccatgaactcttcagcaaaagcgtttgctgcctcgggggtactgataccgcggagccgcagctccttgacgaggcgatcctgcaacgtcaggtgagcccgctcaatacggcccttggcagaactggtattggcacagataccggtgatgttcagctcgttcatggcacggccaaactgagtctggccatctccgccggtggactgcttgttgttgatcctgaagacactggccttgtcgctgtagaacgccagaggcttaccgtaacgcttcagatagccccgggcggcttcaaaataggtgaaagaggactccgaactgacgaacagaagctgcatcagccggctggtcgcatcatcaacgtaaacgagcagcgtgcaggccggaccacgctcctcgaaccaccgatgctcacagccatcaatctggatgagttctccagtccaggcccgacgcggtcgtggctgatgtacacgaggcggccgtaa

SEQ ID NO: 207676 - DNA, 330 bp, Klebsiella oxytoca
atgcaggttaaaagccccctgcggcgcgatattcagaatgtcctcgcacagcagattgcggtaatagaacgagaacagcacgtccggttttatctcacggagacgttcgatccacagcggatgattcacatcttccggcgcccataccggaataccttgttccgcggcaatacgcgccacagagccaaagaaatggttttcgccagggttatccggatgggtaaaaatagcggcgatgtcataaccggcatccagcagagactgaatacctgcacaacccatatcgtgataagcgaagactacggctttcatgaacgatcttcctcttga

SEQ ID NO: 207677 - DNA, 141 bp, Klebsiella oxytoca; identical to SEQ ID NO: 201042

SEQ ID NO: 207678 - DNA, 261 bp, Klebsiella oxytoca
atgcgtactagcaaaacaaagcatttagctctgacaaatcagccggaaaacgtgattttgttcgtgcctcaacctcgtatgactctctcgcagtacgcccagatgaccgggcagacgctccgccaggtgcagcaacaggcggacaaaggtcggtttattcttgcggagggaaagtacggcaaagagcgcgagatcaacatggtcgcggaatatatgcgggagcaagtggcggcagcggaagcgcttaagcggctggtgtag

SEQ ID NO: 207679 - DNA, 858 bp, Klebsiella oxytoca
atgattaaatctcctttgcgctgggctggcagtaaagcaaatgtgatgtccgaattaaataaatacctcagaccatccgagcgtcttgttgatctctttgtgggtggtggtacggtttttttaaatacaaactatacgcgttatacgctatgcgatagtaatttcatgttaatgaatttctatcgtgagttaacaactaatacggatatttttattgatcacgcaaagtttatttttaatgactatggtgatgaggcatcttattacgcttttcggaatcaatatcgccttctgtgcacttcccttgagacttatggaaaaggtgataaaggagctgctgcgttattatttctctatctcaatcgccattgttatggcggcgtatatcgctgcaatgataaaggcgagtttaatatggcttatagcaaggtcggaaaagccagatttcctgagaaggaattaagactgtttgcagaaaaagcaaatgatactcacgcaacttttcttgtgggggattttcgccaagcgctttctgtcgtaacggggcggttatttactcagcatgaagctttgaccatttatgcggatcccccttatttcccactggaagggaaacggaattttaataaatacggtgggaaagcattcgagaaggccgatcatgaagagttgaataatattcttatcggcacggcggagtattttggatcgcaaatcgttttatcgaatagcgatacaaaagacactcgcgaggcatatgcgggatttgaattttatccggttgaaacgctgcgaaagcttgcgccaaaaacgcgagagaaggttaaagagctgatcggtattccgcttccattttaa

SEQ ID NO: 207680 - DNA, 2343 bp, Klebsiella oxytoca
atgtcgaattattcaagtgagagcaccgagggaaggcgcttcgcttatgaatggaataagccacgccaggcaattggctactatgcagccgcagaacctgagcggggcttttcgtatttaaccccaacaggggagcgcaagcctctttcgtttgatgatctgcaagatgtggtttcggacagggagaaaccagatcttcataagtatttacgctaccgcctcgccaggctcccgcatttcatacgtcactattacgccactcagctagacaggttggacgccggggatcacgcctgtgccgatgcttggctagtgaacactttcgagcgccatgtgttaccccgaatcgataaggtgaatgacggttatatgcctggtcacattttgccgtcaccaatgctggagatcagggagcaattctggcggatgctctggacgggcaaaaaagggatcaagcggctagctcataaccttgcagatttactaacaggcgagtttatgcgcgagcaggaatatcagcttgagcgaacacagaatcttgaattttcggttatctccggttacgggcgcattggctttcttgcgtcacatttaaaaaccgggatccccggctggcaagcctattgcaaagaagaactagaagcggaggatgcgctccgcgctgtgtcgcgcctggaatccccaaaatggtggactaaccgcttgcgccgtatttgcgatcgttggcgtgagcatctgctgatttcagcgggctatgttcacaagaaagccgccccctattgcagtaatccctgctttaaagaatggctggcgcagaagaaagcgaatcgcgagtttttgaaacgcatggagcttgagaatcaagagaccggcgagcgggtatcactgatcgataaggtgacgcgcagcgttgccaatccggcaataaagcgcgccgaattaatggttcgaatgagaggattcgaagacatggcaaatgcagataatttggttggggagttttacaccttaaccgcgccgtcaaaatatcatgccaccctagcggacggtcgacgcaatgacaaatacaacggggcatcgccccgcgatacccagcgctacttgtgccaggtgtgggctaagactcgggcaaagtggaagcgtaaagggatccgtgtttttggctttcgtgtcgcggagcctcaccacgacgcaacaccacactggcacctgttacttttcatgcgcccggaatgtgttgaactggcgcgcgcgatcttctgggggtatgcgctggcagaagatggggatgaggccggagcggaggaaaaccgctttaaagttaagccgatagatgaggcgtttggtagcgctacgggatacatagcgaaatatatttcgaaaaacattgatgctcatggcgtgggtgatgagcgggacgatgaaacaggcgagttactgaaggatatttctaagcgcgtttgcgcctgggcctcgcgatggtcaatccgtcagtttcagcagatcggcggagcgccggtaacggtttaccgtgagttacggcgcatcaaaacgaataaaatcgaggttatcggtgctgacggtaagccggtcgttatagatcgcgagtattccttaccaattcccgctgctctggttgatgcgcagcaggcggcagacgatcgagactggacggcttacacaatcgcccagggcgggccgcttgtaccgcgtgattgtttgcgcgtgcgcctggtatatgagaagacggaaaacggcaacgattacggcgatgatgtggagcgcgtgcatggggtgtattgcccttatgtggggatgaattccagccttttaacgcgtacaaccaaatataagatcgtgccgaaggtcggcactgatttagccgttgaccttcagggcggcagcgccgcccctcggagttctgtcaataactgtacgcgcagtcatggcggagggattgacggggaggatcgcgcgattgattttgatgcgctgacgagacaggaaaagagagatttaggccggagactcagcgagcaagcggcggaggaaatggcacaaaaacgcgagcggcggttagttatggcccgatcgcgcccgccattgtcgccgcacgcggaaaaattgcgagagttcgcgctatcgctcggttttgagttgggaaccggcgagatcgccagattgctggccgggcataaagttttgttgggtgatcgttactatgtcgccaccagtgatggcgtattatttgggacaaaaggggttgcgccggtatccacggagacgagaatcaatacttggttaacgaagctcgacgcggggtaccgctataaatgcaaatga

SEQ ID NO: 207681 - DNA, 1716 bp, Klebsiella oxytoca
atgacgcatgtcagcatcaatgacttcaaattacttaatattaagtgtcagaaatactttgacctgttcagtaaaacgaatactttcaatcagcctgttcgagatactaagctacaacagagatttgggttttatctttttatgctcgaatcactctgtaatgaaaaagatattgataaaattagcgactatattactgatacggaatataatgctcacttaacaggccgacgttatgatgatcatggtattgatgctttttttattgatgaagaaaataaagagattaagttattcaattttaaatttcgagagaatttcaaatctgagcagaaacaaagttttaacgaagcatttgtttcaactaagcttgttaactgtataatgaatgatagcacaaacggtttagagggtaaacttagagaatatgtttgttctattaatgaaatgctcaatggaaacgatgtatggaagctatcattatatatgattagtaacgaggcggttccgataggacatgatgaaagcgccattcagcaattgagaaatttttatgaaatggaagtggtgtcagtctgcttgcctcatataacaagtatgatgtccattcgtcctgctccaatcaatgcagaattaataatcgataatgatgctttaatgtcatactcagaaagcacaatatcaacatcaaaatcatatgttatcagacttaatgctgccgatgtaattagaatgacatgccgaaatgtggacctacgacttgatcataattgtgaaaatatcgacgaattagctgaacaaaaaattgatttcggtgttttatttgataatgttagaggcttggtccagcgctcacgatataacgccgccatagctaaaactttacgtgaagagccgggaaagtttttcatgtataacaatggattaactgttgttgctgaagatattaaggctcatcccgttaatggcaacagaaaagtgcgaataagtttaagtggtattcaagtacttaatggcggacaaacacttagaaccctccatgatttcaatgcatccgataaatcttatattagtgaatacttatcaaaaagcgaaattttagtgcgaattttcaatgcttctagtagtgaaacagcaaataaaatcgccgaatatacaaacagtcagaattcaatttcaagtgttgacctaaaatcattaagcacattacaaatccagcttgaacaactattggatgaacacggtattatttattcaaggaaaaatggtgataccggaatggatgataaaaaagaatatcgttataaaattagcatggaacaatttggccaaattctttttgctcttcagggttttccggaaaagtcgtcaaaccaaaagcaacatatttttggaaagtattatgatcaaatatttgatgagaagaatttcaacttctcgcaagctcccgagatagttgaaagctattttaacatcaaaaaagcttatgcatcatcaaccgaaagcattcagaaaattgaacaaaaaatattttacatactttatataaatcgagttcgtaatgaatggagttacgaacaatgtatagatgttttggaagaggtgttgcagacatttgaatcagcaggagctaatctgacagatgcccgtaaaatgattcaagtccgtttcagggattatttaaattcaattttacactccgattatgagccttaa

SEQ ID NO: 207682 - DNA, 1254 bp, Klebsiella oxytoca
ttgagtattgaatctttaaaaaccatttgcgaacaaaataatataaaatattcaatagataatgacgcacgtagatcatttaatattcaaataccaaaaggacgctctcttagtcaacttagtattaatgatgaaattgcagagaaaatattaaatattgctcctgatttttacaaatataaatttgtcgatggatatgaggcaatatggtcgtcagaaaatggaacgctggagtgtgaaatacagctacctaatggtagattaccgctgcatagactttttcgacaaagtttttactctgaagaaagccatatattttcaatcccgtctaataacgaaggtgtcagtattgaaatatctggtcaaagcaatgaactcgcgctcctgacttttttaagagatcctttccctagacctctacgcgcttttgagcgtataaaggatttttcattatcaataaagatttcaggtttaaatatttcgcgacacgatcacgccctcgacttagttgaaaaagtatgttctgctatctgttttcaaatagattgtataacaaatcaacctgtaatgcttggctttgaaagaaaagcaaggcctctacctaagcgcagtaagtctttagaagatatagagctggcgccaattaaatatgcctatgataaagaagctctctcactctattggtatgcacagtcagcctacggtatgccattattaaaatacctcgcactctaccaagttgtagagttttattaccctgtttactcagagattgcagcgcaaaagaaagtaagaaatatactcaaaactccgaactttaatgctaataatgacaaagacttgtccaaggttatgaatataataaaatataatccctcggcgcgggcatttggcaatgaattatcccagttaaaggcaactatattagaatgtttagatattgatagtctcagagaatggttgagttttgataaagtacgtgaagagcatttccgttcaccaaacgcaaaaaaactatctgaacatattataaatactaaggttgaagatgatgctctattagaacaagttgttcagcgattttataatatccgttgccggattgttcatacaaaaggtttagaaggaaatctggatgttttacaccctcaagcgaaagagttggcttatattgattatgatgtagaactcgctaatttcattacacataaagttatgatagcttcaagccacccaattacttctaaagcatag

SEQ ID NO: 207683 - DNA, 471 bp, Klebsiella oxytoca
atggctattgaaggctgcgatctgaacacgtttgcctacaaactaaatgaagtgcttactctcagcgtgccggtgcgaacaccggaaaagctgtttggcagagaaagacagcttgaaaaaatacagctggccctccattcaccgggccgccatgttttcatctatggcgaccgtggtgtaggtaaaacctccctcgcccatacagccgcttcacttatccaatcttcagataaccggccaatcacagtcagttgcgatcatgactcaaccttggagtcggttatcgaatcagtcatgaaccagggaatgttgcgtatgccggtgggtcggtataaaacctctaccacttttggcgttaatacaccacttgtaaaagccgaggcacgttttgatgagcgtgaaccttcacgtgtacagccaatagttaacatggctagttctgtttcagcactaagctatcttacagattaa

SEQ ID NO: 207684 - DNA, 237 bp, Klebsiella oxytoca
atgggcgctatactggcggtcaaagttgagtattattccgcacttttctgcctgcattctgacaaaacctctgatcatattctctctaaaacgataccagccaggacggacaccatcttttccgacaagtgcgtgacaaagaattgcaccatgattttctttacggagtcttgcaaaacggctatcaaagtttttctgagtaagtggctcaataccaaggtatttcataacctgtag

SEQ ID NO: 207685 - DNA, 693 bp, Klebsiella oxytoca
atgaaaagcaaaataaaagaaattttgaataaattacaaccttctcatatagcatggttattagctggtgttcttgtatctgaatgtattaactggttattatacaaagatattaaacgagtaactgcaccaggattatcatcactagtcgcagtatgtgctttagtattagctatatactcagcgtttcaagttaagagatggatggataataaagtacacgaaaagggattcaaaaaatgtgaatcgataattgatgaaatccaagggttagccattgaaataggtcgaattaatagtgacatggttatcctatacaggaacgaattaattctattggatagtgttcaattggaaaataaaattaaaaatatacatggttctatatacaagataaacgaagcaaaaaacaccataattgggcactttatgcatcttaatatatggggttttgacataaaggaagaatacaacccgattattttgcttgatttcgttaaagcgtttcgaaatatcgtaatggatacaacatcaacaatcatgaaagcacaatcatctcaaaaaatatcactagatgaaaaagaaaatatttacaatgaaaagctgaaagctataagtgaatatatggataagttaaacaactcaacttttaaagatatattcatcacattacccgaaaaaaaagcaaaatag

SEQ ID NO: 207686 - DNA, 513 bp, Klebsiella oxytoca
atggatacttctgaacactataaagaggtctacgcatactttggtcttgcgatgtatagagcacaatgtgtagagcagtcgatagttcaacttcttattttcttcgatttttttacgaaaaatgcacccacatttactacccgcgataagtgggaagtagagtttgacaagtttgataaggtattatctgagaaaacaatggggcagcttttaggcctgattagaaaacttgagcttcttgatggtaatattgaaatcatgctttcaacaactttaaaaaaaagaaactggctagcacattctttttttgtcgatcatgcagtagatttcattaataaaaatggacgggatcagatgattagggaacttaatgattcaatcgagctatttaattctgttgaagatatcctcaaccctatagcacgtaacgctgcactaaaatacggtttaaccgatgagttattggacaaaattcaaagcgaattgtgtaaatcttcaacaagtgattattag

SEQ ID NO: 207687 - DNA, 507 bp, Klebsiella oxytoca
atggcagtagttcctagacaaaatgcaccaagtaaaaaaatgatctggcagtactggattgacaatggaatgcaaagaggtttggatgatacgcgctatgataatgcgtgtgattttaatgtatgtgtatgctgtggccgcgaatcctcaaaattggagagggcgcatattatccctcactcactaggcggaagtaatgatgtctcaaattatattctgctatgcagtaaatgccatagagaaagcccagatattgctaatgaatctgcgcttattgaatggatgaatgagcaacctactgaaatggaaaacatgttaagactaatccaacaggaaatggataaatataataaagaaactcaaatgacagttaatgaaattcttatcaaagaaactttcagtgagttgttcaaaaaagcaggaacacatggtggtagatattctgatgcaaccaaggtgtatattattagggaagctttgaaaaaaatatttattcagacgatttga

SEQ ID NO: 207688 - DNA, 336 bp, Klebsiella oxytoca
atgctgaaatcggaagggcgccgtagaatcatcggcaagccgggattacccggtgaggcgcaatgttgcgggggcttgaaccccggcggcagagatgaattggttgctggaaagagaaaacccccgcacgttgtttggtatcaacctggcaacgtatcgggggctactctcaaacctgaacaatttgaggatagccgcgaacggttgcccttgcaacaaggcggctgtatgacgctcgctcagttgggcctgctgctgtgggacgatctggcggctccggtgattgctggcattctggtcagcattatcgtgagccggatggataaccggaagtag

SEQ ID NO: 207689 - DNA, 1185 bp, Klebsiella oxytoca
atgaaagagcttttcgcaggattttatggcctttcaccagagcaaacatcggagatttggaatgataaaacaagtgtatttatttttgacacaaatgtcttgttattattatataaatgtgaagtggaaaccagagattctttctttgaattatgggaaaaaataaaaacacgagtatgggtcccataccatgtatgccttgaataccaaagaaataggctttcggctattaaatctcatactttagagttggagaattttggacaatacattaaaaatcaaatcacctcatcgttagcaattgaacactttgataacaaacataaaaatactattactagatatgaaaaactttgcgaacaactaaatatactctccgagaaaatcattaacatctcagatgaatttatcgaagaacaaataaaaacaagaatagatgctgcggattttctaaacaaacatgacaccgtcagggatagaataagtgatttactatcttcacagattggtgccgctccagaccagaagagaataaatgagttagaagaaaaaggtaagaaaagatatgaactattaataccacctgggtttgaagatgcgaaaacaaaaaatgactcatttcattataatggagttacgtataaaagtatgtacggcgactggtttatatggagtgaattactagaactcgtagcacaaaaagcttgtaagggagttatatttattagtaacgatgtaaaggatgattggtttttcaaaactggaggaaaaaccagaggaccactagaacatttaaagacggaacttaaaagcagtggaaatggtactgaattattattatatacatcatcatcttttttgcataatgctaataattttttgtcgggtaacaaggttagcgaagaagcaataaaggaaattgagcatattaacacaccacctcaagataaaataaaagcaaccgaaatttataatgatccattcccattacatcaagatgcccttgctgtaatggaagatctaaaaacagttgaggaactgttatcaaacacatcacgtgatatgcagacttattatgatttatcacgaaagagagaggctatcaggtcaaaattaattgaattcgctgaacaaagacgtaagtggtatcatgcacgcgaattcgaacaacaaatgattagatga

SEQ ID NO: 207690 - DNA, 231 bp, Klebsiella oxytoca
atggaaatgggtactgttaagtggttcaacaatgccaaagggttcggttttatctgccctgagggcggcgtcgaagacattttcgcccattactcgaccatccagatggatggttacagaacgctaaaagccggacaagcggttcggtttgatgttcaccaggggccaaaaggtaaccacgccagcgtgattgtccctgttgaagctgaagaaacagaaacagccgcataa

SEQ ID NO: 207691 - DNA, 759 bp, Klebsiella oxytoca
atgaaaattcgctcagctcttcttgcccttgggatcgcagccacgcttaccggatgccagaacatggattccaacggcctgcttagctccggcgcggaggctttccaggcttattcactcagcgacgagcaggtgaaagccttaagcgacaaagcctgtcaggagatggatgcgaaagcgactatcgcgcctgccagcagtgaatacagcaaacgcctgagtaaaatcgccgccgcgctgggggacaacatcaacggccagccggtgaactacaaggtgtatcaaactaaagacgttaacgccttcgccatggctaacggctgcatccgcgtttacagcgggctgatggatttgatgaatgataatgaagtcgaagcggttatcggccacgaaatgggtcacgtcgcgctgggccacgtgaagaaagggatgcaggtagcgctgggcaccaacgcggtacgcgcggcggcggcctccgcgggcggcatcgtcggcagcctgtcgcagtcgcagctgggcgatctgggcgagaagctggtgaactcgcagttctcccagcgtcaggaatcggaagcggacgactactcgtacgatctgctgcgcaagcgcggcattaatccggcaggacttgccaccagcttcgagaagctggcgcagctggaagccggacgccaaagctccatgtttgatgaccacccggcatcggaagcccgcgctcagcatatccgcgatcgcatgaaggccgacgggattaagtaa

SEQ ID NO: 207692 - DNA, 123 bp, Klebsiella oxytoca
atgcttgtagcccggtcgcgcgccgcggagaaaagcggaagcggtattgcgcgctgcttcccggaggcggcgcttaacgcgcctgtccgggctaccggtccgcagaaagcggtaaacccgtag

SEQ ID NO: 207693 - DNA, 165 bp, Klebsiella oxytoca
atgagtgatattcgtaacccgaagtttttatcggtgggggacatctgccgtccggtagattcaggaaaaatgctggtgcaggattgtgaagtggagtctcccttaccctgtatcgtgattctggttcacggcgtcaatgatgtgggagaggcctatcagaactag

SEQ ID NO: 207694 - DNA, 189 bp, Klebsiella oxytoca
atgaaaaactggtcagttgagcatacgagagaggtgaagaagtggctggacatagatacatatcgcggattcgaagagcttccactcatgcagctttatcatgaactacttgcaagaaccttgttcttcaaaccttaccatgaagaatttgaagcgaaggccgtaagcctctacatcgacaggatctga

SEQ ID NO: 207695 - DNA, 291 bp, Klebsiella oxytoca
atgactacgatatgcccgcaatgcggttctgaccgcgtaagtgagcgtcatattggcaggaagatgggaggtattgctggaggcgtggctggcgctctcagtggcgcaggaacgggggctgcgattggttcagtcgtgcctgtagtgggaacggcgacaggggcggttattggcgcactgttaggacggtttgtcgctggggcaacggctggagctgttacggggtcgaccatggatggcgtactgtttgaccggtatgaatgtcgtaactgcgaacatacatttgactga

SEQ ID NO: 207696 - DNA, 891 bp, Klebsiella oxytoca
atggaaaacaaagcaaagacaagtggcaaccccataaaggatgcagtggacattttaccagaggggatcagaaaaatcgttctcggcaggctgaatgagatcgtcggttatgaaccccgaattggcattatgggtaaaaccggctcaggtaaatcgagcctgtgtaacgctattttcaaaggggaagaatgcccggtcagcgatgtgggagcctgtacccgtgaagtaaaagaagtgcgtatccagtttgggaaacgttctctctatctggtggatatccccggcgtgggcgaaagcgccgaacgtgacagtgagtatgaaaagctctatagcggattaatgccgaaactcgacctgatcctgtgggttatcaaaggtgacgatcgcgttctgacccccgatgagcgtttctataaagaggtgcttatccccgctggtggcaaatcaaaaacgctgtttgttctgaatcaggtggacaaaatcgagccgttccgggaatgggatgagcaaaatagttgtccttccccgcgccagatgaaaaatatcacagagaagaaagagtacatcagccagtaccttggttttcctgaacatccgattgtcgctgtatcagccaatgagggctacaacgtgactcatctggttgaggaaatggtccgggcgctcccaaagcacgcacaaagctcagtagcggctcaggtcaaagaggatcacaaaacagaaaaggtcatcgaagaagccaccgacggtttcggagacaccgtagatcgggttatcgatgaaatcattgatatggcccctattcccaaacccgtcgcaacgctggcaaaagcagcaaaaaaagtggtggtggaaggtattaagaaagcctggaattttttctttggataa

SEQ ID NO: 207697 - DNA, 267 bp, Klebsiella oxytoca
atgaagaaattgagcattggtgttctgtttatctctggttttttatttgcaggttcttcttttgcaaacgtaatggatctgtcatgtgatttcaaaaatggaggcgatatgctcattactcacgatggtgacaatatctatatcgcatacagtgcccctaaattttcaccagatgataatgtcattgttcttgataaatcgtcggaaaatgttgagcaaggattatacctgctacgcaatatgctgaattttcgttatctggaataa

SEQ ID NO: 207698 - DNA, 465 bp, Klebsiella oxytoca
ttgaagaaggtatttctggcgttagagtacgaaaataaacataatattaaggataagaaaatgaatacacaagcaacaaactcaaccgctgttaaggctttctttgttaagtacaaaaaaatcatcatcggagcttttgttttattttgtatttataattttataaccggctttatgcgtggccctgaacttccttattgtagtgattctaaccttattgataaaaagataccaaacatgattattaataagctaaggcaatataactcaaatgcccttcatctcaaaattacagtgtctgataccaaggagactttatatgataaaaaagctgggttaaggcagtgtactgccggggtgacaatgcgttacaacgggaatgtccacaccgatgattttacttatcagattgcatggactaatgaaaaagaaggtcagtatcaagttaaattacttgaagattaa

SEQ ID NO: 207699 - DNA, 417 bp, Klebsiella oxytoca
atgaaaaaattaatcaacgttgcaatactgactctggttgctttgttttccgcttcttcctttgccaaatggcatggatgtcaagagcaaaatcttgtgttctttgcttataacatgaaacatactaaagctgtagaactctgccaaacagaggaaggttatagatacacttttggacctattggaaaaccagaaattattctagagaaagatagcaatgatgttactcgcggaggcggtatggctggaggatttgatattaaaaatggtgatgttatttacggggtaatggaagataaatttggtaattttgctctcatcgtgcagaaatctgattatagtagggtcatggcggagatagcgcttgatagtggagatgaacgttatatcaataaaacttacgaatattttcattga

SEQ ID NO: 207700 - DNA, 1608 bp, Klebsiella oxytoca
atgactgaacaagaccaaaaacaactaggtgacacgctctggaacatcgccgacacactgcgcggcgcaatgaatgccgacgacttccgcgactatatgctgtcgttcctgttcctacgttatctgtcggacaactatgagaccgccgctaaaaaagagctgggggcagattaccctgtatctccagaagaagagtctgttgcgccgttaagtctctggtatcagaacaatcccgcagatgtgaaagagttcgaagcgatgatgcgccgcagggtgcattacgttattgaaccgaaatacctctggggcagcatcgctgaaatggcccgcacgcagaataaagagttactgcgcacgctggatgcaggttttggctatatcgaaacgcagtcatttgaaagtacctttcaggggctgttctccgaaattaacctgacgtccgacaagctgggtaaaacatacgaagaacggaataaccgactatgtgtcattattggcgcaatcgctaaagggatcgcgaagttttccaccagcagcgatattctgggtgatgcctacgaatatctgatcggccagtttgccgctggttccggtaaaaaagcgggcgaattctacacgccgcagcaaatttccagcatcctgtccgatatcgttacgctcgacagtcaagatccaaccaccggcaagaaaaagcgcctggataaagtgttcgactttgcctgcggttccggttcgctgctgcttaatgtgcgcaataaactcggtgcccacggtatcggcaagatttacgggcaggaaaagaacattaccacctacaaccttgcgcgtatgaacatgctgctgcacggagtgaaggattccgagtttgagattttccacggtgattccctgctgaacgactggccaatgctcaaagaggctaacccagccaaaaagatgcatttcgatgcagtggtggctaacccccccttcagctatcgctgggaacctaacgaagtcatgggcgaggatttccgttttaaaaactatggacttgctcccaaatctgctgccgatttcgccttcctgctgcacggtttccattttcttgcccaagaaggtacgatggcgatcgtcctgccgcacggtgttctgtttcgcggcggtgcagaagagcgtattcgtcgtaagctactcgaagacggcaatatcgacacagtgattggcctgcccgctaacctgtttttctcaaccggtattccggtgtgtattctggtactgaagaagtgcaaaaagccggatgacgtgctgtttattaacgccagtgaatacttcgagaaaggtaagcggcagaaccgtctaaataaagagcatatcagcaagattgtcgatacttaccaataccgtaaagaggaagaacgctattcccgacgtgtgcccctaggtgaagtaaaggataatgactacaacctgaatatttcccgctatatcagcaccgccgtgccagaggaaaaaatcgatcttggtgaagtacaaaaaactttagttaatttagaaaaagagatttctaaagcaaaagaaatccacaatgcttttcttaaagaactagggttatcaaacttaccgtaa

SEQ ID NO: 207701 - DNA, 1200 bp, Klebsiella oxytoca
atgagcgataaacctaaaatttacagttacaaaaccatcgaacgtgttgttacccgcctgcgcgacgacctaaacaataccgactttgtactgttttatgcctataacggtactggtaaaactcgcctgtcgatggcctttaaggacaaggggaaaaagaagatccgtcgcccagctaacgttaacgaccacgtaatgcagccgctggtcattgaagaagtgcagggcgataccctttacttcaatgcctataccgaagacctgttttactgggataacgatctaaacggcgataccgaacgcgtattgcgcatcaattcagaatcaaaattctttgccgggctgcgggaactggcgctggaagataaaatttttggatatctggaacgctacgcgaattttaatttccgcattgactacgagcagtggaccgttaccttctatcgtgacgatacaacgcatattaaagtttcgcgcggcgaagaaaatatctttatctggtgcatctatctggcgatttgcgaactggcgattgacggcgatgaagctggcccatatagctgggtaaaatacctgtatatcgacgatcccatctcctcgctggatgacaacaacgccattgccgtcgccagcgatctggcgaacctgctccgtcgcggaagaggtaagctgaaaacggtgatctcttcacaccacggcctgtttttcaacgtgatgtgtaacgagctaaaaaaaaccaaacccaaaacctacttcttttattgtgaaaaaagcgcaggcacttattcgctgcgagctaccgacgacacgccgttctttcaccacgtcgccatgttgagtgagttacaacaggctgttgcgagcaataaaatctatacgcatcatttcaatatgttgcgcagcatactggaaaaaacgtcaaccttctttggctatagcgatttctctgattgcatccacggcgtggaggatgaagtgctatactcccgcgcacttaacctgttaagccacggtaaacattcgacttatgaacccagagaaatggtcgacgacaaccgaaccttatttaaaaatatcctgagtgcgtttctggcaaaatatcagtttgcactgccggaactgctggccgaaaaaccgcagccgcccgcagcacaacctgaaattcccgttgaactcattgaccccgtggatcaagcatga

SEQ ID NO: 207702 - DNA, 1206 bp, Klebsiella oxytoca
atgaaaaagggttatgtgccagagctacggtttcctgagtttcagaatgatgtgggatgggatattgcaaccgttggatctaaggcaataaaagttggtagtggtatcacgccaaagggtggcgataaaaactataaaaaatcaggccgtccttttattcgtagccagaatattggctgggggcacttgatccttgatgatgttgcttttattgatgacgacactcactcgacgttctcttccactgaaatcaaggttaatgatgttctgttaaacattaccggcgcttctattggaagaagtgccgttgccgatagtgacattcagggtgggaatgtaaaccagcatgtctgtattatccgcaccaagaaatcagaactaaaaccttatttccttaaccagtatcttctgtcttcggatggtcaaaagcagatagacagttttcaggctggcggaaataggcaagggcttaactttgctcaaatacgttctttttcttttttgttgccctctgtaaaggagcagcaaaaaatcgtggattgtctttcttcatttgatagcgtgatttcgttacaaacgcagaaaattgatgcgctgcaacagtataaaaaaggactgatgcagaaactgtttccggcagagggggaaataactcctagtttccgttttccaaaattcaaaaaaacgggtgattggacaagtacaacattaggaagcctctgctcaaatatttcctcaggcaaggacaattttgatatcaatggaaaatataatttatatggttcaaccggtattataggtaaagtaaataattattcctacaatggagacttcatacttgtagcaagagtaggagcaaatgctggaactctaactagagcaaatggaaaatttggagttacagataacactcttattatttcattacgcgatttacaatatactaatttcatttattactcattagaaaaactttcacttaataaattagcatttggctcaggccaaccattaattactggtagtcaattaaagaaactcattatttgtgttccatctgcgatagaacaacaaaaaatctccgattgcctttcttcgctcgacaaattgatcgctacccaaacccaaaaattagccgctctaaaaactcacaaaaccggcctgatgcaacagcttttcccttcaatggatgaggttaacgcatga

SEQ ID NO: 207703 - DNA, 2973 bp, Klebsiella oxytoca
atgacaacaacagaaaagcagatcgaacaagatctgataaccaaactaactgacctaaaatacgttcatcgttctgatatccgtgatcgtgactcactagagcgtaattttcgcgagaagttcgaggaactgaaccgggtgcatctgaccgacggtgaattttctcgcctgatggaacaaaccgtcagtcaggacgtattcaccgccgcgacccgactgcgccagcataacagccttgagcgcgacgacggcaccccgctgcattacacgctggtcaatatcaaagactggtgcaaaaacacctttgaatgcgtcaatcagctacgaataaataccgataacagccaccatcgttacgacgtactgctgttgatcaacggtattccggtggtgcagattgagctgaaagcgctggcgattagcccgcgccgcgccatgcagcagattgtggattataaaaacgatcccggtaacggctacaaccgtaccctgctttgcttcctgcaactttttatcgtcagtaaccgcagcgatacgtggtatttcgccaataataacgatcgccactttagctttgacgcagacgagcgttttctgccgctttaccagcttgccgatgagagcaaccggaagatcactcagcttgacgcctttgctgaaagattcctcgccaaatgcacgctgggcgagaccataagccgctacatggtgctggtcgccagcgaacaaaagttgttgatgatgcgaccttatcagatttatgccgtacgggcgattgttgactgcattcaccagcgccgtggcaacggctatatctggcacaccaccggcagcggcaaaacgctgacttcctttaaggcctcgacgctactgaaagataacccggacattgagaagtgcctgtttgtcgttgaccgcaaggatctcgacagacaaacccgcgaagaatttaacaagtttcaggccggatgcgtggaggaaaataccaataccgaagcgctggttcgccgtctgctgtccgacgattacgcggataaggtgatcgtcaccaccatccagaagctcgggctggcgctggacagtaacaataagcgcaactacaaagcacggctggaatcgttgcgtaataaacggatggtgtttattttcgacgaatgccaccgctctcagtttggcgacaaccatcaggcgattaaagaatttttccccaacgctcaactgtttggctttaccgggacgccaattttcccggaaaacggcacctataagcagattgacggacaggagaaatccattgtcaccacacaagacgtgttccagaaacagcttcacgcctataccatcacccatgcgatcgaggatcgcaacgtgctgcgtttccacgttgagtattacaaagcggaaggtaaaagtcggctgaagcccggcgaaacgctggcgcaggaggccgtggtcagagcgatcctagataaacacgacgcggccaccgccgggcgtaaattcaacgcgattctggctacggcatcgatcaatcatgccattgagtatcaccgtctgtttcaggaaattcaggcactacgggttgcagaggacccttctttcacgccgttgaacatcgcctgcgtgttctcgccgcctgccgaaggtaataaagacgtacagcaaattcaggaagatttaccgcaggaaaaagtggataacgaagaggcgccggaagagaaaaaagcggcgctgaaggagatcattgccaattacaacacccgctacggcaccaaccaagatatcaataatttcgacctgtactatcaggatgtgcaaacgcgcatcaaggcgcagcagtacccgaatcaggattatccccacgcgcagaagattgatgtggtgattgtggtcgatatgttgctgaccggtttcgattcaaaattcctcaatacgctgtatgtcgacaagaacctgaaatatcacggcctgattcaggcattctcacgcaccaatcgcgtgctgaacgatacaaaaccttacggtaaggtgatggatttccgccagcagcaggatgcagttaacgatgccatcgcgctgttttccggcgagaagagggaacacgccaaagagatctggctggtcgatgccgcgccagtggtgatcagcaagctggagcaggcagtcgccacgctggacagctttatgaactcgcagggactgccttgtgcaccggaagaagtggcgaatctgaaaggggatgaggcccgcagtcagtttattaacctgttcaaagaggtgcagcggctaaaaacccagctcgatcagtacaccaatctgacgccggagaatgtcgccagtattgaatacgtgttgccggacgatacgttacgcgctttccgtggcgtctatctggatacagcccaacgcctgaaagcgcagcaggagaaaaatgatgcaactgtcgctcgcgaagtgcaggagctggactttgagtttgtgttgtttgcctcagcggtgatcgactacgactacattatggggctattggctcgttatacccagagcaagcccgacaagcagaaaatgacccgcgaacagttgatcggcctgatttgcgcggacgccaagtttgttgatgagcgtgaggagatcaccgcctatatcgatacgctgaaagcaggtgaagggttaagtgaggaagagatacgtcagggttatgagaactttaagacgcagaagtttacccatgaactggcggcaatagcggaacaacacgggctggaaaacgccgcgttgcaggcgttcgttgacggaattatgcagcggatgatttttgacggcgagcagttgagtgatttgttggctccgctagatttgggctggaaggcaagaacgcagaagagtctggagttgatggaagatttagcgccgttattgcataagctggcgcaggggcgagagatttcggggctggcggcgtatgaacagtga

SEQ ID NO: 207704 - DNA, 234 bp, Klebsiella oxytoca
atgaagcttatcgcggttaaaccaatttacttcagcggtgtagttgtggctgagggtgagttactggagacgcaggagcagcacggtcgcgaactggtcaaaaagggatatgtaaggctggtcgatgttgataattctgcgcagcaggaacagcaggaacagcaggaacagcaggaacagcaggaacagcaggaacagccggaaaccgtgccagagaagaaggctaaaaaataa

SEQ ID NO: 207705 - DNA, 879 bp, Klebsiella oxytoca
atggattgcgcacgggccctcattgcccacggacgacgactaaagccggtgagcaatgctctcggtttatcgcgtgcgcagctttcgctttaccgccatcgtccggctgactggcaggacggtcgcaggcagcggcggcaggatgacagcgagctgctggtacgtatccgggccgaagttgccgacctgccgagctatgggtatcggcgcgtctgggccctgctgcgccgtcgtgcggagcaggaaaaaagtcccgtggtgaatgccaagcgggtctggcgcgtgatgcgtgaaaatggcctgttattgctgaaagcaggacgaacgacaacgggcgcacgacagcatcggggacgcgtggcggtggatagcagtgatcagcgctggagctcggacgggttcgagttccgctgcgacaatggagaaaagctgcgcgtgaccttcgccattgactgcggcgacagggaagcactggactgggcagcgagtacgggcggttacgacagcgagacggtacaggacgtcatgctgcgttcggtcgagcgtcggttcggggtgggtttacccgcggcccctatcgaatggctgacggacaacggctcggcgtaccgtgccgaagaaacgcggaagttcgccagaatgctggggctggaacccaggacgacggcaataagaagcccgcaaagcaatggtgtggcagaaagcttcgtcaagacgatgaagcgggattacctcggcatgatgccgaaaccggacagccagacggcggtgataaacctgtcgctggcgttcgagcactataacgaatatcacccgcacagcgcccttggatatcgttcgccaagggaatatcggcgtcggcggaaaccatcaacctaa

SEQ ID NO: 207706 - DNA, 396 bp, Klebsiella oxytoca
atgttcaagcctggtcaaagtgaaatcatgggtactgttcttaccgaaccagaacgcagacgtcgccgcacgccgcaggaaaagatcgccattgttcaggagacttttctgccgggcaactctgtatctcttgtcgcacgacgtcatcaactccatgccaatcaggtctttaaatggcgcaaacagtatcaggacggcagcctgaccgccgtctccgcaggcgaagaggtggtgcccgcttccgagctgagcagcgccatgaaacagatccgtgaactccagcgtcttcttggcaagaaaaccatggaaaacgagatcctcaaggaggcggtggaatacggcaaattaaaaaaatggattgcgcacgggccctcattgcccacggacgacgactaa

SEQ ID NO: 207707 - DNA, 1404 bp, Klebsiella oxytoca
atggggagtaaaattaaactgggcgagctgctaagtacgctaacagactatcatgccaatggggcttataaaaagttaaaagagaatgttgaattactcgatgaacctgactttgctgtaatgatccgtactaccaattttgagcaagaagacttctccaataacgtgaagtatataagtaaacatgcttatgaattccttgctaaatccaaggtgtatccgaacgacatcatcatgaataaaattgccaatgctggatctagttatttgatgccagacttgaaaactccggtttctttggcaatgaatctttttttgctacgaatagatgacacaaaagcaaacccaatttacatttatatttaccttaaaattaatgaggcgtatgtaaaaagctttgccaatggttccgttactaaaacgatcacaaaagatgccgttaaaaatttagagattgaattgccaaatagagcaattcaagaccaagtcgttgctcaatttacttgtattaacgacaaaatcattctcaatcgccaaatcaaccaaaccctggaacaaatatcccaaaccctgttcaaatcctggtttgtggatttcgatccggtgattgataacgcgctggatgcgggaaacccaatcccggaagcgctgcaatctcgcgcagaactgcgtcaaaaagtacacaatagtgcagatttcaaaccacttccggcggatattcgtatactgttcccggctgagtttgaagaaacagagctgggttgggtgccgaaaggttggcaacacaaaaatgctgaagaaatcgcaacaatttctatcgggaaaacgcccccacgtaatcaaaaggaatttttcagcgataaaaaagacagtaattacacatgggtctcaattagggatcttggtaattgcaatgtatttattaaagaaagcagtgaatatttaactactgatgcagtaaataactacagtgtaaaaattgtgcctaaaggagctgttttattaagcttcaaattgactattggccgaatagcgatagcagagagcatattaacaaccaatgaggccattgctcatttttataatatgaatcatggggtcaataaagagtacctgtattcatacttacagcattttgattacaacactttaggaagcacatcctctattgcaacggctgtcaactctaagataataagaaaaatccccattcttttacctgatgctgatatattgcatcaatataaaatatcaacagatatcatatttaaaagaataagtttcaacaatcgaaatatatacgatttaaccgccctccgcgacaccttgctccccaaactcatctccggcgagctgtccctggaggatctgccagatttagccaaccaaaccgaacccgcataa

SEQ ID NO: 207708 - DNA, 1284 bp, Klebsiella oxytoca
atgagcaaatacccaacaggagtggagaaccacggcggaaccctccgcctgtggtttatctatcagggtgtaagggtaagggaaaatcttggtgtgcctgatacgccaaaaaacagaagagtggcgggagaactacgcacttcgatctgctatgcaataaaaacaggcacattcaactaccctgtgcagttcccacaatccccaaacctgcgcaggtttggctttatacagcagggcatcaaactgaaagatctgtcagctcgatggctggaactgaaacgaatggagataaccgggaattcacatttgcggtatgtttcatacatcaaaatctgcacggaaatcctcgggccagaaaagacaatttccggagtttccaatgaagatgttctgctagtgcgcaaggaattgcttaccggatatcagatttgcggaaaacaccagaaaaacagagcagcgaaaaaaggtcgtactgtacggacagttaacgtctacctaaattgccttggccagatgttcaaattcgctgaactgaatggctatatagagaaatcaccattcaccggtgtagacccactgcgaaaaagcaaggctgagccagacccgctcacaaaaagcgagtacaggcgattgctcaacgcgagcccgtctgagcagattcgaaatctgtgggtgctggccatcaacaccgggatgcgacatggagaaatcgccgccctggcctgggaagatatcgatctgagagaaggcaccataaccattagccggaacatagctatgcagggccactttactccgccaaaaactgagtgcggaaatcgggtggttaatctaacagaacccgcaatcggggcactgaaaagccaactggcatatacccgcatgggaaagcaacatgagatagacgtcaatcttcgcgaatttggccgcgttcgtgttgatgcctgtacgtttgtttttgtgccgcggctgacggccagaaacgggaaaggcggagactggtacgcgcccggctcatttggcgcaacatggaacgatattctgaagcgcgcaggtataagacatcggcgagcttatgagtcaaggcatacttatgcctgctgggctctaagcgctggagcaaacccaaacttcatcgctgcacagatgggacacacttcagcccagatggtatacaacgtttacggtaaatggatgagcgataataatgtcgatcagttgagtattctgaacgcaaatttcgccagtgatgccccaaccatgccccatgcaatttctatgtag

SEQ ID NO: 207709 - DNA, 123 bp, Klebsiella oxytoca
atgagcgcagaaatcatcgatcaggccaacgagctggcagagcgccggctggaaatgaccatccagaacatgcggatcaaccataacgctgtttcggctactcactgctgtgattgcgggtaa

SEQ ID NO: 207710 - DNA, 243 bp, Klebsiella oxytoca
atgccgcgctgggccagccgcattctgctggaaatcaccgacgtgcgggttgaacgactgaagagtatcagtgacggcgatgcgatacgcgaagggtgcagtatcaccgacatgaaaagtggcgactgtgtagctgatgtgttcgcgcgcctgtgggcgtcaatctacggtgctgaaagttggaacgccaacccctgggtttgggttatcgagttcaagcgcgttgaaggcggtgcagcatga

SEQ ID NO: 207711 - DNA, 234 bp, Klebsiella oxytoca
atgttcatgtgttcgctggggaagcgctggcgtccggatatcaacgagattttactggcgttctgtagtttgaatgaaattcattatctgtgctttatgattagcaaggtaatgattgcgtatggtttgatcgcgtactcaggattccctgttgtgcccggatggtttatgcccggagaaataacgcagattaaaattgattttatgtttgagtttacaattatttcacattga

SEQ ID NO: 207712 - DNA, 2583 bp, Klebsiella oxytoca
atggctgaaggtgaaaatcttggcggagtctacattgagattgaggccgatgttgcaaaattgcttactggtcagcagcaggcgaataaagccctagataacattggcgataatgcacaaaaaacatcagggcaattcaaaaagcttgatacgcaacttaatgctacctcgaaagtgatgtcttcagggttgaagggaagcgttcagcaggcaggttatcagatccaggacttcatcgttcaggtccaaggtggtcaatctgcattggtagcatttagtcagcaagggtcgcagctggctggagcattcgggccgggtggtgctatcgtcggggcgctaatcgcgcttggaactgttgttgcagggactttaatttcttctctcaatggtggcaaaagtgcaatggatgcgcttaaagatgccgccgagaggatgaatgatgttatctctgtttctactcagggtatcgctgcactttctgacaaatacgcaaaccttgctagagtgaatgctaccgctgcaacattactcagaaatcaggctgcgattgaatacaatcaggcaatttcaaagatacctaaagccatcggtgatgccgctgactccttcctttcatttggagataaagctatttcagcttttggtggtggttatgcatcaattgacggattcaacgatcggcttaagtcgctaaatatcacgacagatgattacaaatctgcgatgaatcaggcgtatggtgcgggacaggcgttctcggcaacagccaatagcatcggcaatactgtcggtgccgtagcctctagattgggtatttctgaagaggcggcgtttggtcttactaagcaactcgccgatctaagcgataacccatcacctcaggctctgcagactttagcgttaagaattggcgatatgatttcgtcatcaaaaaacgccaagccggagttagtagagctttacaacaagatagtagacctttccaccggagcatctcaggcggcctttaactttgaaatgttgaagaagtccactgataacctaaccgccgggcaaaaaagcttaattcagcagtccgagaggaatctggcgctctctaaactacaaggtgccgcaagggcaagattagcggctcaatatgcagctgaggacgcgggattctcgaaagacgatccgcacaccaagcgaatgatggatgatgctgccgcgacttacaccaatctcgattcgcataagaagctgacagcggagcagaagaaaggtgagagtcaggcagagagaaatgcaaaagttgtcgaagagtacagccagaaagcaaaattggctgccgattctacaagcgaactctcgcgcgaacaggcgatactggcagcaaaacagaagttaacgaatgctacaccgcagcaggttgctcaagttgaacgtgatgcagcggcggcatgggatacggccaatgctctcaaagcccaagccgccgctcaaaagctcctccctgaaacaagagagaacgcctcttatcagcaggatatgaaggatctgaagactgctcttgatgggaagaggattacccagcaacagtacgatcaaaccagtgagcaactggaggctcagcatcaggccaaccttgccaaaatacgctcacagcaggtggttaaccccacccagcaggcacttgccgaagttgacccggtgcagcaattggccaaccagcacgcgcaggagctggcgctgattcagcagtttgagcagcagggcgttttggcccatcagaatgcgctggccctcaaaaacgcagccgacacgcagtacgagcagcagaggaccgcggctcaatgggaaatcctcagccagcaaagcctcggctataacatgctgacgagtgcggtggatgcgtttagcgggaatgcctccaatgcaatcaccggcctgctaaccggcacaatgtcagcacaggaggcgatgcagtcactcggcaataccatcctgaatagcgtaatcaacagcattgtccaggttggcgtggagatgctgaagaacttcatcctatctcagacgctgggggctgctgctcaggctgcaaatgctgcgtctgctattgcaggaggagctgcggccctcgcagcttggacgccggcagcaattgccgcctcaattgctactgggggaacagcctcggcgacaggcttaaccgcgtataagggggcgcaagccgccggattggcaacaagtgtgctcggcgcccgctacaacggcggcccggtatcagctggcggcctgtatcaggtcggcgagaaaggtaagccagagatttaccaggccagcaccggcaagcagtacatgatccccggcgataacgggaaggtcatcagcaataaggatatgcagtcaggaggagggatcagcgtgcaggtgaacgttatcaaccagtcaaccggcgccaccgttcagagtgccaacggctacatgcaggacggtagtgcggtggtggacttgctgatcaccgacatggaaagaggcggcccggtatcctctcagatgcagcagacatttggactaagccgcaaagcgcaaggtgcttactaa

SEQ ID NO: 207713 - DNA, 174 bp, Klebsiella oxytoca
atggaacaaaagcaaagtaacggcaagcagatctcctatcggccacgcaaggaggttcgtgattttctggaagataatgctgcaaaaacgtaccgttctgtacagggaatgatggactacttgatggaccggattatggatttggagaagaaaggtgagattacaatccagtaa

SEQ ID NO: 207714 - DNA, 804 bp, Klebsiella oxytoca
atgaattttgatgattcatttccaaaccgagtatcgatagcaagaaccgctcttggcctgacccaggatgaactagcccagaaggttggtgttgtaagaagacaaattgccgcttacgagggcggggaagcaaaaccaagaataaatgcattacagaatcttgcagctgcgcttggtacaacaacatcctggctaacaagtggtgttggggatgggcctgatgtaagcaatgtaaagaaaacaataacgttgcctgagattccagtgctttctcacgtccattcgttctcttttgaagttgaggagtttatttcctcttcatcaattatcgatttcattcctgcacctcccggtgcacacgaaaaatgcttcgcacttgagatatcaggtgactcaatgtccaccgactcaggtgatagctttccccatggaaccatagttacatttgacccaaacaaggaaccaaagagtggggactatgtattatgctggctgaatgacaccggcgaaaatacgttcaaacaactgatactcgaccaaggccagccttatctaagagccttgaacaatcggtactatccagtaattagaccaactcccttacttatcatgggggtggcaattcattcacagcgatttctcaacaaaaaaatccatcaagaacaactaagcatgtttgaggatgatcactgggctgagcgagaaaacttaaattcgcagaagcatctaaagctcatagatagaataaaaaacttggaagaaaagatggatttaatccttaacttcgtgaaaaaacaaaaataa

SEQ ID NO: 207715 - DNA, 210 bp, Klebsiella oxytoca
atggatagtgtcgaggctaggctaaaaatggcagaaatagcggcatcaatggttgaagcccacgttcaggcctcacctggcaactactcatcaaaagatgacgtttcaagagcgtttaataaggtttttgatgctatttacagggattttttacgagtagcacctaagccggctactaaatccgcgcctaaaccaatagataaatcttaa

SEQ ID NO: 207716 - DNA, 249 bp, Klebsiella oxytoca
atgcgatttaaagagatcataccgggcctgaaagccccggcgactgttccggcgtcactgtctaaaaaagcggtcagcgcggttcaacgattctggcacggagagcgtaactataagcgcctgaatgaaaaccggacgggctattacaagattgatctcggtccgttctggcgactgctcagccgtgatgaagggcgcacctgggagataatgaatcatgagcgctataacacggctatgcgtaactga

SEQ ID NO: 207717 - DNA, 1191 bp, Klebsiella oxytoca
atgacattaccggatgacagccttatccatcaggcagtcacaaaattaactgatcggctgaccgcgcgtttgccggaagaacagaatagctatgtccgtggtggtctgttgttcacgggtaacatacacgatgctatgccccgccggttgcttctggatcagcgtctctccccgcttgataaaatgggatggataattatccgcctgcacgctttgagcaatgacggtgccgtttttccctcttatgaagaattgcagctgcagctggcaacgccgggtaaaggcagggcatcaaaagagaccatcagccggatacttctgatgttacgcatcacgggctggctcagcctctgcaaacgcgtcagggatgaaaagggaagggtaagaggaaatatttatgcgcagcatgatgagccattgtcatttgctgatgcggaaatgttcgacccgcactggcttaaaacagtggctgaagcctgcctgagcagtaaccggaccatcagcgccacggcaaaaacaatcatcagtgaaatccggcttgatcccacaatgctccatcatcgcagtcatctccagatgattgaggcccgtctgggatcagcccaaagtcctgaagaattgacctgccgtgccgcgcccggacagacagggctctcaccgggttcggattccgaactcagcttaaaaatgcatgctcagcaacccggttcggattccgaacacagtgagagtgccgggaataacagccgggttcggaatccgaacagttacgtacgtagtcttactaataatacagataaaacatacgtaaccggttcggtttgcctgccagatgacttcgcctcactgctgaaaccagcagaccgggacatggttaatcgccaactgcaggcgctgtcgcctgagcggtctgccctggtgctgtcgaatgttattcgtgcacagcgtgaaggcagcctgcaaaacccgcttggctggttgctgacggtgcttaaaaaggcccggcagggggagctttatcctgcagaaaacgtacgaatagtatctgatcacatgagcccgtcatcgcgccctgaactgcgcccttttaagccttcccgacctgatagccggcagacgtgcagtgaagagcgcgtgaaagaaatcgttcagagtcttcgaatgtttgttggagctcagagaaatgattag

SEQ ID NO: 207718 - DNA, 714 bp, Klebsiella oxytoca
atggccgaacagacaacccctcaaacaacgccccggcgatctggcggattagtatccacgctgactgtcgagctgcattcgcattatgcaatcaggctctgggaagggcgcaatcgatctgatgagaaatctaaggccgaaaaacgtcccaaaattctggggatgccggaagcgatttcgcgggcagggttcgccgggcgtgatgcagcggccggcaacccctatggtgatgcgttgctggtcaatcttgaagaggccattaagctggcgactgagaaggtggaagagcaagtcaaaaagatagaaaccattacagccgccattccggcaggtatcaccatatctgaagtgacatcttccgagccgctgaaccttgatgtattcagccgttccccccttggttatcgctgtgtctggctgttagtgcattacgaccagctggcgctgaaagccttccgggcattccattacggcctgatctcccgttcacagcgcgatgatttccttgaaaaagggagtaaagcgatacgtgttgtctacgggttgattcagaactaccggaccgtgccggtgacatacgaggatatccgccataaaacggcgcggggtctggctgccatagagcgtctgggtgaacccgatcctgccgttatgtcaggtaaaaaacgttcttcattctctccactttctgccgttacctcagaggacgattaa

SEQ ID NO: 207719 - DNA, 564 bp, Klebsiella oxytoca
ttgaaccggatgattactgcgggcgttatctgcgcccttctcagtggctgtgcaggctctgactttgccagcatcaacaaaaatatcagcgataccgctttcagtatcagtaaaaccctgcgtggcagtgattcggattctatggattccggcaacggtatgccggtactgacaaaagcatcaggatctggcggggaaagtgccagcaaacagttcagcgtgccggtagatatcgatacggccgccgcgcgattaaagcgccactacggctatgtgagtgcggatgaaattgaacgtattcgttcaagggatcgtaacagccgctggagtgccgctgccattgaggacgctcatccagtgtgggaatccgttccggggagctcctatcgtatgggcagcgatgtgggtgacaacgaccatatggatatcgagcttgaaaagaacggttccggtacgcgggtatatgtgacatacaaatcacccgtggcatcgcaccttaccggcagcgcgttcaacaacgttgtgtctcaggtccgccaggttgcttctggtcaggcacgctaa

SEQ ID NO: 207720 - DNA, 2067 bp, Klebsiella oxytoca
atgcagctttatctatgtgaaaaaccctctcaggccaaagatattgcccgcgtgctgggcgtcagccagcgcggccaggggtgtattaccggcggtaacattacggtcacgtgggcagttggccatctgctggaaacggccacgcccgaaacctatggcgagcagtttggtcgcccgtggcgcacagaggtgctgccgatcatcccggaccgctggcagatgaccgtcaagaaagacacttccgatcagtttggcgttatcaaaaaactgctgaaacaggccagtgaggtagtcatcgcaaccgatgccgatcgcgaaggtgaggtgatcgcgcgtgagctgatggattactgcaattacaccggtgccgtgcgccggctgtggctctccgcgctggatgaggccagcatcaaaaaagccctcagtgaaatgctgtcgggcgacaagaccgaaaaactgtatcaggcaggtattggccgctcgcgggcggactggcttatcgggatgaacctgacgcggctttatacccttaaggccggtgaagccgggttatcggaggtgttttccgtgggcagggtgcagacgcccacgctcgctatagtggttaaccgggatcttgaaattgccggcttcacgccaaagccctggtggaaagtcagagcgcagcttgaaaaagacggtatccgttttgaggctgaatgggttgctgcggagcaatactgtgatgatgaaaaacggtgcgtaaatcagcagattgcacaggccgttcagcagctctgcctgaaaaccgggaacggcagggtgatttccgttgagaaaaagcgggctaaaacgccggcaccactctgtttttccctcggcgatcttcaggaagcctgcaacaggaaatggggtttcggcgctaatgaggtcttgtctatagcccagtcgctgtatgaaacgcacaaagcgacgacctatccgcgaacagactgtggttatctgccagtatcgatgcgggaagaggtcagtgacgttctccaggctgtacagcattcagatccggctatcggcagcgagctttcccgacttgataccgcatttacctcgcgcgtctggaacgacaggaaaattaccgcgcaccacgccattattccgacgcgacagcccttcgacatagcaaagctgaacgctaaagagctcaaagtctacactcttatccgcctgcactatctggctcagtttatgccgctgcaggaatccgacgtgacggatgccaccttcaatatcggtaatcagctttttcgcacgcgcggccgcgtgatggttcatgccgggtggaaatcactgttcaggggggagctggcagaagaggaagagggtgataaggagtccgccgcgcagctgcccgtgctggaacagggcaatgtctgcagcgtcaccggtgcagacgtcaaagataatgtgacaaaagcgccgccgcaccacacggaaggaacgcttattgccgccatgaaaaacgccgccagcctggtcacggatccccagctcaggaagatactgcgtgataacgcagggctcggtacggaagcaacgcgcagcggcgtactggaaacgctgtttaaacggggcttcctggagaaaaaaggaaaattcatcattgccacgcagatggcgcgggaactgatcgctgccttgccagagacgctgaccagtccgggcatgacggccctctgggagcaggcgctggatgatattgcccagggaaaaagcgggctcagcgagtttatgcaaaagcaaagccagtggacccggcatctggtcgaaaaagggcgggacactgcctttaaggtcacggttccggtcggccctgtctgcccgctgtgtggcggagaaacccatcagcgtaagagtaaggaaggtaaattctggggctgtgtgaagtacccggactgtaagggaattgttggtgagacaaaccgtaaaacccgacggcaggctgcgggaaaaagccggggcactggtaaaggccgcaaaagcccggcttctgcgccggctactctcaatctgcagagccagaaaggttga

SEQ ID NO: 207721 - DNA, 483 bp, Klebsiella oxytoca
atgtctgtaaacaacacctctaatgccagtaacaccggtaaatctaaagactacttcaacctgaccatcaatggactgggctatctcagcaacgttcgccaggttaatgctcagtcaggcacctttatcagctgcgttattaacgcactgtcaggtccgagcgacagcccttcttatgtgcgttttgacgtcaccgttgccggcaaagaagccagcagcctcataaaccgctgccagaaagcggtggatgaggataagaaagtgctgattggctttgttctgagcaacccatcaacggacatttttcagctgaaaaatggtgagcacgcaggtgaaagtcgcgtcagtctgaaagcccgcttgattaaggtggactggctcaaaataggccaggacatggtttataaaactgaacgcgccgaacctcatcaggcacagaatactgcttcacagcagcaatcttacgctgataactcattctaa

SEQ ID NO: 207722 - DNA, 213 bp, Klebsiella oxytoca
atgaatattcaaacaggctttttagcccagaaatatctcaacgtggcgcttccgctggaagttatgcagtctggccgaggctattatattggtacagcagatctggaaagcggtgcaccggcaacccgagaatctaacgaatattttcgtatgaaaattgacgctgaaaatgcgcttaaagctaacttatggacgcagaaagagcatccgtaa

SEQ ID NO: 207723 - DNA, 243 bp, Klebsiella oxytoca
atgcctgccatactacggctgaacggttttcggttctttttctactccaacgaaggcaatccgcgcgaacctgctcacattcatgtgataaaggccggtacagaagcaaaattttggctggagccggttgtaaaactggcaagtaacgatggatttgactcccggacggtaaaagagctgatgacagtgataaggcaacaccaacccatgtttctggaggcctggaatgattatttcagctaa

SEQ ID NO: 207724 - DNA, 249 bp, Klebsiella oxytoca
atgattatttcagctaagaacgttcggttcgatcatcacactatgtgggtcgaactctccgacgagcggataatcggcgtaccactttcatggtttccccggcttcgcaacgcgtctgccgaacagctgaaagattacgaactgtctccccgtggtatccactgggacgcactggacgaagatatctcaatcgatggcctgttacaggggcgcggtgatgtaacgcacccgcctcatcaggtcgcctga

SEQ ID NO: 207725 - DNA, 648 bp, Klebsiella oxytoca
atgaaatttaacgccgtctttgccgctttaccgcttgcgctgctggcggggtgcgttcagcagccccagaagctgcaggagcgggcacctgctgaaccggttgccccggtcagcgtatcccgcaatatccaggcatccgctgatgatgtttatgcacggacgccggaagtggttcgctacgatcgctacctgctggtcagcacggatccgcaggccgtgcagcgcgaccccctctcacagattattgacgtccgcatcccctcgtcagtgcagccaaccgtggctgacgccatgcgctatgccctgaagcagtccggctactcgctttgtcagaccggtccggctaacggcgtgttgtaccgtcagccgctgccggccgtccagttccagctcggcccgatgcgccttcgcaccgcgctgcaggtactggcgggcccggcatgggagcttgaagttgatgacgtacagcgtgtggtctgtcacagcctgcgtgccggttatcagttgcccgtgacacagctgccgccgcgtcctgccagcgcctacgcaccggctgctggcactccatcttctgccagttcctctcaggtgatcgcccctcgtcccattcaggcccagcctgctcacggaggatggctgacaaaatga

SEQ ID NO: 207726 - DNA, 768 bp, Klebsiella oxytoca
atgaccacagaaacgtccttccctcacgaaaacgctgatgacgttgttccgtcatcaggcggcaggttcagcgccgtaaaacgccggctgccggctataggactgaccacgctttccattgccgcactgggtctcgcattcatttcgcttcgcgccgttgagtcgcaggaaaaccgtctcagctacgtcgagaaacagcaaaacgtggtttacacccaggcagtggctaaaaccgatcttgaacctctacaggcaaacatcaatacgcaggccggggcgataaaaaggcagcaggttcagcttgatgcggtccgtaaatcgctcgaagcctggtctgccagaggattatctgaagcagtcggtcagtttcgccagtcgatcggtgagctgagcgattcgcagactgcactgcagagccgtcaggctgcactggaacagtcagttactgcgctgcagcacccgcctcagaaagcgcagcaggccacagctgaacccaaagcggcaacgcctgtaaaaaagccggcacccgctaagccgcaccgggcagtcaaaaccgtggcccgcaaagcgccatttgtactgaccggcgttgaaaagcggggcacggagtcgtttgcggccatcgcgccgtcgggattcagctcgctggctgaagtccgcctgatcggcgaaggccagaccgttaatggctggacacttgttcacgccggatacgggcaggctcaatttcgcgtaaacggtcgcttaacgactatcaacgttcgctaa

SEQ ID NO: 207727 - DNA, 726 bp, Klebsiella oxytoca
atgaagctaaaaataatcaatcttgcagcgattatgctttgctgctctgcgcaggccagcgttcaggttcagaattccaggggcgaaccagtgggtgcgccggcgcagagcgtgcagcaaagcagcgtgcaggatctgaaacagcaagccggtcagtgggggctaagtcaggacgattatgagcgctatcagtcgctgatgaacggtccgcgcggcattcagtcaccgggtctggatccgttgtcaacgctgggtatcgaggcgcggagccaggcggagcgtcgtcagtatgctgagaaatgggtaaaggaagagtttgcgcgtacgcaaaaagagctggatttccagcgcgaagttaccgccgcatggaagcggctctatccggaaacgcttgcggtaaatatgggcaacgcagccggcattgcgcacgacaccggcgggcggctggcgctgttcgttaagtcagcgggctgcgggcagtgtgacgcccggctggcagcggtattagccgataacaggccggttgatatctaccttgtggacagccagggcgatgacgggaaacttcgcggctgggcaaaagaccatcacattccgctggacagggtgcgcagccgtcagatcacactgaatcacgacggcggtcgctggatgcggttcggtaacggcatcatgccggtcgttctgcagcagggggaagacggatggcaactcgccgcattctga

SEQ ID NO: 207728 - DNA, 630 bp, Klebsiella oxytoca
atggcaactcgccgcattctgaccggcgcggcgctgctgctgctttcattttccacgttcgccggtggcaaacagaccgttccggatgggtacgtgcgcgtggcgcaggctcacagcgtgccgcctgaatcgctctactccgtcagcctgcaggaatcatcgcgcaggctgccgcagggcgaacgcccgtggccgtggacgctcaacgtcgcgggtaagggctatcgctataaaacccgtcttgaagcctggcaggcgctgcaggtgttcatgaaaacgaactcactgaagcgcatcgatgtcggtattgcccaggttaatctcggctggaacggccagcattttacgtcaacctgggaggcgctggatccctacgtgaatctcaacgcggctgccgccatcctgcgcgagtgctgggaccggaaacccggaagctggctcgatgccgccggttgttatcaccatcccgcaggcggcgcacccgctgcccgctatcgcgctttcgttaaaagcaagctcgccatgctccagtcctcgccgcatctgccggcggctaccgcagttgaacagacagcgtccgcatcggtgccggataacggcctcgtctggataaatccacggagtcagtga

SEQ ID NO: 207729 - DNA, 507 bp, Klebsiella oxytoca
atgaatctgaaaaacctcatcgttaccgcatttatcgccttttcgcctgccgcgctggcggagctcaacgtcattgcagacctgggcggacagagcacgcaggctgttttcgaggccgtaaaccgccaggatacgcctcctgcgcctgctgcagctcctgaacagggggaagcggccatgctgcccgttattacgccagaactttcccccggaaaggtgcccccccgggcgctgcagctgccgggcatcggcgcgctgtttatcatgggtgatgacagctattcacggcagtggctgcagcagaacgcacaacagctttcggccagaaatgcagccggcctcgttgtgaacgttgaaagcatggcatcgctggaatccctgcgcggtctcgcgcccggtcttcagctggctccctcatcgggatctgaatttgcccgccgcctgcagctgacgcattaccccgtacttatcacagacagcggcctgtctcaggaggtagggcagtga

SEQ ID NO: 207730 - DNA, 570 bp, Klebsiella oxytoca
gtgatatcagctccttacatcgctgtactgttgatggcaaatccggtcctcctggccgtcctgctggccgtgattatctttctgctctggcattttcgccggcagtcggtcagcgagcggcggcaccgccggtatcgcgcaacggcagagcgcgtctttacccgccttcgccagctcagcggagacgggcagcgcatgagctatctgcgcaagattaatccctacgtatttgaggaattactgctgctggcatttgagcgtcagggctatgccgtacagcgcaatgcgtcgtacagcggggacggcggactggacggacgcgtacacataaacggcgagtgctggctgattcaggccaagcgctacagccgggcgatcgcgccggcgcacgtccaggattttgacgcgctgctgacgcgcatggggcagcgcggtctgtttattcataccggcaggaccggccagaaaagcagggctttcgggagcggttcacagcaactgatgattatcagcggacaacgccttctggctctgctggcaggtaaaccctttaaggagttctttctgtga

SEQ ID NO: 207731 - DNA, 2100 bp, Klebsiella oxytoca
gtgagtgataaatacgtaattgaagcccttctgcgcccggctgttgaactgaatacagcggtcgcagcgggcactgccgccatcgtctgcgtgacagcgccctgggcagtcgccctggcaccctccgtcagctacgtcaccgccggcggattcgccgtgctttctgccatacgcgcgcgtcagggaatacaggtcattcgctaccgccgtaatcttcgccgtttaccgcgctacgtaatgacgtcaaaacagatccccgtgagtaaacgccggctttttctgggccgtgggtttcgctggacccagaaacacactcagcgcctgcgcgatacgctgcgcccggaagtggcccactatcttaagccgtcgaagctgtatcagcttgcccgccagttagaggaagcgacagaaagcagtttgccggcgatcggcaagctgctcagtgcagattcgccagtcaatccggttcgcccgcttcccccggttggcggtaatccggccgtacacggcattgagccggatgaaactgacgtcacgctcgatttacgtgagcgggtcggccacacggttgtctacgggacaacccgcgtgggcaaaacgcgcctcgctgagctgttaatcactcaggatatacgtcgtggagacgtcaccatcgtatttgatccgaaaggcgatgcggacctgctgaaaagggtctgggcggaagcgaaccgggcggggcggggcgatgagctgaccgttttccacctgggctggcctgatatttccgcgcggtataacgccgtaggacgcttcgggcgcgtatcagaagtcgctacgcgcgttgccggccagctcagcggcgaaggtaacagcgcagcgtttcgcgagtttgcctggcggttcgtgaatatcgttgcccgggcgttggttgctttaggtgaacgcccggattacacccttattacccgctacgtgaacaacatcgccaacctgtatctgcgttacgccgaaaaaatcattactgagaaactgcccgaactgaacagccagatcgagaacaacgccaacgcgttcagtgatgatgacgtgccgcgcaacatgcaggggcagcctgaagctatccggatttgggcagttgaagtggcgctgagttcggacgcaggaaacgcgctgtatgacccgatacttgacggattgcgctctgccgtacgctatgaccgtacctactttgacaagattgtggcgtcactgctgccgctgctggaaaaactgactaccggtaaaacagcggagctgctgtctcccgattatctgaacatggaagatccgcgccctatttttgactgggagcaggttatccgtaaaaaaggcatcgtttacgtggggcttgatgcactcagcgacagcgaggttgccagtgccgtaggtaacagcatgtttgccgatctggtgagcgtggccgggcacatctacaagcacggtattaacggcggcctgccgggttcaaaagagggaaaagaccccattaacctgcactgcgatgaattcaacgaactgatgggcaacgagtttatcccgctcatcaataaaggcggcggtgcgggcatgcaggtgacggcctatacgcagacctcatctgatattgaagcccgcatcgggagtgcggccaaaacctctcaggttcagggtaacttcaacaacctgatcatgctgcgcgtgagagagaaccggacggcagagctgctgacctcacagctgccgcaggttgagatctacagtaaaacgctggtctcaggtcatcaggactcagctgacgtcaccgtcaatcacgactttacctccagcacccaggatcgcgtgggcaccattaaggtgccactgcttgagcctgccgacattgtcacgctgcctaaaggtcaggcttttgcgctgcttgagggcggccagctctggaaaattcgtatgccgctaccggcgggcgatgcaggtgacgtgcatatgcctgagaacatcgcgcgtcttgcagaagagatgcgccggaattaccacagcagtgaagggtggtgggacagccgcagttcagcagctgcgccagtgaagggagataataatggctga

SEQ ID NO: 207732 - DNA, 774 bp, Klebsiella oxytoca
atggctgaggcacgtcgtaccgcaccgcagcaatatccgcagcagcaccccgcgcaaccgcgtgagcacggcctgctctataacctggtctggggctggccgtggaaactcgttggcgtgatcctggcttcactgatggtgagccttgtcattgaatatgtcggtattgcgttcttctggcctgaaatgggtgccgcgcacagccaggcggtgatgaataccgagtttggctatctgtcttctgattttacccgcagcctgctgctttccgagccggctgcaacggtgacgcgctggataacggatgcctatcagtgggcgtttgtggacagtgggatcatcggctggatacaggaaaaatatcaggccgagatgaacagcggcaatgaggtatcgcgcaatcttaagggtgccagccgctggatggggaattatctgcagcagtacatgctggcaacggtatatgtctctatcgtgacgctgatccgcgtcaccatcattgccctttctgtaccgctgttcgtactggttatatgcgttgccgtggttgaagggcttggccgacgtgatttgcgccggtttggtgccggttatgagtcatcttttctgtaccaccgcgcgaaaagattgatcaagccagctgtttatctgccggtgatggcctacctctcatggccttctgcggtctatccaaacctgctactgctacccgcagcattaatgctggggcttaccattacggttacaactgcatcgttcaaaaagtatctttaa

SEQ ID NO: 207733 - DNA, 594 bp, Klebsiella oxytoca
atgtctgttaaaaaaaatggcggtgattctgatatagcaaaaagacgcaaagagcaggttctggaggctgctgttgagtgttttaagcttcagggattccacaaaacgagcatgtctcagatctcagccgcagcaggaatgagctccggtcatatctatcattacttcggcagcaaagaggggatcgttgaggcaatcgtcgccagagataggagtcagattgaaacctatatttctaacgtgaaatcctcgatgaaaaccaaaaacgctgttgaggcgctcgttgatgccacgcttgcggatgagcagcgctttttagacagaggaaccgcggcgctgaaaatggaaatttcagcagaggtttcacgcaatgcgtctatagcgcacttgatccaggaatacgataaagacgtctttcaggatttctataatattctgggcggtgcctctgaagacgtcatttcaaaatgtgaaatcatcacctccttactggaagggatggctgtgcgttcggtacgtaatcccgcattcggagaggctctcgacagggatatgttacgcaaagttatcactttcgtactcagcgaaacctga

SEQ ID NO: 207734 - DNA, 1182 bp, Klebsiella oxytoca
atgtattattttcatgatattaaaaaaagaaaacagctgggcaacttcattaacctggcgttaatgatcggcgctacgagcctcctcagcgcgtgtgatgacgcaccggcttccacgcctgctgcagaaccacccgtggtaggcgtgtataaagtcgagcccagcaatgtccgcatgctgacggaattacccggacgcaccagcgcctatctgatagcggaagtcagaccgcaggtagggggcatcttattaaagagggatttcaccgagggtacggacgtaaaagaaggccagaccttataccatattgacccagcgccttataaagcgacgcttgccagtgctgatgcaagtctggaatcggctaagttactgttctcacggtacagcaaactcgcgtccttaaatgtcgtcagccagcagaatctggatgacgcgaagtcccagtatctgcaggcaaaggccaacgccgacaatgccagaattaatcttaactacaccgaaattaaatccccgatttcgggaagaattgggcgttccaatgtcacccagggagcgctcgtcaccgccgggcagacaaatgaattagccacggtgcagcagctggatccgatctacgtggatatttcacagccggcatcggccctggttcagatacgtgaggatctggaaagcggtcgcctcaaaagtgatgacgaaggccgggcaaaaatcagcctggaatttgacaacggcacaaagtacaaacagaccggcactcttcagttctccgaagtcagcgtcaatgaaagcaccggttcggtaaccctgcgggcagttttccctaatcctgacggcgttttgctgcccggtatgtttgtgcgcgcgcagctgcagcaggggatccgtgaaaacgccattcttgtgccacagagaggggtgacgcgggacactcagggtaaagcggtcgcgttagtggtggatgctgacaacgttgtggaacagaagaaccttacaacggatcagagcattgacgggaactggttaatcagtgccggacttaagcccggcgagcaggtcattgtcgatggtttacagaatgtgactcctggaatgattgttaagcctgttcaggctgcaaaaaattcatccgaaggcagtttatctaagacgtcagatcacaaagataatacggatatttaa

SEQ ID NO: 207735 - DNA, 3108 bp, Klebsiella oxytoca
atgtccagattttttatagatcggcctatatttgcatgggtcattgccatcatcgtcatgatcgcaggtgcgcttgcaattttaaagctgcccgttaatcagtatcccgatgttgcacctccggcaataggcattacggcttcctatccgggcgcctcggcgcagaccgttcaggatacggtgactcaggtcgttgaacagcaactgaacggccttgatggcctgcgatacattcgctctgagagcaattcagacggcagcgtaaatattgttgtgacctttgagcagggggttgacccgaataccgcacaggttcaggttcagaacaaactgcagcttgccacaccaatgcttcctcagaccgtccagcagctgggcattcgcgtctataagtaccagatcaactttatgttggtggccacgctgatttcagaagatggccgactggataacaacgcactgggcgatttgattgtatcgcagctgcaggatcccctcagccgtacgtcaggcgttggcgatttttatgtcctgggcgctcagaacgcgatgcgtgtctggctggacccgattaagttaaacaattacaagttaatgcccagtgacgtgatggccgccatacaggcacaaaacgttcaggtctcctccggtcagttaggcggacggccgtcagcagatacctcaagattaaacgcaacggtaatcggcaaaacactcttcaccagagcctctcagttccaggacatactgctcaaggtaaatccggatggctcacgcgtcttattaaaagacgtcggaaacgtcatgctggggtcggataactatgacttcaatgccaagctgaacggtcaccccagtgcaggtattgctctgcgtttagccaccggcgcgaacaccatcgacgccgtcagcgccgtgcgttcaaccctggatcagttagctaaaacgctgccgccgggcgttaaagtggtgtatccgtacgataccgctccggtggtaaaagagtctattaaaggcgtcgtgcatacattagttgaagcgatcgtcctggttttcctgatcatgttcctgttcctgcagaactggcgcgccacgcttatcccaacgctggccgtgcccgtcgttctgctgggcaccttcggcatcatgtcagccttcggcttcactattaacatactgaccatgtttggtctggtgctggcaattggtctgctggttgatgacgccatcgtggtcgtggaaaacgtcgagcgaattttatctgaagaggacatctcggcggttgaagcgacccgtaaatctatggatcagatctccggtgcgttagtaggcatcgggttggtgctgtccgccgtatttataccgatggcgtttttcggcggttccacgggcgtaatttatcgtcagttctcgttaactatcgtttctgcaatggcgctatccgtactcaccgcgctgatcttcacgcctgcactctgtgcaacgctgctgaagccggtcggtaaggatcatcatgataaaaacggattttttggctggttcaaccgcgtgttcgaaaaaaatgcgcgccggtacgaaaatggcgtgtcccgggtaattacaggcaaacgccggtatttaatgctgtttttattcattgtggtggctttagcagtgctgttccccagactgccgacctcgtttttacccgatgaggaccagggaacgatggttgttcaggcagagttacctgccaacgccactatggatcagaccgatgccgtgctggataaggtgcagaaatatttcgccgaacaggagaaagacaacgttcaggcggtattcgccgtcagtgggttcagctttgcggggcgcggccagaactcagcgcttgcctttgtgcagctcaagccctgggatgagcgcaaggataccgtatttgatcttcagcgccgggctatggactacttcggcacaataaaggaagccagggtcctggcgtttgcaccgccggcgatcatggagcttggcaacgccacggggttcgatgttttcctgcaggacttcagcggacacagccatgccgagctgatgaaggctaaggaaaaaatcctctcagaagccgctaaaaatccggcactcagtatggtgcgtgctaacggtaaaaacgatgagccgcagtacaaaatcgaaattgatgatgaaaaagcgagcacgctcggtgtcaacctggatgacatcaatacaaccatgtcggccgcgtggggctcttcttttgtcaataacttcctggatcgcggacgtatcaagcgcgtctacattcagggtcagcctcagtccaggatcacggagaaggatttcagccagtggtacgtgagaaattcatccggtgaaatggtttcatttgcctccttcgcttcaggaaagtgggaaataggttcgcctaaactggagcgttacaacggtgtgcctgctgttgagcttctgggccagccttcaccgggttacagctcaggcgatgccatggctgcaatggaagacattgcgaaagatttgccatccggcatgaagctctcctggacgggcctctcctatgaggagagatcctcgggttcacaggctccggccctgtatgcgctgtcaatcatcgccgttttcctgtgccttgcagcgctctatgaaagctggtccgtaccattctcggtaatactggtcattccgctgggggttattggtaccgtggttgccacgatgatgcgcggcctggaaaacgatgttttcttccagattggcctgttgacgacggtgggactttccgccaaaaacgcaattctgatcgttgaatttgccaaggagctgtacgagaaagaggggagaaccttatctcaggcggccattgaggcagcacgtctccgactgcgtccgattattatgacgtctctggcatttacaatgggggtcataccgctgttaatttccagcggcgcaagctcaggaagtaaacatgccattggtacgggcgtcgtaggcggcatggtgacggcgacgttcctggccatattcttcatccctcttttttacgttttagtgaatagccttaaaaagcgtaaaaataatactgacacataa

SEQ ID NO: 207736 - DNA, 846 bp, Klebsiella oxytoca
atgctgtcagactattcaaacattaccgtattttttgatgcttcccctgaaggattgagcgtactcgccagatcaggagaattagcatgtgtacagaattctcatctgataggcgtgacgtctatgcgccatgaatctggcgtcccggaagagtccttttcaagaggggatgccatcattgaggtaataaaaaaacatcagctcgcaacagccagtaaattactggagctgcatcatggcatacaggatatttccgataagctaggcgtgcaggctgaacttcgcgttataccgtcgacggaagataataaaaatgcaattcagcatgctttatacagcgatctggtcatttttaattatccgagcatgagtggattaccggagggaatgacgatcaactcgttcatttcctactccggcctgccgataattgtcgttcctgatagctggctgggagaggggatcggaaaaagagtcaccattgcgtggaacggcagccggcaggcgtggcgggccgtatctgactctcttggccttttaatcagtgcggaagaggttcagctactgattgtggatgcacaccacagtcagggccttcacggtgaagaccccggcgctgacatggcggcttaccttgcacgccatggcgtcagagtcgacctcgtcaacgtcgagtccgacagaagagaggttgctgacgtcattatagagcacacgaccgctcacgcatccgacctgttggtaatcggtgcctggagccggccacgcctgtccgaactgatcctgggcggtaccactaacagcctccttaaagatgtgcggctgcccctgtttatatcccgctga

SEQ ID NO: 207737 - DNA, 648 bp, Klebsiella oxytoca
ttggtcagaaaaaccaaggaagaagcttccatcacaaaagaacgcataataaaagcggcggaggaatgcttttgcgaacacggcgtttatctgagttctttcgatatggtggcgaaaaaagcaaagtgcacccggggagctatttactggcatttccgggataaaaacgagctgctttaccacgtcactcagagcttcagatggcctttaatggccgaactgaaagggctgtcgtcaggcgatgagcatatatttaacgcgcttgtttccatgttcaggcgctgcattaatgatttatctacggaaagtcaggtgcagcactacctgaaattaatgatttatcgctgtgacgaggccgaaacttacaagccattgcagctaagcctctcaaaattcatgtgtgattttgagaagttagtaaaagatgcgatgtgcttatccataagtaaaggcgaaatagatggggaagacaagtccgtaatcataacaaatatccttctttactctttttatggtgccgtcagaaaattttttatcacggggaaatcccagaagccattaacagagtttattgaaatccttgaccacattctgggggagttcgtcattaacaataagaattatgttttagatgagagctctgactaa

SEQ ID NO: 207738 - DNA, 858 bp, Klebsiella oxytoca
gtgagaaaattcacgctagaattattacactggattgaacaaaatctgggaagctccctgacgatacagaagatctatcgtaagtccggatacagcaaatggcacatccagaggctgttccgggaagagactggcatgccattagccacctatattcgcaacagaagactcgccagggcggctcaggtactgaagttaacgaacatgcctattattgagattgcagaagcgctgggatttggcacacagcaggcatttacacgggtcttctcaaggcatttcagaacgccacccagagtctaccgggatagccgtatgtggaactttaccgggatcatccccagttcgacaatggtaaggcatcccctgcctccacctgattatgtgagtctggatatcagcctcagccatcaccacagtttcactaatgatgttgattttcatagcatagaatgtatgagcgataagattacccgcttgtctaatcttgaaatgacaatgctcgaacaggctgaaaccatttactcggttgtccattgcgaacctgtaggcagattcggggatgccaggcttaatatgttactgtgcgacacgactcattccgacgaattagaaagtatcaggatggcaggcagttacctgaaatttaacctgcttgggagttacgatgaattcaggcacatgatttcaacaatctatcattttgaactgccgttaagagaagaagtccggagtgaaggcccggacctgctggaaattaaaagcataaaaacttctaatggttatagttatttttcagggtgctactacattccggtcgcatcaaagaatagctctccggactctgctgttcattaa

SEQ ID NO: 207739 - DNA, 171 bp, Klebsiella oxytoca
atgatgcaaaaaatgaaagacaacagaaaaaagaaactgaataagaagaccaattttacggagttcgacatgattcgctttgtttcgcttctcacccgggagtgtttattcctgctattcgcatcggtttttatcctgctggcaatgtcagccatttacgggttttgttga

SEQ ID NO: 207740 - DNA, 522 bp, Klebsiella oxytoca
atgatagcgcccggacaacatggcaagaatctgcaggacattcctgagcagtgttttgattacggatttgatcgggaagatcgctggccggggctggttctggcctctacggtaactgtgccgaacggtaacaccgatggctggcgactggcgacgcagagttgcggtggattcagctgtgacgaatttcaggccgccgttctgcccctgccagttcgcccggagatgctacggtttcttgaatccgtagcggaggaggaattttcgccggcgcctctggattacttcaatatgatggatgccggcgatgccgcagcagttaaaaaagggtacctgtcatgtcttcaccgcgcggggctttcctgcagcgagcataatctgtcacttctgacacaggcgctttatccggtggatgccacagcggaaaacatgaaggtcctggccgggaattgtactgaactggccgcaatgaaggttcccgggggactgacgatatttatcgtgggtcagaactgtgattaa

SEQ ID NO: 207741 - DNA, 204 bp, Klebsiella oxytoca; identical to SEQ ID NO: 104963

SEQ ID NO: 207742 - DNA, 684 bp, Klebsiella oxytoca
atgcccgatatgccaacccttgccggtacgttcaccagggctggctaccagacttcggcaaccggtaagctgcatgtctatcccacccgagaccggatcggctttgaagaaacgtttattgccgaagagggacggagtcatttaggcggggtagatgattacgaaatctttctggcagaaagcggccaggccggtcagcagttcgcgcacggaatgagtaataacgaatacagctggcgcacatggcatctggatgaaaagctgcatgttacaaattggatcactcaaacggcagcgaagaatattcgtcgcagagacccaacccgtcctgcattctggtacgtatcttacacccagccacatcctcccgttgtgccgctcgcgtcatattttgaacgctatcaattacgacgtatggataaaccccgtcacagcgaatggtccggggcagaagacctgccatacgcactggcgattaatcagcatctcaagccatcgcttccacctgagcagtacgatgatatgcgtcgggctttctacgcccaatgcacccatattgaccatcaaatccgcttgttgatcggttcgctacgggaagaagggatcctggacgataccattattgtctttaccagcgatcatggggatatgcttggcgatcatggtatgtacgccaaactatga

SEQ ID NO: 207743 - DNA, 1332 bp, Klebsiella oxytoca
atgcgctcaaatcagttcctgctcaataattcaatcagttctcttgcgcaatggcttggccttgctttcctgattgccgtgctgaccggcacagcttctgcattctttctgttttcccttgactgggctactacgacccggctcagccaccactggcttatctggttgcttccagttgcaggatttgcagtgggatgggtttatctgcactacggcagcgctgtagagggcggaaataacctggtgctcgatgaaattcatgatccgcaaaaaattatcagtctgcgcatggccccactggtctttatcggcacggttgtttctcacctctttggagcctctgtcgggcgagaaggtaccgcagtacagatgggggcatccattgcggatcagtttactcgcctgtttggcctgacgccggatacccgacgcattgtcctgatggccggtatcagcgccggtttctcatcagtatttggcacccctctcgcgggcgccatttttgggcttgaggttctggccgtagggcggatgaattacaacgcattaataccgtgtattttcgctgccattgtggccgatcaaactgggttattatggggagtccatcatacccattacgccgtctcgtttattcctcatatgtctgcctgggcactgattgctgtcattatttccggtgggctctttggtctgacggcaagggcttttgccagtgcaacacatgccatcggcagtttcatgaagaaaactatccattatgcaccgcttagaccgttcattggcgggctggtagtggctgtggcggtcttttgtctgggtgccgatcgctatatcggtctgggtattcccgttatcgtggacgcttttcatcagcatctggcgccatgggatttcctgggcaaactggtatttaccgtcacatctctgggcgcaggttttaaaggcggggaagtcacaccactcttctacattggggcgacactgggtaacgcgctggctcctctgctgcatttaccggtcagttttctggccgggattggctttgtggccgtctttgccggagctgcgaacacccctgtggcttcaacactgatggcaattgagttatttggctctgaaatgggcgtttatgctgcactggcttgcgctgttgcctggctgatatcgggttataccggcatttatcgttcccagcgcgtagcctgcctgaaacatggcttcgtgccggagaacattaaacttgctgatgccccagcctggatggcaacccatgcgggttccaggaagcagaaaagcagcgaaaccagtgcggtagaggtgagtgagtaa

SEQ ID NO: 207744 - DNA, 348 bp, Klebsiella oxytoca
atgatggatacgctatcgacgctacgaatatatattccgtcaggcacccgggtaaaagcatcgggatttgtgaaaaaactaacggctcccccgttgagccattatctgcttcgtcaggcccgtgcagagggattagctcaggctatcattcacaacgtaagcgtaggttatcttgccgggatgaaaataagctattcccaccaggaaattaaggctggtgctcacccagaatgtcttgaactgattgggcatgttgctgaattaaaaaaattcatcaacgattatgaagaacatctcgaaggattacgctgcatcatctcaatgtctgaagaatacaccatcacttag

SEQ ID NO: 207745 - DNA, 618 bp, Klebsiella oxytoca
atgtcgaccgattttaaaacctggctcggcatcatcatggcgttttcaacttacggctatagcagcgaaaccatacgcctgccgtttaccgagttcgccaagatgtgcggcattaaatccgcggatcttaacgcccgttcgcgtaagcgcctgcacgactccctcttcagtatttcaagcgtgacgcttgccttcagcagcaaggatggcaagaaatccatgttctcccacctggtgcagcgcgcggtgctgaacatgaacacggatacggtagagataacggcggacagcaacctgtgggagctgtaccgctacgatcacaaggtgctgctgggccttaaggcgctctctgagctatcccgtaaggaagccgcacagtccctgtatatctactttgaaagtatgccctccggcacgctctatatctccatgaagcgcctcagagaacgcttggcgatgggatcgccggtaaagctccagaactcgataatccgtcgggccatggccgatctgcataagattggctatatcgacttcaccgagctcaagaagggccgcgagatccagtttgtcattaacagccgttcccccaaactgcaggcgttacccggtcactga

SEQ ID NO: 207746 - DNA, 1629 bp, Klebsiella oxytoca
atgaatcacattcagaatattaaaaattatctgcaaactgtcggtattagttctttccgggagattatatataaccctgattacgaagagctttatgttgaagaaatgcgccgggggcttattggagctgagcaagcatttatgacagaaagcggagcggtagccgttcatactggtgaattcaccgggcgttcgcccaaagataaatacttcgtttatgaccaaacaacagcgaatactgtttggtggaacgatggcgacaagaataaaaatgacaataagccaatcacgcctgcagtatggaaccaccttaaacagcttgcctgtgatcatttaggaggagcccgcctttttgttattgatgcatggtgtggtgctgatccccattcgcgtatcggtgtgcgctttgtgatggagattgcctggcaggcgcacttcgtgaagaacatgtttattccgctgagccctgaagagatggaaggctttgatcctgattttctggttatcaatgcttcccgctgcgttaaccctgactggcagcaacaggggctgaattccgaaaacttcgtggctttcaaccttacagaaaaaatacaactaatcggcgggacctggtacggcggagaaatgaaaaaagggatgttctgcgttatgaactacctgcttccccggcgcggaattgcgtctatgcactgctcagcaaacatgggagaaaacgaggatgtggccttattctttggcttgtcaggcacgggcaaaaccaccttatccaccgaccctaaacgccggctgatcggagatgacgaacatgggtgggatgacacaggtgtattcaactttgaaggcggctgttatgccaaaaccatcaacctgagtgctaaaaacgaacccgacatttatcgcgcaatccgacgcgatgcattgctggaaaatgtggtcgtcagttcggggggaattattgatttttgtgatccttcactgacggaaaatacccgggtatcctaccctatcagccacattgaaaatattgtctcacccccatcccgcggggggcacgccaggaaaatcattttcctctccgcagatgcttttggcgtactgccgccagtgagtcgacttacggaaaagcagatgcagtaccatttcctgtcgggcttcacctcaaagctggccgggactgaacaagggattacccaggcccaacccacgttctcagcctgctttggtgctgcgttcctgacactgcaccctacacagtatgccgacatactcctgcgcaaagcacgtgaatctggagctgagacctggctggtaaataccggctggaatggcaagggagaacgtaacagtctgcaagagacacggcggattattgacgcgatactcaacgatgaacttgtgggtacaaggttcaatattctgcccgtttttgattttgccgtaccacaaaaaatttcgggtgttgcccctgaaaggctggatcctcgccatgcctggggtagtgaagaggcgtggttggcgaaagctcatgagctagcactacttttcaacagctattttaaacgttttactgatacacaggaaggaagagacatagagagagccggcccctcccttagtcagttataa

SEQ ID NO: 207747 - DNA, 1272 bp, Klebsiella oxytoca
atgactaacctgtcattcacacaggatgaaaacggtgcatggaccacgtatctgcagcagattgaccgtgttaccccttatctgggacaccttgcacgatatgtcgatacgttaaaaagacctaaacgttctcttatcgttgacgtaccggtcgtcatggatgacggatcaattcgtcattttgaaggctaccgtgttcagcacaacctttctcgcggtccgggtaaaggcgggatccgctatcatcccgacgttgacctgaacgaggtcatggcactgtcagcctggatgacaattaagtctgccgccctgaatcttccgtttggcggggcaaaaggtggcgtgcgtgtcgatcctaatacgctgtcagctggtgagctggaaaggctgacccgacgctataccagtgaaattagtccagtgatagggccccagaaagatatcccggcaccagatgtgggcacaaacccacgcgttatgggctggataatggacaccttctcaatgacggagggatatacagttactggtgttgtgaccgggaaacccgtgcatctgggcggatctcttggccgagtcagagcgacagggcgcggcgtgtttgtcaccggtcgtgaagccgctgagcgtattggtctccagattaaaggagctcgggttgcgatccaggggttcggcaatgtcggcagtgaagccgggtatcttttcgaagaggctggcagcagggtcgtcagcattcaggaccataccggcaccatttacaacagcgacggtattgacctctctgtgttgcgtgaatacctgactaaggcgcgcggcgtagaaggttttccgggagccctgccgatcagcaacgatgatttctgggacgttgaagccgatatccttattcctgcggctcttgaagggcaaatcacgccagaagtggctcagcgcctgaaatgtcgccttgtgctcgaaggcgctaacggccctacctacctggctgcggacgatgtgctgacttcaaaaggggttacgctggtcccggatgtgttgtgcaatgccggtggtgtaacggtgagttactttgaatgggttcaggacattgcgagcttcttctggagtgaagatgaaattaactcccggcttgatcgtatcatgacaaacgcgtttgacgatatctggattaaagcagaagagaattcatgttcactccgaacggctgcttatattgttgcctgtgaaagaattttaatggcgagaaaagaacgcggtatctatcccggataa

SEQ ID NO: 207748 - DNA, 1296 bp, Klebsiella oxytoca
gtggggtcttccaacgcgatcgcaactgctggccctgccgtgatcctttcctacctcttagccgccgcaattgtcgtgctggtcatgcaaatgcttggcgaaatggctacggctcgtccggacacaggttcattttcctcatatgcagaccaggccattggccgctgggctggattcaccatcggctggctctactggtggttttatctgcttgtagttgccattgaggccatcgttgcaggaaatatcctctccgcctggatcccccttcccccctggacttgtgcactggccattactttggttttgatggtaactaactgcctgaatgtgaaaaattttggagagcttgagtactggctcgccttcattaaggtcgcgagtattgtgctgttcatcgtaattggcctggtggctattatgggatgggttccgggatcttcagtcagcggtatcagtaatctatggtcaaatggcggatttgcccccaatggctgggttgcggtaatcagcgggctgctcatcgccatgttcagtttccagggcagtgagattgtcaccattgccgccgccgaatctgctgaaccgagtaaaaacatccgcaaagcaatacgcgcagtggtatggcgtttggggcttttctacatcggctcgatgttcgtggttgtatgcctgattccctggaatgccccggggcttaaggtgggttcttaccaggcagtcctggcagcgatgaacattcccggtgccgcaacaattatgcagttcattgttcttgtcgcggtgaccagctgccttaactccgccatttacacatcaagccgcatgtcttattcgctggcaagacgtggagatgcaccggcttcatggggaagaactaccgctcagggcgtaccgctcaaatcaattgtctcaacgacggtcgttgctgtagcagtgctgttactcaactatcttgccccaaaaagcttcttcgattatttgctttcaacgagtggtgcaattgctttgttgatgtatctggtcatcgccattacgcaaatttgcatgcgcaaaaaactcgttgccgaaggagtgaagcttgaggtgaagatgtggcttttcccgtggctgacctacttcaccattatcctcatcggcgtagtgatgatagtgatgatcattttcccgtcctatcgctgggaactaatttcaaccctcatcattacggcagttctgactatcgcgggaattgcacttcagaaatctcaacctgagctttcagcaaaacgtaatgccggaataaaaattgaatag

SEQ ID NO: 207749 - DNA, 495 bp, Klebsiella oxytoca
atgactatcacattacaggcagtaaacgagctcatcgcctccctggagatcgcaggcgagctgtcgatcagagagcagaagttcctgaagctggcgaaagagtttcgcatttgcagcgcttcactggatgccgccataaaaaccgggaatgtgctggcagaccaaaatgctcaactggctgcggagaatgcggcgctgaaggacatcaacgcatggtgcaaaacggatgcattcaaaaacatgtaccgggagtttaaaacagcagaggcgattgggtgctctgatgtggattgcatgcatgatgcaatgcttgtcgcaattatgcatgcgcctgccacccccgccaccgatcgcatcgtagccgggattaaggctgatgccattgatgaagccgcggtagagctcgaccgggtcgatactgtggcaagtaccagagtaatcgggttcaaactccgtgagttttcccagcagctgcgcgagggggccgacaaatga

SEQ ID NO: 207750 - DNA, 399 bp, Klebsiella oxytoca
atgacaactgatatcaccgaactggcgcagaggttgaagcttgaagtacatcgtgcggtaagcgatttcaatcctaatatgaatattaaaaccagagacctaaaggagctggtagaggcgctggagaaggcgcagcagcgcatcgtcgaactggatagaaaaaactgcgagcttgattcgcttactcagcgctgggctgttgagcgtgctgaaaatgcagaccgcatcgccgagctggagtcccgcatcgtcaccgtgaagctgaccgatatcaacgagtacctggcagaggttcacgataaaacgctaaatcgggccttccggctactggctgaaggtgtgcgttctggtgatgtcgccgctatgcgcgccgctggcatcaaggtggaggctgggtga

SEQ ID NO: 207751 - DNA, 390 bp, Klebsiella oxytoca
atgactatcacactacaggcagtaaacgagctcatcgcctccctggagagcgcaggcgagctgtcgatcaaagagacaaaggttatggcgctggctaaagcgtaccagcagctggcggcggagaatatggcgctgaagaacgccattacagaccatagtcattcggttcacttctgcgaggtttgcggaaaggatgatccgtgcagcactgacgatgtttgttatgcgctgaaaaatatccccgccaccgatcgcatcgtagccgaagccgaggcgcgcggagttgagaaggccatcgcccacctggagaagaagttcagcaatatcggcgtgcagatcatgaatttgcagtggctggcagactcgctgcgcgagggatccgacaaatga

SEQ ID NO: 207752 - DNA, 561 bp, Klebsiella oxytoca
ttgaaatcagaaatcgaactaaaaaaaaccagtgattctccttttgagatcccggagaagatcttagccatttggggacgaagtatcctagtgtcgggttggacgtctgtgcctaacgaactgctacggaaccagtcaaagcttggcctcagcaatacagagcttgttttagtgattcatctaatttcatttttacataatgccgatgctcgagtttttccttcaatcaaacatttatcagaacggatgagccaagacagaagaaccatacagagaacactcggcaaactcgtcgagcaagatttattaagagtaaaagtacgctctacaggcaaacaagataagggcttgaccaacgtttatgacctaacaccgctaatgcttaagcttatcaatctgcaacttccctccctcaaaataccaaccgaacaacacacgtgccctttatgtggaaaaactgcgattacgcgcgaagaaattgagaagcagtttggattcagaatggataaagggaaagaacgaactcagagctggtgccgaagttgccgtggtaagaaataa

SEQ ID NO: 207753 - DNA, 189 bp, Klebsiella oxytoca; identical to SEQ ID NO: 162265

SEQ ID NO: 207754 - DNA, 453 bp, Klebsiella oxytoca
atgacaacaaaatttaataagtttgaaattcattcagctttccagtctggcaagctgaatgaaccatttttcgtcgacttacctcatttgaaaccagagcaccaagttgctctcacaaccttcttgggtaaaatcactcgagaggaacctctagtcggcaaaaacaaaccttcttggctgaacgacaaccatcaaaaaattccaggtactgatgcctatgaggaaggaaactattggcattatcactgtgggccttacagtgattcagttaaggttcggtctatgacctacaacttgggttttaacgctcaaggcctaacttctaaagaagtgattcattatcaaaagctagaagatggcactgtgctagttgtagggttttctccgatccacgaaccttttcctcgctctgatgaaccgcatcacaatccgttatttacttctgaagagtaa

SEQ ID NO: 207755 - DNA, 498 bp, Klebsiella oxytoca
atgaagaagcagattcttgcactcgctttgctatcactgccactgattggcatggcaaaggactctggttatggcaataccgaatggggtatgaccccaaatcaggtcgttgcagcccagaaaggaaaagctcatttaatcccccctcaaaagtataaagaccaatggggaaaagtgagcattgaagacgtgaatataggtagtggaatatatacagttacgtttatttttgacgcatcagataaattagtccaaaccaacgtcgccagcaaagaaaagaaaaatgagggaatagcgaacgaccaatttaacgcattaaatcaattacttacacagaagtatggcaaaccacagtttgtaagtgatgaaaaagcaacatggaaaactgatgctacaacaattgagctaaataagatgatcatctccggaattatggctcaaacactagttcgctacattcctaataagaccgtgatttctgacacgtctaacctgtaa

SEQ ID NO: 207756 - DNA, 588 bp, Klebsiella oxytoca
atgataaggaagattttttttgcttctgcgatcgtagtagcgatctctggctgtacagcaatggataaattggcgggaatgggtgttgtttctcagcaaacatcaacctttgataactcgactgtcatagaggtatctccaaattcgctatacgaccctaacagcacttggggaacaccacttcagttgggcgcgatatggtctagtgcctatccagaagaggctggactaatcctttcctacaactcgaatgtatctagcggaaatgccgcatacttaggtttgacggggattgatataaatgttgatggtaaaatatccagctataaagcacagcaacaaactaatctaagcagcagctcatataactccgtatccaagacgatctatacctctagcaagaatactatcgttatcccatataaattgctggagagcatggtatcagctaaaaactgccgcattcgcatacacacaagccaaggaaatcaagacatcgacttctcagcacaaagtatccccggaggtaaagcgacagcgatcgtttccattaaagagttcctggccaaagtcgaacgttttaaataa

SEQ ID NO: 207757 - DNA, 1755 bp, Klebsiella oxytoca
atgaatagaaaattgaagtgcttcatatcattagcgctctttactggctctctcatttttcctgtatccgtattatccgcaaataagcacttcccggcgacaccagtttcccccaaaaactatgaagatttggcgggaataaatccagtcactgattgctccgcgctacaacaaactgatttaacctctattgccggggagggaagtcaggttctgaaagcgactctggatgaaaaccgtaaagtctgcattgttacagggcgtctggctcctcagattggctttgaggttcgtttaccaacagagaattggcgtcagcgttctcttcagattggctgcggtggtttgtgtggacgaatatcagatgaaatcggtgctgctgacggatgcctccatataacagatggttcttttgttacttcagcaactgacatgggacatactgtagccgatggttcttttggcaaagattcgcggttgcgaacagattttgcttaccgcagtgtccatcttactgctcaggcaaccagggctttgatcacggcattttacggtcaaaacgcaagatattcctactttaccgggtgctctgatggcggacgggaagcattaatggcagcgcaacgatatcctgatgattttgatggcatcattgcaggagctgcggcgatgaacttccagacccaaaatggtgtataccatccctggctggcccagattaatactgataatgacggcaaccacattctgcttgcggataaattaacgctgattcataaggcggtagtgtctcagtgtgattctcttgatggtgacaaagatggcctgatcagtaatcctctttcctgtagccctgatctgcagaatcttttatgtccgtccgcgcaatctgataccagccagtgtctcacagctcaggagctggacgtgttgaataaaatttatcaggggccaaaagaccctgaaagtggtttatctttgcttgccggtgggccattgcctgggtctgaattagcatggaaaggtatttttatacctgaaagtaaaaaaggccctctgttcagtgcaaaaaacggacaggatgctaatgatgtactgtttaaaaaagaagatacgccagaggaatttgatttacgcagaataaaatttgatgcatcatattttgacaaattgagtaagttacatcgtttttatgattcaacgaatcctgaccttcacgcattctaccaacgtggaggaaaattaattttgtggcatggtctggcagaccagcatatcagccctttgaacacgatcaattatcatcttgctgttcagaaaactatgggtaaaacagtaacaagccaatttgagcgactgtatttgctgccaggagtatatcattgtggtggtggtgaagggccggacagcattgatttactcagccctgtgatggcatgggtggaaaaaaatattccgcctcatgaaatattgactgtacagcgtaataataacgaagctgggacattcggtcagccaacgtcattgatagttggcaataaatcacaatcctcagaacatgagggtaaagaatcatccgttgtgcaagttcgccccgtttacccatatccggaagtcgcagtatataatggacatggagacagaaatatccctgaaaattatcatcctgttatttttgataaaatggataacttaacccaatggttgggagataaattcttttctccctatgagtttttaaattcctccgactga

SEQ ID NO: 207758 - DNA, 414 bp, Klebsiella oxytoca
atggggttagctaacgctctgtactggttgatgatatttattatggttgcagacacaatcgattatggcgatatgaagatgggacttcgggcagaggctgtgtcttactctgctcattcactgattattaaaataggtgcggccattactggcttcctcgttgggctgatgttagatgcgattcattatgttcctaaagtcaatcagacgtcggaaaccattaatggattccacctcatctatgtagtcccttcattactgtgcctggtctcattatatatatatcgtaaacattacatacttaacgacgaaatgctgatttcagttcagttaaagctggaagaaaaataccgcaaaataaaaagtaaggccgtacgcgaagaacatgagcccactatttcagtgagcctttaa

SEQ ID NO: 207759 - DNA, 621 bp, Klebsiella oxytoca
atgaaaaaagtcgcacttaccccgccaaaaggttggaacagctgggatatatatggcgcatcggttaccgaagaagaggttcgtagcaatgcgagagtgatggctgataaattaaaatcatccggttgggactacgttgtcgtggacatacagtggtacgaacctactgctctcacatctacctacaatacttttgcctctgtctgcatggatgagttcagcagggtgatcccagctgtcaaccgtttcccttcaagcgagggcggaaatggctttaaacctcttgctgactacattcatagtctcggacttaaatttggcattcatattctcagaggcattcctcgagaggcggttcataagcgcttacctgttaaaggcactcatttgacagcggatgagattgcaaccaatacaatttgcccctggaattcagatatgtatggtgtaaacacagaattagctgaaggccagctgtattatgactcacttcttgagttgtacgcatcctgggacatagacttcattaaagtggatgacattgcattctctaagatttacccaaatgcacatcttgatgaaataaaagcgataagaaaagcaattggctttgttgaataa

SEQ ID NO: 207760 - DNA, 633 bp, Klebsiella oxytoca
atgacacagaatttcggcaacacgattggttatcagtctgctggaaatattcatggagtaacggttagcaataataagataaaaaatggttattacgccctgtattgtgcgtccaaccttatagcaggagagtccggcctccaggaggcagtgacagataacacaataaatggttcaacgatttggctaacagtgagtggctcaggattcagactcatcgaccgcaatgaaccaaatgccaacgcgactgttaccgccagtctctggacgactgcaggttttaaagacgtaagaatgcgcaacactatggggatcagcctccccgcgagaacggtaaatacctcgctactgaaaccacgcctgtattcgcagatatcgcgtcgtgcggttggggtaaggatcacgctgcttaatacaagccccactaatcagtggacgggcacaggtactctgcaggttacgttgaatgaccaggttgttgtcggttcgggtaacttcacgcagggcagtgaggaccctatccagttgttcacacagatggaggttaaggagggaagcaacacgattcaggtgaataccagcaacaacgatttgctgtatgcggcctgccagattgaattactgataccgtaa

SEQ ID NO: 207761 - DNA, 1140 bp, Klebsiella oxytoca
atgagcgattttttgccgttttcgcgcccgtcgatgggcgacgcagagctggctgcgctgcgtgaagttttgcaatccggctggatcaccaccggaccgaaaaatcaggcgctggaagaagcgttttgcgcattaaccggcaaccgccacgccatcgccgtcagttcggcgaccggcggcatgcacgttacgctgatggcgctgggtatcagcgccggcgatgaagtgatcaccccttcgcagacctgggtctccacgctgaacatgatctgcctgctcggcgcgacgccggtgatgatcgatgtcgatcccgataacctgatgattactcccgaagcggttgaagcggcgatcactccacggaccaaggcgatcgtcccggtgcactatgcgggcgcgccggtggatatcgacgccatccgcgcgattgccgagcgtcacgctattccggtgattgaagatgccgcccacgcggcagggacgtactacaaaggccgtcacgtcggctggcgcggcaccgccattttctcattccatgcgatcaaaaatatgacctgcgccgaaggcgggctggttgtaaccgacgatgatgaactggccgcacgtattcgcagcctgaagttccacggcctcggcgtagatgcttacgatcggcagaccctgggccgcgccccgcaggcggaggtgatttcgccgggctttaaatacaatctggcggatatcaacgccgcgctggcgctggtgcagctggacaagcttgccgccgccaatcagcgccgtgccgccattgcgcaacgctatctccgcgagctggcggatacgcctttcaggccgctggcggtgccgtcatgggagcatcagcacgcctggcacctgtttattatccgcgttgatgaagccgcctgcggtatcagccgcgataccctgatggaaaaactgaaggccatgggcattggcaccggtctgcacttccgcgccgcgcatacgcaaaagtattaccgcgagcgtttccccgacgtttcattaccgcatacggaatggaacagcgcgcgcatttgttccatcccattgttcccggatatgaccgacgacgatgtcactcgggtcatttccgcactgcaccagctgtcaggacgttga

SEQ ID NO: 207762 - DNA, 570 bp, Klebsiella oxytoca
atggcagttaagcatcgcgtcgataatatggcggcgataggcgcgcagcatgcagccgtaatcgcccatcgctttaccggtggtgcgctgaatcagacgattgatcatcctggaggcgcttttacggaaccaggtatcctggcgattctgacgcacggtaccgacaacgtcgtagccttcgtcggccttctccaccaggcgcgggatctcttccggcgggttttgcaggtcagcatcaagggtgatgatcaggtcgccggtgacgtggctaaaacccgccataattgccgagtgctggccgtagttgcggttcaacagtaccgccactacatggctgccttcggcttcagcggcttcggtcagcattcgcgccgagtcatcgctgctgccatcgtcgaccagcagaatttcatactgccgaccgagcgtcgcgcaggcggtatcggtacggcggataagctccggcaggctctcctgctcgttatagacaggaataacgaccgagacctttttcacgggaggatagctaaacatatcaacgtcctgacagctggtgcagtgcggaaatga

SEQ ID NO: 207763 - DNA, 1356 bp, Klebsiella oxytoca
atggaatcaaataatatttttaatttttttgacgaaatacttgaagaaaataatcgccaattaaagaatatatttgaaggtgattattctagtgtcgggagattttcaccattagctgagaagtttttaggtaatgatgatgttttatttgacctcatattacctgaggtcaatgacttaataaagggtagttcttttattaataaaatcattctcttcgaaagagataggctaaaaaagtcaattgctttattggaaagtgaattatcgaagaatccatgcgataaaatctcattgcttaaattagaaagagaagaggtatccctaagtgaactatccattaattcaatgagagcagagtctgataatatttattatgaggttatatatgatgtgttgactcatggtgaaccacatgagaaacagacggctgaaaattatttttatgtttatcttttaaaaattatgttcgaccgctattcgaatgaagtttccttgaagtctaaatattcatctgtagagtataagttaaatagtatttatcaattctataaagagctagattttgatttatataaggaagataaacaatttaggaagtataatctttactctcttaatcaaaactctgatttttttattggtttaccatctcggatttatgacaaaacgaataatttacaattttttgttaatttgccagagcatattctaagtttattcgaatctcttcgtaataatggcgtgatccgagagctagcactttatgttcaatctgatccgataattgaatcagaaaagagaatatttattcttcttggtgatagcagcccagtattgccaattaaattaaaggatttagatggaaaaaaatctcatagtgtaggttgtgatgttgttaaattacctaaggcacaattaaacactcgcttaccatcgccagcaatatataaatattataataatgcctcacaggattctatctggatttttataaaagacaatagtattgtctttgaagaaatacttcaagatcaagaagtactagaggactgcgttgtcacacaattgattcatttagaatattattgtgaaaatgacggtttttttatttctcatattgatcatgagtatgtattttatacatatgatgagtttgatgcccgagaatcaaatgttgaacaaaaaggtagcgcgagaagaagaataaaaacatttaagatagatggttctaaaataccgtttgtattaagtgatgatacattttttttacttactgttttagatgcgttttttataaatacaaatttactgattgattatcttgtatctattgtagagaaaagtgtcgattaa

SEQ ID NO: 207764 - DNA, 570 bp, Klebsiella oxytoca
atggcagttgagcatcgcgtcaatgatatggcggcgataggcgcgcagcatgcagccatagtcgcccatcgctttaccggtggtgcgctggataaggcggttgatcatcttcgaggcgcttttacggaagaaggtgtcctggcggttctggcgcacggtaccgaccacgtcgtagccctcgtcggccttctcgaccaggcgcgggatctcttccggcgggttttgcaggtcggcatcaagagtaatgatcaggtcaccggtaacgtggctgaagcccgccataatcgccgagtgctggccatagttgcggttcaacaggaccgccaccacgtggctgccttcggcctcggcggcttcggtgagcattcgcgccgagtcatcgctgctgccgtcgtcgaccagcagaatttcatattgccgtccgagcgtcgcgcaggcggtgtcggtgcggcggataagctccggcaggctctcctgttcgttatacacaggaataacgaccgagacctttttcacgggaggatagctaaacatatcaacgtcctgacagctggtgcagtgcggaaatga

SEQ ID NO: 207765 - DNA, 633 bp, Klebsiella oxytoca
atggcgctgggtatcagcgcctgcgatgaagtgatcaccccttcgcagacctgggtctccacgctgaacatgatctgcctgctcggcgcgacgccggtgatgatcgatgtcgatcccgataacctgatgattactcccgaagcggttgaagcggcgatcactccacggaccaaggcgattgtcccggtgcactatgcgggcgcgccggtggatatcgacgccgcgctggcgctggtgcagctggacaagcttgccgccgccaatcagcgccgcgccgccattgcgcaacgctatctgcgcgagctggcggatacgcccttcaggccgctggtggcgccgtcgtgggagcatcagcacgcctggcacctgtttattatccgcgttgacgaagccgcctgcggcatcagccgcgatgcgctgatggaaagactgaaggccatgggcattggcaccggcctgcacttccgtgcggcccatacgcaaaagtattaccgcgagcgtttccctgaagtttcattaccgcatacggaatggaacagcgcgcgcatttgttccattccgttgttcccggatatgaccgatgacgatgtcactcgggtcatttccgcactgcaccagctgtcaggacgttga

SEQ ID NO: 207766 - DNA, 531 bp, Klebsiella oxytoca; identical to SEQ ID NO: 207631

SEQ ID NO: 207767 - DNA, 495 bp, Klebsiella oxytoca
ttgggtaatggcgcgagagctgccgatacgcgcggcgttcaggttatcaaggcgcggccccatccagttgaacggacggaacagggtaaacttcaggccgttcttatcgccgtaggcccagatcacgcgatccagcaactgcttggagaccgaatagatccagcgctgtttgttaattggcccgacgaccagattagaggcatcttcatcgaaattgttgtcggtgcacatgccgtacacttccgaggtcgacgggaaaatgatgcgcttatcgtacttcacgcagtcgcggataatcttcaggttctcttcgaaatccagctcaaacacgcgcagcgggttacgggtatattcgattggcgtggcaatcgccaccagcggcaggaccacatcgcacttcttgatgtgatactcgatccactcggagtggatgctgatatcgccctcaacgaagtggaaacgcgggttgtcgaggaagcggctgatggcgtctga

SEQ ID NO: 207768 - DNA, 864 bp, Klebsiella oxytoca
atgcataaaaccgttagtatttatattcctacccataatcgtccgataatgttagcaagggcgttagattcattattagctcaaacatacaacaactttcaagttttggtgtgtaatgatggttcatctgtaccttatcaacagataataaaggcatacaaaccaaaattttctgattttatatacatcgaaaacccatacccaatgggagcttgttattccagaaacaagctaataaacattgcagatggagattatataacaggattagatgatgatgatgaatttctcccttcaagactttatgacttcgtcagctcaccctatctagataagtatgcatatttaagtgctggacatataactaaaacatctagcggcttgttcaaacagaagatagatgaacgcattattacgcttgacactttgctatcgaggaacgtcgtcggaaatcaagtctttacaaagactagctctttaaaagaaagtggaggtttcgatgaaaccttgcctgcatggcaggactatgatgcatgggttaatcttacacataaaatcggtaatggatataggatagaaaaatataattatcaatggaatattgatcatgaagaagggagaataagtaactcttcaaaagcacaagttggctatcgattatttattgaaaaacataaggatattctatccaaagaaaacctcagaaatctttttgtacaagataaaattaatagaaatgttgatataagtcttgtcgacttatttaacaattttagcctttctatattagctttagtttgtaaatataaactaaagaaaaaatttcccgacataaaagaaaaaatttacaaggtctcaaaatga

SEQ ID NO: 207769 - DNA, 129 bp, Klebsiella oxytoca
atgacgccccatattgtccggcccgacgctgaaaaagaagcttgcctgaatcccgtgctggctcagcagagccagcagccgcgggaccccgtcccgcgtgccgcgaaaggtatcgacatctatgcgtaa

SEQ ID NO: 207770 - DNA, 531 bp, Klebsiella oxytoca
ttgacgctggaggttgaatgcgggctgctggagctggagcggattatcggtcgcccggtcacctgttccgccgttgccggctggcgcgccgatcagcgggtgatcaaagccaaagaggctttcgatttcctctataacagcgactgccgggggaccgggccttttctgccgcagctggggaacggcgcgccgggaaccgtgcagatcccggtaaccttaccgacctgggatgaagtggtgggcaacgcggtggatagtgcaggcttcaaccgctatctgctggactgtatccatcgcgacgcggggacgccggtctataccatccatgccgaagtagagggcatcgccttcgcggagcagtttgatgaactgctgaccatggccgcgcaggaagagatccggttttgtccgctaagccagctgctgcccgccgattttagcgtgctgccgcgaggtaaagtggttcgtggtgaactggccggccgggaaggctggcttggacgtgaacaattactcaattcgggtgtttga

SEQ ID NO: 207771 - DNA, 330 bp, Klebsiella oxytoca
atgcaggttaaaagccccctgcggcgcaatattcaaaatgtcatcgcacagcaggttgcggtagtagaacgagaacagcacgtccggtttaatctcgcggatacgttcgatccacagcggatgattcacatcttccggcgcccataccgggatgccttgctcagcggcaatacgcgccacggagccaaaaaaatggttttcgccagggttatccggatgggtaaaaatggcggcgatgtcataaccggcatccagcagagactgaatacctgcacaacccatatcgtgataagcgaagactacggctttcatgaacgatcttcctcttga

SEQ ID NO: 207772 - DNA, 465 bp, Klebsiella oxytoca
gtgaaagaaataccactcatcgatacaaatctattgctcctatttgttataggctctgttgatcatggtaatttcataagcacatcgaaaagattaggggattttacatttgatgattataaaaccttattatcatatatcgcttcgtttcctaatttcgcaactacaccatacatcttgactgaagtctctaaccttattgatctttacgataatgccgctgatgaggcatataaaacacttcaatccatttcactggtagctgaggttattgatgtaattcccaaggatgatacacaacatgcccattttctccagtatggaatcactgatgtgaatatattatatgttgctctatcgcggcctattttaacaaatgatctgcggttggctcgtatagcttatagcctttgccctgaagaaaatattgttccttggtatttggtaaaaaacgggagtaaataa

SEQ ID NO: 207773 - DNA, 285 bp, Klebsiella oxytoca
atgagcgctatcgaagatattagtgaagcaacagaagttgcagtaaaatcattaaaggaacttaaccataatgtgaaagatatttcagtggaagaagctgtttttaaggaaggaaatgtagaagtaactttaagttatattgatagcgtagtctctgatgatatgccgccttcaaccagactcttaactttattaggggaaagacgcaagtggcgtgtttttatagttgataagtttactaaatcgtttaaaggctttagagcttatcataaagatagggcttaa

SEQ ID NO: 207774 - DNA, 1437 bp, Klebsiella oxytoca
atgaacgcgcctaaagtatttatttcatatagctggagtgaccaaccacaccaagagttagtaaagcactgggctgacaggcttgtcgctgatggggttgatgttgttcttgatatttatgacctcagagaaggccatgataaatacgtatttatggaaagaatggttacagattcttctgtaacacatgtgttagttgtatgcgacaaaaagtatgctgagaaggctaatgccagaaaggcgggagtcggcactgaatcacaaatcatttcaagcgaagtctatgaaaaggtagaacagtccaaattcataccaatcgtttgcgaatttggagatgatggcgaaccaattctacccacatttatgaaatctcggatgtggattaacttttctagttcagaagccgagaatgagaattgggagcaactaatcaggctgctatacggtaaaccacagcatgtaaagcctaaaaaaggcaaagcgccaacatatataataagcgaaataccagttcccacaagcgaggctatcgcaaaattcaattccttgaaacaagctgtcctacaagataaaaaaggtatcaatcactatcgacgtgactttatcgattcttgtataaattatgctgataatcttcgagtacgggaaagaccaactgtagattcaatgggagaaaaggtcgtcgaagactgcggaaagctaaaagcaatacgtgatcatctttgtgactggattcttcttgagggagaaattacagatcctgatcacctatcagaatcggtaattgaagtccttgagaagctgagagagttaaaatcacgcccccctgaaataaatagctggaataatatttggttcgaggcccatgcagttttcgtatatgaaacatttctatacatcattgcagcactattaaagtcgggtgcttactcaatattacatgatatttattcgtcccattatctcttgccatcatcagatagacacggacaatcgaattttgaaaaattcgattgtttctatggttattcggagagtttacaatctgtcttagcgccagaaggtcgaaggctatacgctcctgcagctgagcttttaaagcgccaagcggatcgagaagatttgccatttggcgatataatgcaagccgaattattaactctattaatgtcattcattactccagatactaggtggtaccctcaaacccttcattattcgtcccatggtaatcgttatccattttttcttagggctgcacaacataagtactttaaaaatttatctaccataaccggtatagagtctgctgattacctaagggagaaagtaaaggaaggtcatgagcgactgggaactgggcaatggtatgactttcactttgaaagaaatttttggtcatccatgaatatggatgagctcgacaagcttaaataa

SEQ ID NO: 207775 - DNA, 300 bp, Klebsiella oxytoca
atgtcaagcgaactaagcgagaaactgaaactgattagagaagctgaggagttaagccaagctaaatttgccgatttaacagggatttccattagtacaatcaaaaagtacgaagtaggtttgattgaacctggtgggataacgttacgtaaaatcactacccatgaaattttcagaaaatacaccttgtggcttatgagtgacgagacaaatgaagcatctgggcaggtagctccgactctctcccctgatgggcaaagcagcacatcaaaacgccgaagcgccaagaaggttggctaa

SEQ ID NO: 207776 - DNA, 249 bp, Klebsiella oxytoca
atgagcactaaatatccctttattactgccgctgaaattgttctgaaaatgtatgaattgcgtcagaacgttgccgctaacaaagttaatccgcattcagtttctgaaatcgagtggtgttgccatcaattaaacgcattggcaaatgctgctgcttactcaggacatgataaagaatcaactgttttagaagttgcggctagtttctggaaagaaaccggatgtaaaccagcatttgggtttgaatga

SEQ ID NO: 207777 - DNA, 240 bp, Klebsiella oxytoca
atgaaagagttattcgcaagacagataaatcatcttctcgaggaatttcatttcaatgttgaattcgaaaacaattcccgggcactttcatttattgttctccagaatggaattcaacatatttatggtagtgccttttgtgccggagatacagaaacaaccaatgaactgaagccattgttgatgcaggtaatagatggcgaagtgccgcaacccattaatctggagttatttgtatga

SEQ ID NO: 207778 - DNA, 234 bp, Klebsiella oxytoca
atgaatttttccgtattggtggaagtattagctttcctttttgtctttggtatggtcgttgctgaacttatctgtcgtgcattgttttatcgtgagccgacaagggctctaatcgtaaatgcatttattgaatcgttaaaaactctattcatagtttctgtttttgtatttgttgtgttctctgttttttatatctcacagtttttgacgttgatacttatagcgagtgaataa

SEQ ID NO: 207779 - DNA, 2682 bp, Klebsiella oxytoca
atgacagcatctaaaactaaagaaatgattcctaatgtacgaatcgaaattttacagcgcctactgcgcgattttcactttaaagaaaaagataaatatctgcagcagggcgtttgccctaaatgccataaacgcgaattatttactagtatagagaagccttggatcctgaagtgtggccgcgaaaacaactgcggtcatcaggtcattgtcaaagagcagtatcctgaaatctttgaggactggtctaagcgataccaggacaccccggaaaccccgcacgccgcagctgaggcgtatctgcgtgaggcgcggggattggatactgaaccgctcaaaggttgctttactcagggcgcgtttgtcaaagagggtatggggtccgcgacggtcagatttaaactggcctgtggtgcgacgtgggaacgtatcattgaccagccgcagcgtttcggtaagcagaaagccaacataagaggcagctacgttggccactggtgggttccgccatttgtgaatctgctggaagtgagtgaaatttggatcacagaaggcattttcaacgccctgagtctgtgccaggcgggtttaccagctgttgccacgctgagcagtaacaattacccgctggcagcgctggataccctggcgaaagaactgggcgagaaaccccgcccgcgcctgatatgggcatttgatggtgataaggctggtacaaagcacacgctggcctttgcggcacggagtgaagaagctgggtggaaggttcgagcagcgcagccggtgaaatcatccttctgtctggactggaatgacctgctgttacgtggtcggctcagcaaaccggacatcaaaaattatcgctactatggcgatatcctgctggcgaaaagcccgactgaaaaagcgctgctcatgcatcagcataacgagtggcattcgttctattttgagcataactcccgcatgtactggtttgagctggatctggacaggtatatgcgagcctatgagcgaatcaccaataccggtactgaagtggtgatggagtgggaggccaaagaacgggcggttaaagagtcaggcggcgtgacggaaatcgccaattgctggctgacgccgctttacttccagcgctctgaacctacggacgaatcctggtattacgtgaaggtcaatatgcctaaccggccagcagtgaaagataccttcacggctaaccagcttaccagttccgccgagtttaaaaagcgtctgctgcatatcgccaaaggggcggtgtataccggtagtaccaaacagctggataagttcatccagatgcgcctccccgaaattaaagaggtaaagacacagaatttcattggctataacaaggattactctgcctggatttttaatcgtgttgctgtgtgcgatggtcgtttgtatgagatgaatgatgaggactacttcgaaatcagaagcgccagtgttaagagcctgagtcttacgccctccctagatctgaatccgaagttgaacgaatttaccactggctgggtggaggatatctggacggcttttggtgaaaagggatatgttgcactggctttctggctggggtctctgtttgctgagcaaatccgggaacgtgacaaatcgttcccgttccttgaaatcgttggtgagccgggaacgggtaaatccacgttgattgaatttctgtggaagctggctggtcgtgaagaatacgaaggttttgatccttctaaatccacggctgcagcgcgtgggcgcaactttgcccaggtcggcaacctgccggtggtcttaatcgaaggcgaccgcaccacggataatgccaagcaacgcgcttttgactgggatgaactgaaatcactgtataacggccgagcttcccgtgctgtgggaataaagtccaacaataacgagacatacgaaccgccattcaggggcagcattgtgattgcacagaatgctgatacagacggcagtaaagcgtttctagagcgtatcatccatatctatactgacaagcgcgggcaatccattcagactcgctatgcagcggagaggctggaacaactccccgttagccaggtatccggattcacactactggccaccatgcgagaaaaagccatcatgcagacgttcggtaagggatacgaacgcgccagaaatgagctggagtctaacagcagtattcgccatatccgcattgcaaagaatcatgcacagcttgtgggcttgctggaagcgcttgcgcttgttgtaccggtgccggttgaacgcataaaaaaaacgcgcgaagccattaccgcgctggccattgaacgttgtcaggcgcttaaaaaggatcatccgatggtacaggagttctgggagctgtttgattacctcgacgaactggcaccatacggcattaaccattcatcggatgaaggcgaaattgcggtcaactttaaccatatggaagaggttgctgctgcgcataggcaacgaataccatttaccttaacggaaattaaaaaattgcttaaaaatggcaatgaacgtcgatttatcaggcaaaccacaacgcgtagcgcggtgagtgagcgccataatcgtggtaaaggtgaaatgcaacggatgccggatacattccgttgctggttattcagccgggataaataa

SEQ ID NO: 207780 - DNA, 267 bp, Klebsiella oxytoca
atgaacggaaaaccagctgcgcaggttcctggcgcgcagcaccgccagtttcagatcctgctggtcgtattccgtcaccggcaaatcgttctgataaacgttcaggcgaaaggtatacggatcccctttcgggttctgattgaaccattcaacaatatccgtcccaaaaggactgtccaccagggcatgacggacggcggcgaccgtaccgcgatggcggtggatgtagtgggcgcgcttgatcgcatcgcgtttcttttgttctga

SEQ ID NO: 207781 - DNA, 270 bp, Klebsiella oxytoca
ttgagagagtgctacgcactggctcacgcccccgacgacagatatatgttaattatttttacccgtcagatgaaaacccaatgtttaatcccccttgcagcgccgctgagtgccctcagcactcactcgctgaagcaaaaaggatttttccgaagggggtccggcgtgagccgtattaagttaacgggtaaatcatgtagtcgggtccattctttcgctaaactcagcagcctgaatctctgcgcgaagcgtatttctactgacagttaa

SEQ ID NO: 207782 - DNA, 309 bp, Klebsiella oxytoca
atgaatataagtgattttgaggcgtatgaaggttattgggacattattgatggtgatcttttcgaagacatcttttatatggaatgtattgagaagttagagccaacagaaaaggttcttaaggcaatcgaattgctgagctacttctttgcggaagatatgcgtgaagtactgggtgaaatacgtgagatgaatatgcttgcccaggcagatatctttgatttgtggtttgaaataataaagtcacgagattaccttgagtctctggcaaaaacaattatttattacagtatcggtatgcctgtgtga

SEQ ID NO: 207783 - DNA, 207 bp, Klebsiella oxytoca
atgaatacaacaaatcaaagcttaattcgtttaccagaagtcttgaaacgaactggtttcggcaaggcctggatttatcgtctgatcagtgaaggtcgttttcccgcacctgtaaagattggcacacgcgcggtggcttttgtcgagagtgagattgatgaatggattaaggcagtcattagtaactcaagatctcatgcagcgtaa

SEQ ID NO: 207784 - DNA, 510 bp, Klebsiella oxytoca
gtgccgctgttatgttttttactgctgggctgtgatccggcagaaaaagaagcaccgcgcggcagcgggaagagcagctacgtggcggctaatctgctgggctataaccatatggcaggcacgaatatcaactggttctccgtcaacggctaccggggacacgccggggggtttacctgctgcatatcgctgccggaaaaatggcggcccaacatgcaggtggcagtggagtgggaggttaaccctaacccttttccgaaggatctcccccacttcgatgatccaaactatgaacattatatggaaaaatataaggctacctttcgtcagtataaagcggtggccactattcccgaatatgaagattcctgcggcctgcaggtgcatttcttgccctgtcagcagattaaagtaacggccacctgccacggcgtggaacatcctgatcacccgattaaagaacctttcgatctgccggagcctgcccagtgcccgccagaaacgccatga

SEQ ID NO: 207785 - DNA, 612 bp, Klebsiella oxytoca
atgaaagcattgtcagtcttgagcgcagtacttcttctaagtggatgtgctgcgatggataactcaaaggatacacgcctgaattcactttcaggaataacatatgagaataatggtaaatatgaaactattaaaacgtatgtgaaaaacagagacggaaaacttaataaagatagagttaaattatgtattgcaaggaatattacaaacaatagcatccaattaaaggattcatctgcaagctttgtgggcgcttatactggtaactattataatattgaaaaaagcactgtcactcaaggtggtgaagttataaatacagcagcctcatcatcagatgtaattattgccaacgggaccgcatcttatcaatatgatgcaggtcttgtgatggtagaaagagttgttaaatttacgatggatattacccctgcacaatcaggcgttaaatacacattttctaatttacaacaagcacaaacagagacaggcgtagtttcaaacaacggtttttcaccaataggcgtttggaaggcggctggtgggtatcaggccattaatgcattagataatatttcctttgaaataaataaatgcatgtctgagaattag

SEQ ID NO: 207786 - DNA, 501 bp, Klebsiella oxytoca
atgttaacagcgcagaagcggaaattcgctctcgcgctgatgtccggaatgtcccagaaagatgcggcaataaaagcgggatactctgaaaaatccgctcgttcaaagggttcgcagcttgctaaagacccggaggtcatcgcgtttataaggcagaaaaagagcgaaaaaatagaagttgatgacgagccggagtatcgacggaatgtttataccccagcggtaaacaccccggtaaaaaccccttctccggaagcgccgccagtgactggtgagtacgacgatccgctcaagtttctgatggcagtgatgaacgactccactgaagacatcgacacccggaaggatgcagccaaagccatgctgccttacgttcaccccaaaaaaggggagactggcaaaaaagaagcacgcaacgctgcggcaaaagcagccgcaggcgtgagcaagttcggatccatggcaccgccaaagctggtggtaaacaacaaaaaggggtaa

SEQ ID NO: 207787 - DNA, 618 bp, Klebsiella oxytoca
atgcgctttcatgttgtgtgcctgcttttatccacgtcaggcgaggtggttctcgtgtacccctacagcgagaaatcggttaacatctattcacccctacagagcgatggattttcaccgatggacaacaattggttgcaggagttattccgatctttcctgcgtgacatagactttaggcgtctaatgcacatgcttattatcttcgtcgtactgcttgttgttcttcctgagtcgctgaagcaatctatcggtgctcacaacccagagttcctgccagcattcagcctgtattacgtgctggttgtttgcatcagcttctttttgtcttctgtaaccagctttacaacgcaatctgcgatgcagtttttgattggacaggctcgtaatctcaaagtcgctttactgtctactcaagaaaaagagtgtctttcatacatcattgaaaccggacagaatgttgtttatctaaaaaatcacaatccaatcattgagttattggttcataaagagattcttcagcgaacctatgacatcaattgtggtaatggctctgacggctacgtgatatccagcaagtaccatttttatgttgttaaacatctatctatcagatag

SEQ ID NO: 207788 - DNA, 261 bp, Klebsiella oxytoca
atgaacattgctacttatctaaatacggggttagcgcttcttggctgggtttacatcatgtcaaaaacagttgagtggataattaaaaacgggctgaagcagtgggacaagcgccgccatcagtctcgccgccagaaagctgtaaatgagctttatgaagcgtttgaacttgacaagattgagccaggttcaacagttcgcatggcgacccaaggcggcctgacaatcatgatgatgcgcgttgagggggccgacaaatga

SEQ ID NO: 207789 - DNA, 195 bp, Klebsiella oxytoca
atggctgaaaaatcatctttggaacgtctgcgggaaatcaatgcagagaataaacgcgtagttagagtcagcatcggagttcttaaagcggccagaagtgaaattaacgctcatgtttcagttaacgggaagggtgtaatgacggacatggttcttaactctctgaacgcgattatcgaaggagccaaccaatga

SEQ ID NO: 207790 - DNA, 264 bp, Klebsiella oxytoca
atgaccagcaaattaaccataaccgatcatcgccttgctgcgattcacgctgaatgtgaagagcgtgacccggcgatagtagaaatcagggcgatgattgaggagctacaggaacgccgcaaacagtcgggcgaattaacgatgtgggttaagcgattagcccgttcactgaaaaacgcgaatccagacagtaagttaccacgcgacgcgatggactacttgactgcaaaggggctgattagtgtgggggatattttgcgatga

SEQ ID NO: 207791 - DNA, 699 bp, Klebsiella oxytoca
atgcctgttcgccaagtatgtcagaattttttccacgatgcgttagcaccgtttcacaaatatcgacaaaatgcattactggatgccaccatcgcactcatcaatggcgcatctctgacgctgaccagtatcggacgttattttcccggtaccgctcaggtcaaaaacaaaataaaacgcgttgatcgtttactcggtaatgaatcgcttcatcacgatatccccctgattttcagaaatattatttcgatgctgacgagcaggctgtcactgtgtgtcatcgctgttgactggagtggatatccatctcaggagtatcacgtactccgtgccagcctgatttgcgatggtcgttcgatacctttgctgagctggatagttccttcggaaaaacagcaaaacgcaaagatacagcaggcctttcttaatactctttctgaagcggtaaacccaaaagcaagggtgatcatcgtcacggatgcagggttccagaatgcctggttccggcacataaaatcactcggctgggatttcatcgggcgcatcagggggaatatccagatgcgacttgagaacaaaggcgaatactggttccggcgtcaggaattgcaggccagtagtaaaccagaatatctggggccgggaacgcttgcccgctcagaatacgcccggtgcgatggtcatttttatttgtattag

SEQ ID NO: 207792 - DNA, 234 bp, Klebsiella oxytoca
atgagaatcgaagtaaccatcgacaaagacaaaaaacttcctgacggagctgtgcccgccttgcagaaagaactgcttcgcagaatcagcaaaaaatacaataactgtacactctctattcgtcgggccggatctgatggtctcagtgttttcggtggcgcagatagcgacaaagaaaccatcgcagaaattctccaggagacatgggaaagcgccgacgactggttctactga

SEQ ID NO: 207793 - DNA, 606 bp, Klebsiella oxytoca
atgaaactaccacgccgcaaatgcaaaatctgtaacgagtggttttaccccacttaccccaatattcgctggtgcagcccggagcatggaacagcgctggctatccaactgaatgagaaaaagaaagccaaagaacgttctcaggaacgacatcagcaacgtcagcagcacaaaaaagagcgtgcaatctggcgtcagcgcaaagaagcagtaaaacccctcaagcactggattgactacacacaaagaacagttaatgacatttgccgggaaacagctctggcaaacggcgaaggctgtatttcttgtgacacacacagtgccaacgcatggcatgccggacattaccggacgaccgctgccgctggccatctccgctttaaccgtatcaatatcaaccttcaatgcgacgtctgtaatatccataaatcaggaaatatcgaggcttatcgagatgggttggttaagaaatacggtgaatctgccgttcaggagctggagaacaacaatacccctcaccgctggacggttgaagaattgaaggcaatcaggctcgaagcgctggccgacttacgcgcactgaaaaaagcgcaggaggcagcatga

SEQ ID NO: 207794 - DNA, 288 bp, Klebsiella oxytoca
atggcatttaaattatcagcacctaaaaccgttcagatccattatctcggcgggtatctctgtgaaaaagaaattaacattgaactgatttacgctgtggaaagcgtcaggcaggacgacgctggcgtggtcaaggcctccctgtccgtgcgctataacgaacaggccaaaatcgcggttggtgattatccggtgtctctggatgtctcatcgtctcggtcatgggcagaacaggctgagactcaaattatggaactggatgagtacgctggctcatcggcgttgtaa

SEQ ID NO: 207795 - DNA, 1419 bp, Klebsiella oxytoca
atgactctggtcatcactgatatgtacggtaacactgtcacgcgtaacttattcaaaggggctaatactgcgctaactggcggagaactgcgggcggcaatgcctgttaccgtgcaataccgaggctcaccacagaataactttaaattgctgtatgccggggacccgactaccgacattctgaacctcaaaagcagcgttaccaccttacagagcgctatcaccgacccgtacaccagactgagtaaaaaactcatcggggacggcacgcaggccaatacctcacctttcggtaatatttcgttcagcaatggcgtcagaactgttactaaaaagcgcataattataaccacaccaggctcatccataggccggggggcgggttccactggcgggggtgtggtgggtgcgccgttctctcccagcgcattgtttatagaagccatgaaagagcacctttctggctatggcgaatttgagtttatcgacgacaaccagagtatcggtggccaggcgatacaccagtttgccgcgcaactgcaaaattccccgtatttcaccagtagcaaccctgacgactggccagatatcgtgctgattgttggcgggatgaatgatgccacgccgaacggaaactttaatcgcgggcgcacgtacccgcttcagcaagcagtgctggaaaatctgattgaccagtgcacggcgaagggcgctgtcgtcattgtctgcaccacgctacaccacaatgtcgagtctgccaccgtcaaaaacatcacgctgggtgacctgaatgtcctgtggccggtcagaaccttcaacgttacaacgaattttacgttcgattcagcgaacaaaactatcaacagcgcggcgtttgcctatgacacagggaatgccgcgaccagctggggcgggcaaattcttcgcgtggggcatattttgcgggtgagtggtggtgataatactggcgattacaccattacagctatagctgaggaccgccagactattactgtggcagaaaacattgctgcttccggctcaatttacacctccattcagcacatcaacctcgacagcattatcgaagaggttctcgatccaccgccgtcaagatcgtttgtggaggccaactggtcggggagcggcgttaaagttgttggggatgtacgtttcggcctctacaacagcatggtgcgtacagtggcgcgtgggaaatcagcgtttgtactggaggctgaaatcccctcgttcaggctgggtgttgaggtacacggatggtccgcgcttttcacctcgcctaattacaaccacccgaatgacctcggctataccgtcagttacaaggctggcgcagatgcagcggcattcagtctgtgcaaacttatttacggcgaaaaatactacttaccttcgtaa

SEQ ID NO: 207796 - DNA, 450 bp, Klebsiella oxytoca
gtgcttatttttgacgtactgaaaggcatgctgccggtctggggagcgtgggcgctaggcctgacgccgttctggctcggtctggtggccattgccgcctgcgtaggccatatctggccggtattttttaactttcgcggcggtaaaggcgtggcgaccgctttcggagccatcgcccctatcggctgggatctcaccggcgtgatggccggaacctggctgcttacgattctgctcagcggctactcctcgctgggggcgatcgtcagcgcgctgatcgcgccgttctatgtctggtggttcaaaccgcagtatactttcccggtttcgatgctctcatgcctgattctgctgcgccatcacgacaacattcagcgtctgtggcggcgtcaggaaacccgcatctggacccggttcaaaaagaagaaaaaaacgccggagcagaaataa

SEQ ID NO: 207797 - DNA, 498 bp, Klebsiella oxytoca
atggaatttttagtagcattaattatctttggactttctgttgctgtgtacaaagatgctctttctaagaatatttcacgtccagcaagatgggggattggcgtagcttttatcttcattatttttttacccctatatctttttaaaagaacaaaaatagctggttctgctttggaggatacagattccccgggtatacagggagggaaaaatctcaaccctgttgcagcttacattttgatgtttgtgctgtctttccttgggccttttttaggttttatcaaaggtgatcttcctgaatgtaactcaccagaagtagctagtgtcatcaccaagcttctaagtggtcaacaatttagcgatgcggctcaggttagttacgataaggtagatgaaataagacattgtaatctaacaacgtcagagcaagtgttttcctacacagtcaaatggtacagtgaagataaagatcagttcgttgttaaatttgataattaa

SEQ ID NO: 207798 - DNA, 246 bp, Klebsiella oxytoca
atgaactcacacgtaaagatggtcctggctggactggtattggtcccggggctttgtgcctgtacgagcaaaacctcggctattccgccggacccggttgcagtgaatatctgtcagcagccaacggcggaaatgctggaaattccggcgatgccggccgcgccggaggcggactctctccccggggcatcctcggccacagcaacgactacggcgaatggtgccagctcatccgcaacaaactga

SEQ ID NO: 207799 - DNA, 2154 bp, Klebsiella oxytoca
atgcgtgctctacagcttgccatgaccctgatggctaaagaccagggctctaaggtgctgcgccagacactggccgacatcttaaagcagaccaatgccaataaaaaagccgaggaagaagctgcacgtgtccgtgaacagtcggcacagagtggcatccgcgcatcccgaaccctgcagcaggagaatcagcgggcagcgaatgcccgttctgtcctggggatccgcgctgaacgcgacatccagcgcgagatagcgcagacgcaggccgcctataatcggctgcttcgaaccggcaccctcaccgctaatgaacagacccgcgcgtttcgttcgatgacgaaccaggtcgcgcagttgcgtaccgagctcaatggtgccggtcagtcaatgtcccgcatggaacgcgcccgcatgtggggtggtaatgtcacagcgtttgccggcggcatcgcagccgcaggagccattgtcgcgccttcagttagtaatcagatgaactatgaacaacgtctggccagtatggccaacaccgcgttcgccgatgataacgttgcaggtcggcgggttgggatgcagtcgatggataagttgatccggcgtgctgtggccgtaggtggtgggaataaggaaagcgcagcagagacacttgaagctttactggcatctggttcaataacttatgactctgctgaaaagttacttccgaccctacagaaatattcaacagcatctggtgcgtcttcagtagacttagccacaattgctattcgactcaagcaatcatttggtatcaccgatgagcaaatccctactgcactgaacatggcaattaaatccgggcagttaggttccttcgaactaaaagaccaggctaaatggctcccgcagcagcttgccgctggtaatgcgctggggatgcgcgggcttggtgatttggctgtattgctcggcatcaaccaggcctcagcgataaccgcaggctcaacagatgaagccggtaataacgtggttaacctgctggcaaaaatcaacagtcaggacgccgctacctctgcaggtaagatcgtatataacggtaaattgattgacctatccgggtcgttagttgcagcccgtggtaagggtattaatgcgttagatgctttcagcggtatcgtagacaaaattgttaacaacaatccagcctaccaaaagctggagaagcaattgagcagcacctctgacggatctaaccgtcgggagataatggagtcacaggcgaaactgctggagggttctgcagttggcaaaatcatagctgaccgtcaggcattgatggcacttatcgcataccgtgcgaatcgtaattacatgaaagatgtaattactggtgttaacaaagaaagagatttacctgctggccaaatgtctggtgacgtcaacttcgaactgatggaagggactaaccgctttaaacttaaccagcttaacaatacccgggactttgcgcagatggactcgatccagccgctgtcagatgtactgggtaaactctctggcgagctcaacgattacgccggcgcgtatccgggccttacaaaagcactggctggtgctgagaccgcaatcaaagccatgacggccgcagcatgggcgttcgccggcattaagtttctatcctctgccggcgcggccgcaacagccagcggttcagcaaccagtgcaggtgctggtgctgccagccgtattccaggctgggctggccggctcggcctcatcggcggtcgtgttctggcaccgtttgcactctggcaaggtgctgaagccgcgccactggtgcaggtcagtcgtggtgatgccgaggcacgcgcccggcttgaaaaaggtaattaccccaacgagcaggcccgtatgcttgatgctctgaaatcccgcccggggcttatggatgcatgggatgaagtaaaagcctggtgggcgtcaccatcaaatatcagcatccctcagtcagccaacggttacccggtgccgccgttcgcgcagcaacctgcggcgcagaccccaatcaacatcactacccagttgcaggtcgatggccgtgtactggcagaggtcgttaacgaggcgaacggtcagtctgctgcgcgtgggccacagggaggaccgcactga

SEQ ID NO: 207800 - DNA, 1434 bp, Klebsiella oxytoca
gtggcaaataccggtgcagtcacattggttattacggacctgtacggaaactccgtaacgcgcaacctgctaaaaggggcaaacaccgcgctgacgggaggggaacttcaggtagctaaacccgtaacagttcagtatcgcgggtctcccgttaacaactttaagcttctgtatgcaggcgatccgacaaccgacattctgaaccttaaaagcgatgtcaccactctgcagggggcgatcactgacccctacgttaaactgagcaaaaagcttatcggtgacggaacccaggccaatacctcgccattcggtaaaatttcgttcagcaatggcgtcagaactgtaactaagaagcgcataattataaccacgcccggctcctccataggcctgggagctggttccactggtgggggtgtggtgggtgcgccgttctctcctagcgcattgtttattgaagcgatgaaagagcacctttctggctatggcgaatttgagtttatcgatgacaaccagagtatcggtggccaggcgatacaccagtttgccgcgcaactacaaaactcgccctattttaccagcagtgaccccgacgactggccagatatcgtgctgattgtaggcgggatgaatgatgccacgccgaacggaaactttaaccgcgggcgcacgtacccgcttcagcgggcagtgctggaaaatctgattgatcagtgcacagcaaagggcgccgtggttattgtctgcaccacgccacaccacaatgtcgagtctgccaccgtcaaaaacatcacgctgggtgacctgaatgtcatgtggccggtcagaaccttcaacgttacaacgaattttacgttcgattcagcgaacaaaactatcaacagcacggcatttgcctatgacacaggaaacgcagcgaccagttggggcgggcaaatcctgcgaccggggcatatgctgcggattagcggggtgaatgccggtgattacaccattgcagccatatccgaggaccgtaaaaccatcaccgttgcagaaaatatcccggtttccggcctgattaataccaaaattcagcacatcaatctcgacagcattattgaagaggtgctggacccgccaccttcaaaatcgtttgtggaggccgactggtcaggaagcggcattaaagttgttggggatgtgcgttttggcctttacaacagcatggtgcgctcaacagcgcgtgagaaatcagtatttgtaatggaaaacgaaatcccctcgttcaggctgggtgttgaggtacacggatggtcggcactgtttgactctcctaattacaaccatccgaatgacctcggctataccgtcagttacaaggctggcgcagatgctgcggcattcagtctatgcaagctgatttatggcgaaaaatactacttacctgcgtga

SEQ ID NO: 207801 - DNA, 288 bp, Klebsiella oxytoca
atggctttcaaattatcagcaacaaaaactgttcagatccattatctgggcggatatctttgcgataaaaacatagacattgacctgatttatgctgtcgaaagcgtcagacaagatgatgcgggacaggtaatggcatcattgtcagtacgatatgatgatggagcgaaggtcaacgctggtgacttccctattactttagaagtttcttcttcaaagtcgtggcctgagcaggctgagactcagctaatggcgctagaagagttctctggttctatagctatttga

SEQ ID NO: 207802 - DNA, 771 bp, Klebsiella oxytoca
atgaaaaacttgaaaacaagttcaaggaatttactagatatgcaaaataaacctgtaaacgagttaaagagtgaaattggtaagcgtattcgctctaagcgagaggagttgaagcaatccagaagccacgtagctgacttcttgggcgtagccttatcgaccttacaggcatgggagaacgaagacagggagccaagcgctactcatattctcaaattagctgagtgccttggggtctcggttgaatggcttgtcagcggtgctgcgggttctgaactacataaccctcttttacctacagtagattccgcaggaacagctttagatgtccaaggtaatagcgttgacttagaagagtttgtgttcgttcctaggtataacgtttcggcctccgccggttttggcgcatggaatgatgatgaaagcccaatgtttaccgtcagctttcggagatactgggttgtaaatcatcttaaagctgatccgaagagactatcagtcatcagcgttaatggtgattcaatggcgggaatccttaatgataaagacataatactggtgaatcatgatgatagagacccacgcgagggcatttatgtgatccgtcttgatagccaactgttagtgaaaatggtgcagcgtttacctggagcaaagctgcgtatcagcagcactaatcctgcttttgaaccattcactgttgatttggataagattccagacgattttgacgtggtaggaaaggttgtgtggtatggcagggttgtttaa

SEQ ID NO: 207803 - DNA, 165 bp, Klebsiella oxytoca
atgaacgcactgaaatgttcgaaatctacgaggttcttcgtcgtgcgcagcgtcggggcgcagctagtgaaatgctggctgcaactaaccctctgctttgccctggcattcatgatgatggggagtggattgattttattgatgaagatgatgactgatttctga

SEQ ID NO: 207804 - DNA, 198 bp, Klebsiella oxytoca
atgaaacgtgtaattgggattactttctcagacagtgaaattaaggggagcaaggtaatgaacgggttcgtctacgatactaatattcgaggtgaaacagacccatattcagtgcaagagcatgttcgctggctgataaaaaaagaggatatggaaaacctatatgcacaacttcaggtggcactgaaaaaaaactag

SEQ ID NO: 207805 - DNA, 429 bp, Klebsiella oxytoca
atgcaaaaacgacaaccttcaatttgtgtaggtgatctatctgaaggcgaggtgtacgagtggatgaagcaaaagacgctagctattgagcagttaaaatctgcccggacgcatcgtgaatttctacagcgtgaattggacggtgttgataaacagatttctgaattagccttagccgctgctcttgagtattcctcaccttacaaaccagtgattcacccagacattgacgaaagaaccgctcgtgatattccggtgctgatttatgcattgaagaagcctacaggtgatgcagctcaagatgccgcaaacgcagcgctggctgatatttacagcactgcattagcggacggaaaagtagttgggtttatttctgatgatatgccaggcgctcttgaggctcgtaaggcgcttggtcaaatcagctag

SEQ ID NO: 207806 - DNA, 234 bp, Klebsiella oxytoca
atgacggtcggcgaattcaggatgtgggctgaatacgaccgtatcagcccgatcggtgatatccgtggcgatattctcaatgctcagctggtttcagcgatgtacggggctcagggcggtaaagtcaccattgaagacgcacagattcagtggagtgcagaagaggacgaggcaagcgacagcggcgatccctttgcaggcttagaggccgctttgctcgcagcatcagcataa

SEQ ID NO: 207807 - DNA, 768 bp, Klebsiella oxytoca
atgcccggccacgtcgtcggtcacctgcagatcgctgaccggagtcacgactgtgtccaccgtcagctcaaacgccggggaacgatcgctgatgttcccggccttgtcggtcacggtggtgctcaggctgtggctgccttcgtccagcgcatcaggggtgtagctccagcgtccgtcctcgccggcaaccatggtacccagcaccgtgtcgccgtcgtagatcgtgaccgtggcccccgcctccgccgtgccgctcagggttggtgtggcgtcgttggtcagatcgccgctggtcagcgggccggtgtgtccggccacgtcgtcggtcacctccggcgcactggcagacggcgcggtggtatcaattgtcagctcaaacgccggggagcgctcgctgacgttccccgccttatccgtcaccgtggtgctcaggctgtggctgccttcatccagtgcatcaggggtgtagctccagcgtccgtcctcgccggcaaccatggtacccagcaccgtgtcgccgtcgtagatcgtgaccgtggcccccgcctccgccgtgccgctcagggttggtgtggcgtcgttggtcagatcgccgctggtcagcgggccggtgtgtccggccacgtcgtcggtcacctccggcgcactggcagacggcgcggtggtatcaattgtcagctcaaacaccggagagcgctcgctgacgttcccggccttgtcggtcaccgtagcgctcaggctatgaggaccttcgctaagctccggtaa

SEQ ID NO: 207808 - DNA, 348 bp, Klebsiella oxytoca
atgacagaggatgatctctatgacctgctgtcgccgctggcagacgggcgcgtttatccgtatgtggtgccgcttggcagcgacgatttaccctctgtggccgctccttacatcattttctcgataccgactgatgttgccggggacgtgttctgtgggcaggccgaatccacgctgcacattcaggtagacgtgtgggcagaaactaacgatgaggcaagggcgttgcggcttgaggtccttgcccggcttgaagtgctttctcctaccgaggtgacaaaaatccccggctacgacactacaactcacctgcatcgggcaacgcttgaaataaccgtcattgcctga

SEQ ID NO: 207809 - DNA, 465 bp, Klebsiella oxytoca
atgctgtctctcgcgttgttgctcccctgctcgttgcggcggcggcatcgaacctccaccagaccgggagaagacagatcaaaacgctctgtaaaaccgaggccattaacgtttttaagcgcgtacaccccctgcttactcgtccaccctgatccggaaccatatacgcggtactggatttcatactcgacatggcgaacccgcttattcccgttgttctggaatccgcaaattccgtttgggaaagcaaagttgacctcgaaggcgtccacaacttcattttgcggggaggccagaaaggggccgagccatgtttcattatcgttaataccagacgcggcaaaatccacgacggtacgggtgaggaaacctgcccaggtattatcaacgacaccattaaccaccctctgcacggttgcagacgcaccgtcagtcgatgctatctggtattcgttgccacggtga

SEQ ID NO: 207810 - DNA, 822 bp, Klebsiella oxytoca
atgaatcatgcatatagaaaaggtgaactgtcactgccacattatgcaatatcactattgatcagtcttacaggtagaagacctcagcagttagttatgttgaaatataaagaccttcttcaaaagaacttagataatggcaaagtagaatatgtaatttcagtgccacgagtaaaacaacggggtaaagaactacgatatcgagaacttgcaataatatcagaggttgcatcaattgttcaattgcaagctaatcaatcagtgaaacttgttgagcaagctcttggaaaaactcttgatgattattctaaacgagaagttcctattttcttaaatgaggaaaaactctcagatttatccataacaggttcaattcttctggaatataataaattatatgcgaagcctacaattgctaatgtagcattgaaaagtattgttaataatgggaatgtaatatccaaccgtaccggttcgatactaaatattactcctcgtaggcttcgttatacaatagcaactatgctggctaagaatgggcataatgttaatactatagctgaattattggatcattcatctacttcaagtgcggggatttatattaaaaatcatgctgacagtgttgaaaggattgattccgctgtttcagaacaattgtcatttgtcgctgatatttttatgaacggaatcaaatcgaaaaagagtagtcatttcaaatttttttcttcaagtagatgccagagtcagaattcaggatttccttgcaatcaatgtatgttttttattccgattgatcgcagtgaggtgaatcaactatga

SEQ ID NO: 207811 - DNA, 1002 bp, Klebsiella oxytoca
atgaaaattggtgtcttcgttccgattggtaataacggctggctgatttccacccatgctccccagtacatgccgacgtttgagctcaataaggctatcgtgcaaaaagccgaacactacggcttcgatttcgcgctatcgatgatcaaactgcgcggcttcggcggcaaaaccgaattctgggatcataatctggagtccttcaccctgatggccggactggccgccgtgacttcacgcatccagatctacgccaccgccgccaccctgaccttgcccccggcgatcgtcgcccgcatggcctcaaccattgactctatctccggcggccgctttggcgtcaatctggtcaccggctggcaaaagccggagtacgagcagatgggcatctggccgggcgatgactattttgccagccgctatgactacctcaccgaatatgtccaggtcctgcgcgacctgtggggaaccgggcgcagcgacttcaaaggcgactacttcaccatgaatgactgccgggtcagcccgcagccgtcgcagccgatgaaggtcatctgcgccgggcaaagcgatgccggtatggcgttctccgcccaacacgctgactataacttctgcttcggtaaagggtttatggtgattgccgacgaaaccgacgaggcagcccgggccaaatgggagcattacaaagccggcgcggatgacgaggcgctggcgtggctgacggaacagagccagaaagacacccgttccggcagcgacaccaacgtgcgccagatggccgatcccacctcggcggtcaatatcaacatgggcactcttgtgggctcctacgccaatgtcgcccgtatgctagacgaggtggcggcggttcccggcaccgacggcgtgctgctgacgtttgatgatttccttatcggtatcgaagcctttggacagcgcattcagccgctgatgcgctgccgcgaccatattgccaccatgactcaagaggttgcctga

SEQ ID NO: 207812 - DNA, 291 bp, Klebsiella oxytoca
atggacgaatactcgccaaaaagacatgatattgcgcagcttaaatttctctgcgaaaccctgtatcatgactgtcttgcaaacctggaagagagcaaccatggctgggttaatgacccaacctcagctctggtgactcagcttgacgaatatctggatgacactttcgtgttgttcagcaactacggcattaacactgcagatctgcagaaatggcgtaaatcaggcaacaggttattccgctgctttgtgaacgccagtcgggaaaacccggccagtctttcttgttaa

SEQ ID NO: 207813 - DNA, 537 bp, Klebsiella oxytoca
gtggctcggcacgccaatacccgcatccacgaccaccggcaccgtggcctgttcgataataatctccagcattgctttggtttccagtccctgattggagccgatgggcgcgccgagcggcatcaccgccgcgcagcccgcttcttccagacgtttacacagcaccgggtcggcgccgcagtagggcagcacgacgaagccttcccgaaccagaatctccgccgctttcagcgtttcgatcggatcggggagcagccagcgggcgtccggatgaatttccagtttcagccagtgggtgcccagcgcttcccgcgccaggcgggcggcaaataccgcctcttccgccgttttggccccggaggtgttggggagcaggctaacgccggccgccagcagcggcgcgaggatggcgtcattatgctgacgaagatcgacgcgcttcatcgccagcgtcaccagttggctaccggaggcgcgaatggcctccaccatgacctcgggagcggcgaatttaccggtgccggtgaagagatgtga

SEQ ID NO: 207814 - DNA, 135 bp, Klebsiella oxytoca
atgatgagtttgaagctactcaaaatgcacgctttggcttccgtggacgtgtggcatccgctgaagttacacagctttatctcggtaaaaaactccctgatgaccttagaaagaaaggggctatgtctcctgtga

SEQ ID NO: 207815 - DNA, 255 bp, Klebsiella oxytoca
  misc_feature (36)..(45): n is a, c, g, or t
atggattttgaagaaattaaaagaatgtattacctnnnnnnnnnngtattaccttgcatcaaaaaaggtattttttctcataaagaaccttttaaatggttcattattcactatgatgaacttactgctgataaaaatataaaagattttgtggacctctggattgaaagtgataagtgcaaaattgttcacagattgaatttcgaaaaatacttttctaaagattcaaatgtactaaattttttagataactag

SEQ ID NO: 207816 - DNA, 597 bp, Klebsiella oxytoca
atgactggtgtcactcgtcaggtcggtacggtcagtgccgttgatgccgacagggttcaggcccgcgttcgtctgcctgaatgcgataacctgcgcacaaactggcttaacgtgctgcagcgcaatacccaggataacaaagattactggctccctgacgtgggggagcaggttgaggtgctgctcgatgccaacggcgaggatggtgttattctgggcgcggtgtattcagacgtcgataaaccaccgttcagtgacaaaaatatccggggaacccggtttgctgatggtgcagagtacagctacaaccggaagacgcacactctgaccatccggggcggcattgagcatattgtcattgagtgtggtgctgatgtggtattgaaaacacagaaagccacgattgacgcaccagaaaccgaacttaccggagatctgcgtgtcaggggtaagctgatttacgaaggaggcatggcgggttctggtggtaaaggtgttaccgcgaccatccatggcaatatcgagattaaagggaatgcccactccacaggtagcatgctgtctgacggccagaactctaatcaccattcccactga

SEQ ID NO: 207817 - DNA, 1155 bp, Klebsiella oxytoca
atggctgagataaacagcactgcgcaagtcacatcagcgttaaccggcgtcagcgatgtgctgacaccggtgttcactctgtggtatctgcagaaaaacatcacctctgatatcgcgccttatgtcacccgtgtgacctggagcgataacatcaaaaatgagtccgataccattgaggtggaactggacgacaccgatggccgctggctggataaatggtatccgggcaagggtgacacgctgacgctgaaaatgggctatcagggcgagaagctgctgtcctgcggtacgttctctatagacgagatcgaagtgagttcgcccgcttccgttgtttctatccgtggggtggccacctcggttaacagtgccctgcggactaaaaccagtcgtggttttgagaacaccacgctggcggccatcgcgggaaggattgcccgaaagcaccggctgaaactggtgggcagcattgagaccatcagaatcgaccgggtgacccagtatgctgaaaccgacgtgggttttctgcgccggctggccagcgagtatggttatgcagtgaaagtggtcagtgaccagctgattttttctcatctggccacactgcgcagtcaggagccggtcaggcagttaaaaccgcaggatgtggcccgcttttccctgcgtgacaccatcaaccgggtctataaatctgcaaaggtaaaacaccagaaaagcagcagtaaaaaactgatcgtctacgaagctgatggtggcacccgtgaaagcgacaaaaagctcaaaggtggtaaggttaccagcgctgactcacttaaagttaacagccgcgtcagcgacccggacagtgcccggattaaagcggattcagcactggccagacataacgaataccagcagaacggctccctgacgctgacgggaacacctcaactgacagcaggcaacaaaattgaactggtgggttttgggcagttatccgggccatggctcataaccactgcccgccatgcgtttgaccgtaacagcggctacaccacagagctggaagtggcacgggggccagtcacaagagggaaaaaacaaaaaactcagaaactcacggtttatcacccggatggcagtacatcgacggtgattaaggagaagaaaaaatga

SEQ ID NO: 207818 - DNA, 885 bp, Klebsiella oxytoca
atgtttgccgtactgggtgatattgagtttgagctgattacctactgggacggcttcgaggccacgttcggcgtcgattatgcggagcatgcccgcatcgggggtaagcctggcctgcagttcgtcggcgacaggctggacgaaatccagataactctggttttccatcagcattattgtgtacccgacgtggagctggcgagactgcgaacagccatgaaagcccatcaggcactggcgctggtcttcggcaacggtgactatcgcggctggttcgtgattaccgatgtgactgcaaccagcgagcagactgacagtaccggcaacgtgctggctgtcagtgccaccgtgtctctccgggaatacaccggtgacccgaaaaatcctctgcaaccaccggcaatacgcacgaagctcccgggtgtcggggcggtctccggtgccattccttcaccttcaggggtggcgcagttcatccgcaacggcgtcaactatgcgaaacaggcgcagtctgtactccagaccactatcagcgccgttcgggtgacacagaaaatgaaggataaccccgttgtcgcactgatccgtgtgccggggctgatgagcggactgggtaatatctccggggctctggggaaaagtgttccggcgtttaacgcactctctgaatccatgcccgatgccatcagtctggccagaacagccagcgaagcagccacgtatgtacagcaggcacagtctgcgctgagtggtgtggacaaaagaaatattgcaggtgctctggataccgtttccgggcagcttaacgccgccggcacagcattcaaccgcatgtctccgggattaagtgcaatggccgccagaatactgacgaggagtgtgtga

SEQ ID NO: 207819 - DNA, 2952 bp, Klebsiella oxytoca
atgtcgggacagttttcagtcggcgttgttatcggcgggatgattggcagcacattccgttctgcaatgagcggtacccgccgtgcgcttgattccctgagcgatacctcacgccgcctgcaggaacgtcagaacgctttaacccgtgcaacagaacgttatggtcaactgggttcttcccggatgcagcatctcaacagcgagctgctgcgggtaagccgcaccatggagcaaattgagcgccagcagcgccgtctgtcagcggcatccgctaccagtgatgcgctgaaagctaaccgcatggcgctgtatggtcaggggattgaagcatatggcatggcacagactgtttatcatacggtttcccctgccgttcagcagtccatgtcttttcaggacaaaatgattgatatgtcgatcaccgcaaaatatgacaataaaacgcgggatgcacttgccggacagataaaaggctgggcgcttaaatacaatcagtatcaggatgagctgcaggaggcggtgggttcgctcatcagcgacaatattgataacttgtcagatatcggttttctgatgccggatattgcccgcgcggcaacggcaacacgcacgtcatctcaggactgggcaaaagtggccgcagtctggcaaaactccctgaaaggtgccgccagagattttggtgccgttcagaatattatggcttatgccggtgaccaggggtcatttgaaatcccggatcaggtcaaatggatgcagtccctggccccaatgatggcgggcgttgccagtggaaaagaggctgttgctgaaatcggagccagtctccagatagcaaaaatcggtgcaggttccaccgacgaagcagccaataattttaaaaactttcttaccaaaatttttgcccgcgatactcagaaacagtttgctgatctgggtattgatttgcagggatctattgcgagttataaggctgcggggatctctccgattgaagggatgttgagtgttatagaacgttacctcaatgccaaaagccccgaagcgctggccggcttcaaatctgccatgaaaataaagaatgatacggcaagagatgaggcacttcaggctctggcgaaaaactttggtctgggtgatatgttcgcggatatgcaggtcatggcatttatccgcccgatgctggccaacatggacagatatcgcgagatccgcgccggtgctctcagggctgcggataacgatttgcttgccagtgcttatgatcagcggctgaaatctccccttgaagccactaaagcacttatggtcagcagtcgcgatctggctattacgctgggcgatcaactcgccccctcttttatttctctgactcaggagttgatcccactcattcaggggacaaaacactgggtagcgactcacccgcaatttgtcagtggggcttttaagctcatcagtgcgctccttgcgattaagatagcgactgttggtctcaaactggggctgaatctccttatttccccctttgtgaacgtctggaaaactgctgttttacttcgggccaactggcttcgtctgtcgctcgcactggggcaaggcggtaagctccgctggctggtgaccggatttagcgccgtcgccagaggagccagaacactgagtggcgtgctctccggggggctggttcgcggaattatgctcgccggacgtgctgttctctggattggacgtgcgctgatgatgaatcccatcggtctcgttatcaccgctgtcgcggcagcagcttaccttatctaccgcaactggggggcagtcagtggctggtttaaacagcgctgggcagacattcaggaagcctttaacggcggcattgtgggaactggtaagttgctgattaactggtcgccggcaggcctgctctataaagcctttgcggctgcgctgaaatatttcggcgttgctctgccggcaaagttcaccgacttcggtggccatcttatcgacggtctgattaacggtatcaaaaacaaatgggggtcgctcaaatccagtgtaaccggaatgggtgacagcatcagtagctggtttaaacagtgctgggctgacattcaggaagcctttaacggcggtatcgcgggaactggtaagctgctgattaactggtcgccggcaggtctgctctgtaaagcctttgcagctgcgctgaaatatcttggtgttgatctgccggcaaagttcaccgacttcggtggccatcttgtcgacggtctgattaacggtatcaaaaacaaatgggagtcgctcaaatccagtgtaaccggaatgggtgacagcatcagtggctggttcagcgaaaagctgggcattcattcgccgagccgcgtgtttatgggctttggtgacaatatcgcgcagggggccgccattggcctgcagcggaccactccgcttgcagctctggccgggcagcgaatggccagtgaactgctccccagaatgcccgtgagcattcaggggccagaaatacgggataacacttcaggtgttcgcttcagtatgccgttgcccgatatcaacgggtttatgtcgtctgctaaaaatgcgatcggagccgtaatcaatagtttgtcttccatgcccgttattccgctctccacccgggcatcggttttaccagggcaacgtctggcaaatgagatgacaccggatgttccccgtatcccctcgcctgaaatcctggctgccggatattcaggccgtggtgcagctgcaaccggcggtggaacgtctggtggtatccaggtcagctttaatcctcagtttttcctcaatggcagggaaaccacagcgcctgcaggactgactggtgccctgaatatgagtctgcatgagctggaaaaaatgctggagcgtctgctggctcagaaacaacgtaaggagtaccgctga

SEQ ID NO: 207820 - DNA, 336 bp, Klebsiella oxytoca
atgtcacagacccagtccgatacttttacgctgtcttatcccttcaccactgctgccggtaccagaattgagcaggttgaactgaaacgcctgacggtaaaagacctgaagcaggtgcgcaaaatcagcaaaaacccggcagactgggacgaaccgctgattgcccgcagtactggtcttctcccggaagatctcgacaatatggacctggctgattacctgcagttacagaaacgatttcagctcatcacggggatgggtgagagcgacaaaggcgctgacgcaggcgcaggggctgctggcgagatggttccggtttcagccgggggagattga

SEQ ID NO: 207821 - DNA, 1428 bp, Klebsiella oxytoca
atggcagctaactatctgcatggcgtcgaaaccattgaggtggaaaacggtgcccgcccggttaaaacggtgaaatctgccgttattggcctgattggtaccgcaccaatgggggacgtcaatacgctggtgcagtgcctgtctgagaaagatgctgctgcgtttggcaaccagctcaccggctttaccattccgcaggcgctggatgcgatttatgaccatggtgcaggcaccgttctggtcattaacgtcctcgacccggcgaaacataaaacggcgatcgaggatgaggtggttacctttgacaaatcgacagggcaggccagactggcgcatccggttgtcgctaatgtggtggtgaaaaacagtgaaggcagcaccgcccacacggcgaacacggactaccgtgttgatgcgcaggcgggtgtgctcacgaacctgggcaaggctattgaagccggtggcagcgtgaaggtgagctatgagtacgcggacccgtcgaaggtgactgcggcggacatcatcggcggggtgaacagcgccggaaaccgtaccggcatgaagctgcttaacgacagctttaacctgtacggctatttcgccaaaattctgattgcgccagtgttctgcacccagaagagtgtcgcagttgagcttatcgccatggcagagaagctgggcgcggtaacctacattgatgctcctgtcggtaccacctttgcacaggctctggcaggtcgtggcccggaaggcaccatcaacttcaataccagctccgaccgcgtccgtctgtgctatccgcacgtcaaggtgtacgacgcggtcaccaacagcgaacggctggagccgctgagccagcgtgctgcaggtctgcgtgccagggtcgacatggacaagggttactggtggtcgtcctccaaccaggagattctgggtatcactggtgtggagcgccaactgtcagcaatgattgacgacccgcagagcgaggtgaacctgctcaacgaacaggggatcaccacggtattcagcagttacggcagcggccttcgtctgtggggtaaccggacggcagcatggccaacggtcacccatatgcgtaactttgagaacgttcgccgcaccggtgatgtgatcaacgagtccattcgttatttcagccagcagtacatcgacatgccgattactcaggcgctgattgatgcactgacggagtcggtcaacgcctacggtcgcaaaatgactggtgatggtgcggtactgggcttccgttgctggtttgatccggcccgcaatccggagacggagctggccgccgggcacctgttgcttagctacaaatatacgccaccaccgccgctggagcgactgacgtatgagactgagatcacctcggaatacctgttaaccctgaaagggggcaactga

SEQ ID NO: 207822 - DNA, 252 bp, Klebsiella oxytoca
atgaaagaataccgctattccggcccggccagcggcgtcacgctgtcggacggaaccgaaatcctgctctggccggggaagacggtttccctgccggaggagcatgactacgtgaaggtactggtggcgctgaagcatctgacgccggtacctgaagagactaaacccgccgtcacaccggctgtgcagtcaccaaagcgcagaagcagcagtgacagcgaagtgaaaacggaggactcccatggcagctaa

SEQ ID NO: 207823 - DNA, 447 bp, Klebsiella oxytoca; identical to SEQ ID NO: 5804

SEQ ID NO: 207824 - DNA, 339 bp, Klebsiella oxytoca
atgggaaccactcagcaggtcattctgatcacaaccgtaacggcaggggccgcactgacacagcagcgttttgtcggggcagataataccccctgtaaagccggtgccgcagcgctcggggttgccgaagtagatgctgttaccggcgacagcacgccggtgagcgttctgggcattattgctgtcgaggccggggccgctgtcagccgtggtgtggctgttcagtcagatgctcaggccagagccgtgccgcagtccggcgacggtaaatcctgtggtattgcacttgatgaagccgagggtgaaggcgacgtcattcgtatcctgcgcggggtgtga

SEQ ID NO: 207825 - DNA, 954 bp, Klebsiella oxytoca
atgtctgattacttaaaaggtaaacgtgtcgttgatccggtactgaccagtatcgcccgaggctataaaaatgccgcattcattggcgaacgtattttccccgtcgtgctgacggacaaggaaggcgtgcgtgtgccgaccttcgggaaaaccgcctttgtggaatatgacaccgagcgtgccgtcggggcagacagtaatgttctggtccgtgagaaaaccggcacgcttgatctggtgctgggtgagcacgatctggctgcgccggtggactatcgcgagcaggcggagtccatgtttaacgaggagagcaaggccatccgtcgcgccacgaatggcgtgaatctgcgccgtgaacttatcgccgcccgtctggctcaggatgaaaaggtctaccgtaccgggcacgttaaaaaactgacagccagtgatcgctgggccggtggtaagggggaccccatcagggtgattgaagccggtatggaagcggtccgtacggccacggggctgcgtcctaacctgatgaccatgggtgccggcgtgatggcgctgctgaagttccacccggcgattcaggctgccatcggagccaacgaacgcaagcgcatcaccacggagatcctgcaggacctctttcagatcgaagagatcgtcatcggtgcccctgtctccctgccgtccatgaaagcggcgatggataaggacagcgtgccggcggatatctggggagataatctgatgctgcactatgtcggcaaaccacagccgggggcggacagcgcggacgagaacgagccgtccttcggctacaccctgcgtcgtaaggggatgcctgttgctgacaaatacgacggagccggcggcaaggtgaagtactgccgttataccgatatctacaaagtcgccgtggttggtggcgatgccgggtatctcattaccggtatcagtaaataa

SEQ ID NO: 207826 - DNA, 1116 bp, Klebsiella oxytoca
atgtcagccattcacatttttaaagccggtactcataccgatatgcacggcaaaaaactgccgttcacgccagacgatcttgccgcctgcgtgaaagcctatgacccgtccgtccatgaagcaccactcgtgattggtcatcccagaacggaagacccggcgtggggctgggtgaaaaccctgtcgctcagcggtgtcgatctgatggcagagcctgcccagctggatccgcagtttgctgagatggtcaccgacggacgattcaaaaaagtgtccgcctctttctatctcccggattcaccgtccaatccgaagcccggcgtgctctaccttcgccatgtgggctttctcggggcacagccaccttccgtcaaggggctgaaacaggtgtccttcagtgagcaggaagaaggtgtggtggagttcgccgactggcaggcaatcacgaatgcctccctgtggggaaagctgcgcgattttctgatcgcccgcttcagtctggacgaagcagaaaaagtcctgccggaatggcagctcaacagtctgcgcgaagaggcgtaccgcgacacactgtcgcaggatgcagcaggtgcacaattcagtgagacaggccaggtgccgtcttccgcaagtaacgaggaatcatcgatgacaaaagaagagattgaagcccttcaggaggagaaccgccgcctgaagcagcaggctgctgatcgcgatgcgcgtgatgcacaggtcagacaggagcaactgcataaggacaatgtggcctttgcagaaaaactggtcgcagagggccgtctggctccccgcgcctcctccgtggtggttgccctgctggatgccgtcgccggtggcgacaagccggtggagtttgctgagggggaaagccgcacgccgctggccaccgccttccgttcattgctctccgacggggagccggtgatgaatttcgccgaacaggccacaaaagagcgtgtcggcgacacggtgaaggtggatgtggcggagtttgcggaagccgatcctgagcgtctggccctgcatcagaaagcagtggccctgtcgaaaaaagaaggcatcagctatgaggctgctgtcgcacgctgcctgtaa

SEQ ID NO: 207827 - DNA, 1494 bp, Klebsiella oxytoca
atggcaaaaggtatctgggtttcacccgatgagttcgtggcgttcaccgaacccaaaaaatcactgaccgcgcagattgcctcgcgcagtcgcgccatcgacttttacgctctgggaatgtacctgcccaaccctgatcccattctcaaggctcagggacgggatatccgtatctaccgcgaactgcgcaccgacccgctggtcgggggctgtatccgcagacgtaaagcagcgctcaaatcactggagcgtggactggagcgcggtcacgcttctgcccgggtcttccgtttcatccgcgacatgctcgacgatctggatctgtcccgcatcatcggtgagatgagcgatgccgtgctctacgggtatcagccctgtgaaatcatgtggggccgttcggtcagggcgtgggcggtgacggatattgtcggcaaaccgcctgagtggtttcagtttgatacggacaactgcctgcgcttccgggcgcgtgatgcgggtgtggagggtgagctgctgtcaccgtcaaaattcgtggtgccggcacaggatgcctcgtatgacaatccttacggtttccctgacctgtccatgtgcttctggccggtcgccttcaagaaaggcgggatgaaattctggctccgctttgccgaaaagtttggctccccatgggtgatcggtaagcacccgaggggtgcaaatgatgcagagattgaaaaactgctggactccatggagcagatggtggaggacgcggtggccgccatccctgatgacagcagcatcgaactcaaagcagcggatggcaaggcggacagcagcgaggtattccgcgagctgatcacactgtcacgcagtgagatctccattgcattactcggtcagaatcagaccacggaagcgaacagtaacaaggcctctgcacaggccgggctggaggtgacggctgatatccgcgatgcggatgcggacatcattcaggcggcagtgaatcaggttatcagaacggtggtcaccctgaacttcggcgatgtgccgtgtccggtctgggccatgtgggaacaggaggccattgatgacacccgcgccacccgcgacgaaaaactcacccgggcgggtctgcgtctgaccccgcagtacttcatgcgggagtaccagctgcaggagggggatattgacctctctgatgcaccggttgcggacggggcagtgcctgcggagtttgccgaggcgataagcgccgatcatgatgcacaacagcagcttgacgacgcgctggacattctgatgaacggaggtgtgttaaatggcacgctggaccccgtcctggcacctctgtttaagcgggtcgaaaacggggttaacccgactgagctgctgggcgaactggcggagctctaccctcagatgaacacggacgatctgcaggaacggctggcccgcattctctttgtggcaaatatccgggggcgtctgcatgagcgtgacaacggctga

SEQ ID NO: 207828 - DNA, 1317 bp, Klebsiella oxytoca
atgacagcggccattcagctgtatccctaccagcaggcgtggtttctggatcgtgcccgtttcaagattggcatgtttgcccgccagacgggcaagacgttcaccaccacgctggaactggttgatgactgttttgaaacagaggcatcagggggacgcactcgctgggtgatcctatcgcgtggggagcgtcaggcaaaagaagccatggtggagggggtgaaaaaacactgcagcgcctaccggatggcggcccgtgaggtggaaagttattaccgtgctgaaagcggcgaacgctacaccatgcttgaggtggagttacccggtggctcccgtatcacggccctgccggcaaatcccgacacggcacgtgggtttgcggctaacgtctttctggatgagttcgccttccatgccgacagtcgcaaaatctggaccgccctgtttccggtcatttccaacggctacagactgcgtgtgacatcgacgccgaacggcaagggaaacaagttttatgaactgatgaccagcaacgcccttgaaaatgtctggtcacgtcacatcgtggatatttaccgtgccgtgcgcgacggccttccgcgtgacattgcacagatgcgacaggcgctcaacgatgatgacgcctgggcacaggagtttgaactgaagtggctggatgaggcatcggcctggctgacgtttgaactgattgacggcgtggagcacgatgctgccggactgccggtgcactatacgggtggcccctgctttgtgggggtggatattgctgtccgtaatgacctgtttgtgatctgggtgcttgaacaggtgggggatgtctactggacccgggaaatcatcacccgtaaacgggccacctttgctgagcaggatgctttgctggatgacgtatttttccgttatcgcgtgctgcgctgctgtatggatcagacaggaatgggggaaaagcctgtggaagatgctcaggagcgccacggcaggagtcgtgtggagggggtgatatttaacagcccgaacaagctcaccctcgcgacccgtggcagggagatgtttgaggaccgccgcctgcgtattccggcgggagatgtggtactgcgcagtgatctgcataaactccgtaagatcaccggacctaccggagcgcctcgctttgtggcggaaagtgatgcagcaggtcacgccgaccgtacatgggcctgttttctggctattaacgccactgacggaccgtcagggccggtggtggcgcgttcgcgccgccgccgtgaagccgcccgcatgctggagggattctga

SEQ ID NO: 207829 - DNA, 549 bp, Klebsiella oxytoca
atgggacgtcgcagcagcattgattctctgccgacggaggtccgccgctggctggagcgggcactgacggagaataacttcagtggatatgcccggctggaagccctgctgaaggagaagggatacgtcatcacccgctcttccctgcagcggtttggctacaaaatggagcgacaactggcccgcatccgcgccgccaccgaggccgcgcgtctgatggcacaggaagccggtgacgaggcggacgatcgttctgccgggatgatggcactgattcagaccgagatgctggatgttctgatgcgtctgcaggaaatcggggaaaatgatgaccctgcaaaacgcgcaaaactgctggccactgcttcggaaagtatagccacactggtacgtgcttcggtgacccacaagcgattccgggccgaggttctggcaaaaattgaggcccggatgaatgctctggaaaaacaggcgaagtccggtgacacccgcctgagtctggaaaccctgaagatggtgcgggaacagatttacggggtgatctcatga

SEQ ID NO: 207830 - DNA, 651 bp, Klebsiella oxytoca
gtgtggcatctggttaaaaagctgccgtggcgcggcattctgctggccattcttatcaatgcctttctggtcggcctgtatgccatgggatacagaagtggtcatgactctgcaaagcgtgacggtgataccgcgctcagtcagttgcagtcagcatttgacgcgtacaaaacggagcaggcaacgcttgagaatgctgcgctgcgggcctgggccagacggtatcaggagcaggtggctgccgggcagcgggctgaagccggttatcttgagcagattgctcaactggagagccggaataaacaactacaggggcaaattaacgatgtcacacagcgctggattgatgaaaaaggtaagagtcatcccattgagtgcgtgtttactcgcggtttcgtgcgccagtacaacgccgcactcggatatgacaacgcatccgtcgacaccggtcattcagactcagttgccgccactggcacccgctctggcacagcgaccgggcaacctgaaaccgctgacgcccggttacgcaattcgggtgtctcccagcgtgacgtcctcgccaacatcatcgacaacgcagggcaatgtcgtcgctggcgaaaccagataaacgcgctgctggatgaacgggaaggattacagaaatga

SEQ ID NO: 207831 - DNA, 729 bp, Klebsiella oxytoca
atgacgcagacactgaatccggtcatcactgtcaccgtgtccggtcctgtgggcagcggtaaaagttacgtactggcgcggatagaggaagtggtgaaacaggaactcggaaacagcgtcattgtcgatgccgcagacgtggacggtgagcgccgtatgagtggggatgatctgagcacatggcagaaaccacgggctggcacagtgatcaggctggaggaatacacgggacagggcctgttgtcatacggcgaggagcgtatctgtcggacgaatgagctactggatgttatatgccccacgggccggcaaccctggatactgcccgatgccctgcatgccaccattgcggcactgatgacagtttacgatcaggagctgctcatgaaggagttacgtaaactcactggtcagtcaacagaatgttgttcgtccccgaagtacggcaaacaggaacacatcccgattaaccagcctccccggttcttcgacgaataccttctgacaccggaaaataaagctgagcatgaagagatcaaagcggcgttgttccgggaaatcaggaagattgctgaaatgcaactggagggcgggctggacagagtgatggcgagaggagaatgggcatcgctgtttgaaagagtttccccggaattacttcccctcgcactggctatcgggattatgcagacagcagataaacctcacttacgttcattaaacacgtaa

SEQ ID NO: 207832 - DNA, 402 bp, Klebsiella oxytoca; identical to SEQ ID NO: 7239

SEQ ID NO: 207833 - DNA, 153 bp, Klebsiella oxytoca; identical to SEQ ID NO: 27715

SEQ ID NO: 207834 - DNA, 624 bp, Klebsiella oxytoca
atgtttgatgcatccctgctgaatctgccgtgggcaacactggtgacactgaccagtggatacatcggctattttattgcgaacgtgggcctgaaagaccatcacaagcccatcgaggtgacatttacgacgctgatttttggcctgctgtcaatgatggtttaccaggctgttatgtgggcaggtctgaattcgtggcttgcgacaccaccagcgcttctttgcgcttttatttacggtgcattgtggcgcagatacggtcgcaaatggatgtacagattcctgtggaatcatgatatttcgtggtctgatgacaccagctcagcatggcagtcattgttcaatcagatggatttcactttttctgaaatctatgtatatcttaaggatggctctgttttactttcacgagcacccgggcgatttgcaggacggcctaacggtcctgtcacgttaggtaataagggagatataatcttatacgtcacgcaccggactacagtcgggagcaatatctggacagaatgcgatagtggtgtggcagatgacggatggggaactctggcaacctatatacctgcagaacagattgccagagttgatatccgacgagtttgtcggtaa

SEQ ID NO: 207835 - DNA, 243 bp, Klebsiella oxytoca; identical to SEQ ID NO: 31607

SEQ ID NO: 207836 - DNA, 450 bp, Klebsiella oxytoca
atgcagaaaaaacgcctgatacagcttatccatattgcccgtaatgaactgggtatggatgaagacacctaccgccagatgttacaggggctgaccggtaaagcctcaaccaaaggaatggataccacacaactaaactgcgtgctggaatccatgaaaaagaaaggctttcgcgttaaaccagccagaaaagccagctccggtttaccgctggataaccatccgcagtccaggaaaattcgtgcgctatggcttgaaatggctgctgccggcattgttcgtgaccgttcagaaaatgcattagcgaggtggatcaagcgggaaacgggcatcagcgccctgcgctggctcagtactgaacaggcaagcagtgttattgagaaactgaagaagtggcagcacagagctgcgggagtcaaacatgagcgacctgaatcagtttcgaagtaa

SEQ ID NO: 207837 - DNA, 207 bp, Klebsiella oxytoca; identical to SEQ ID NO: 5835

SEQ ID NO: 207838 - DNA, 231 bp, Klebsiella oxytoca; identical to SEQ ID NO: 5834

SEQ ID NO: 207839 - DNA, 684 bp, Klebsiella oxytoca
atgacagaccagaataaacacattgagaaattgaaaaagttgctggcgctggccgcatccggcaacccacacgaggccgctctggcactgcgccgtgcccgtaaactgatggatgttcacggcatcacacattccgacattgccatgagtgatattgatgaaaccatcagtcattactggccgacaggcagtctccgtccaccgcgctacatgctgggcctgatgaacatcatccgcgaggcatttggtgttaactccatcattcaccccggcacatatccgggtgtggggttctacggcaaccgggaacgtgcggcactggctgcatacacctgggaagtgctggcccgtcagctgaaaaaggcgcgtcagcagtatatcagcacacagaacaaaagaataaaaactgccacccgtaccagccgtggtgaccagtttgctgaaggctgggtgctggccgttatcagtgaaatacagtccttcgccctgaccgatgacgaacgtgaactgatgcagcagtggctggaacataaatacccgcaaacgcaaaccaccagagcgcgtaaaccgggaagaagccgcaatggcgacgcctcgcgctatgcggggtttcgtgaagggcagaacgtcagactgcaccgcccggtcagtgggcaggcacaacagaaactggaggccagatga

SEQ ID NO: 207840 - DNA, 306 bp, Klebsiella oxytoca
atgacacggaacaccatactcacacgcactgccctctatcgtctggccctgcagcgtttcgggccggacgcacaggccctgaaactgacagaagaggccgctgaactggcggccagtgccgcccgcaacctgaacggacagggcagcgaaagtgacctcgcggcagagctggcagacctggaaatcatgacagagcagttgcgccttcaggggatgggccggctgattgacttccacaaacagaaaaaactggaacgccttgccgcacggctgggcgtcatgtacaccggagatactgaacaatga

SEQ ID NO: 207841 - DNA, 273 bp, Klebsiella oxytoca; identical to SEQ ID NO: 30912

SEQ ID NO: 207842 - DNA, 195 bp, Klebsiella oxytoca; identical to SEQ ID NO: 31617

SEQ ID NO: 207843 - DNA, 393 bp, Klebsiella oxytoca
atgaatgacgccattggcgatatcaccgcacgttatgccccgctcaccgagagcctgaaaaaacgcatggccgaactgcagtccggtattcagacatggtgtgaggcacaccgtgatgaactgaccggcaacgggaaggtgaagtttgctaacctcaccaccggcgaggtgcagtggcgaaaccgtccgccgtcagtcagcattcgcggagcggataatgttattgaactactgagacgtctggggcttgagcgctttattcgtgtaaaagaggaaataaataaagacgccatcctgaatgaaaaagaggccgtgaaaaatattcccggtattaccataaaaagcgatattgaggatttttcaataattccttttgagcaggatgtgcagtaa

SEQ ID NO: 207844 - DNA, 270 bp, Klebsiella oxytoca
atgaaatccaccacaggtatcaaccagcaaatcagcaaagtgcagtcagccattatggcgcttaaggcgacgaacacggatgtacaaagcatcaccatcaggggtaacaaacctgtcatccgcgtttcccggagtgcgcattgcatgcgcatgcttgagcagggaaaggcctgttatctgtataccggacatgacaacaggggacgtttccgtcagggcgttttcgaactgcacggctgtcgcgtcgtgtggccggaatctttgtggtaa

SEQ ID NO: 207845 - DNA, 318 bp, Klebsiella oxytoca; identical to SEQ ID NO: 7266

SEQ ID NO: 207846 - DNA, 921 bp, Klebsiella oxytoca
atgggacgtaccaaatcaccgattaacactgaactgaacgccgatgtaccgctgtcggatgatctcaacgtcagcctgaatgccatgacacagcatcgcatggagatcatgcagcagtttggtgatggactgccttatgaacgtgaacgcatcgttcacgaagcacgtttttatatggcgcagagtgctgaatctatgttggaagcgggtaagcggctgatcatcttaaaagaaaatgaaccgcatggtgatttcacaaatattctggaaaacgacctcggattagcaccacaggtagctcgtcgcatgatgcaggccagcgtgaaatttctcggcaatggagatgaacagccaaaacgctcagcgctgagcgttttgggaaaaaccaagttatatgaactgatggttctggatgacgaagaactcgacgcattagctgatggtggaaccgtcgccggtgcaacgcttgatgatattgatcgcatgaccagccgcgaactgaaggccgccctgcgtgaagcgcgcgaaaccaacgcagctcagcaacaggtgcttgccggaaaggacgaaaaaatcaacgaactggccacaaaactggagaagaaatcgcgcctgcaacctccgccgccagacgaagaactgaaaaaattgcgggcggaagtgacggcattagcggttgaggccgaatcggctatcgccgtccggctgtccagtgtttttgagaccctgtgtgaatactgcaccaaaaacatgatcgatacccccagagatttcatggccggtctggtctgccagattgaacgcagtgttcatgcattacgtgagacgtttgaccttgaggccgctccatcgggtaacgatgcccccgcctggctgaccgaaccggaacctgaaatcaaccgaccggaggatatgcagtaa

SEQ ID NO: 207847 - DNA, 309 bp, Klebsiella oxytoca; identical to SEQ ID NO: 7377

SEQ ID NO: 207848 - DNA, 189 bp, Klebsiella oxytoca; identical to SEQ ID NO: 7235

SEQ ID NO: 207849 - DNA, 198 bp, Klebsiella oxytoca
gtggattttcctgaagggaactactcgcggctggcagagctggcccggtgcatcagaggaaaaatgataatttcggtgaacgacatcccgcagatgcgcgaggtgttcactggactgaacatacagacagtgaatatcaactacagtctggcgggtaaacccacgccgcgccgtgaactgctaatctgcaacttctga

SEQ ID NO: 207850 - DNA, 198 bp, Klebsiella oxytoca
gtggattttcctgaagagaactacacactactcgcagaactggcccggtgcatcagaggaaagatgattatctcggtgaacgacattccgcagatgcgtcgggtgttcactgaactgaacatacagacggtgaatatcaactacagtctggcgggtaaacccacgccgcgccgtgaactggtaatctgcaacttctga

SEQ ID NO: 207851 - DNA, 189 bp, Klebsiella oxytoca; identical to SEQ ID NO: 31610

SEQ ID NO: 207852 - DNA, 309 bp, Klebsiella oxytoca
atgagtaagacgaatgtttcaagctccggcagtcgcatcctccgggtactcaaagcgctgcgcggtcatgccctgaacggtatttccaacggtgaactggcagcagcactgcacgagtcaccggcaaacatcaaccgggcactcaacaccctcattgaagaagggctggccctgaaactggagaatggacgttttgctcctggcatccagttactgcagatcgccatggctcacagtaacgagatggcacgagcgcaggatcgtattaacgaaatcaaccaacgtgtcatttcaggtagtcgtttgtaa

SEQ ID NO: 207853 - DNA, 912 bp, Klebsiella oxytoca
atgggacgcaccaaatcaccggttagcactgaactgaacgccgagataccgctgtctgatgatctcaacgtcagcctgaatgccatgacacagcatcgtatggagatcatgcagcagttcggcgacggcctgccctatgaacgtaatcgcatcgttcacgaaactcggttttatatggaccagagtgcggaggctatgctggaggcaggtaaacgtttggttatcctgaaggaaaatgaacctcatggagaatacgtacaaatcgtcaaagaacagttgaaccttgagccacgcatagcccaaaaaatggcccaagctgctctgaagtttttatctccagagctgacatcaaaagcgaaaacgttttcgcatttgggaagatcaaaactgtacgaattgatgttagaggatgatgaagaccttgccgaactggccgacggtggcacagttgccggactgacgcttgacgacgttgatcgcatgtcagtacgtgaattgcgtcagtctcttcgcgaagcccgcgaaaccaacgcagcacaacagcgcgtgctggccgacaaaaatgaaaaaatagactcactctccaccagactggagaagaaatcccgtattcagccgcctgagcctgacgaagaggtgaagaaactgcgggcggaagtgacagcgttagcggttgaggcggaatcagctatcgccgtccgactgtccagcgcttttgagacgctgtgtgcatattgtgctgaaaacatgattgatacccccagagacttcatggcaggcctggtctgtcaactggaaagcacagcgcgtagcctgcgctccacatttgacctgccggacgagccaacaggcgatgtcgcgccttcatggctgactgagccgacgccacagattaacgggctggaggcataa

SEQ ID NO: 207854 - DNA, 729 bp, Klebsiella oxytoca
atgacgcagacactgaatccggtcatcactgtcaccgtgtccggtcctgtgggcagcggtaaaagttacgtactggcgcggatagaggaagtggtgaaacaggaactcggaaacagcgtcattgtcgatgccgcagacgtggacggtgagcgccgtatgagtggcgatgatctgacgacctggcagaagccacgggctggcacagtgatcaggctggaggaatacacgggacagggcctgttgtcatacggcgaggagcgtatctgtcggacgaatgagctgctggatgttatatgccccacgggccggcaaccctggatactgcccgatgcactgcatgccaccattgcggcactgatgacagtttacgatcaggagctgctcatgaaggagttacgtaaactcactggtcagtcaacagaatgttgttcgtccccgaagtacggcaaacaggaacacatcccgattaaccagcctccccggttcttcgacgaataccttctgacaccggaaaataaagctgagcatgaagagatcaaagcggcgttgttccgggaaatcaggaagattgctgaaatgcaactggagggcgggctggacagagtgatggcgagaggagaatgggcatcgctgtttgaaagagtttccccggaattacttcccctcgcactggctatcgggattatgcagacagcagataaacctcacttacgttcattaaacacgtaa

SEQ ID NO: 207855 - DNA, 402 bp, Klebsiella oxytoca; identical to SEQ ID NO: 7239

SEQ ID NO: 207856 - DNA, 300 bp, Klebsiella oxytoca; identical to SEQ ID NO: 28343

SEQ ID NO: 207857 - DNA, 615 bp, Klebsiella oxytoca
atgagtaacactgcagttctggatgaaaacggtatcgccactgtagcgggcgatatcactgtatatcactatgacgaggaaacccgggaatacacctcatcctctgtggagtatctcgcccttggggtgggtactccggcacattcgtgcgccgatgcaccgccggaggcaatttcgggttacgtggtttgtcggactgccacgctgaacgggtgggagcatgtgcctgatcaccgcggcgagacggtatacagcacggagaacggtaaccccgttctgattacccaaccgggtgattacccggcggacaccaccacaaaacagccagccacgccatgggatacctggaacggtgaggcgtgggtaaccgatactgaacggcagcgagccgcagaactggaggttgccagacagcaacgccagcaacgggtgaaacaggcgatggcgtccgtcgatcttatcaacctcaaactgcgtgctggtcgcagtctgacaccagaagaaacggcaaaactgaacgccgtgctggattatatcgacgagctgaacgcactggatatcagcacggcacctgaaatcagctggccggaagcgccactggcacttgccagttga

SEQ ID NO: 207858 - DNA, 261 bp, Klebsiella oxytoca
ttgctttcatggcagaaaggtacactggtcggcggtcatgacgataacgattctttgcttgatatctcgtacatgagtaacggaaataatattgactatggcggcgataaggtgtttgcggggaattaccgtagcgattatttgtggtacgcaatgctgggtggaacaaacagtcgcgcaaaagccgaattaaacggagcattctttaacataacccgcccccgcaatatcgcgtttaactatatcgtgagggcggcgtga

SEQ ID NO: 207859 - DNA, 573 bp, Klebsiella oxytoca; identical to SEQ ID NO: 5894

SEQ ID NO: 207860 - DNA, 357 bp, Klebsiella oxytoca
gtgctctgccaccttgccgccaaacgcctgcttctgaaggtagtagaaccgtgccgcacgctggatatccgtcagtgtttcttccggggtgatctgcagccatttgtagatctgacggctgaccagcgcccatttgaactggcggacaaattcttccaggtgatgctttaccacccggtacagattcaccagttcaccgttgatatcattgatgacttcgatcttgccgggtgtcttaagaaaatagagcgctgctgccccacaaaacggctccacataacattcatgcgccggaaacagcggcagaatgtgttttgcaaggcggcgtttgccaccaatccacggcacgatgggtaa

SEQ ID NO: 207861 - DNA, 216 bp, Klebsiella oxytoca
atgaatccccgattaacgttaacagaacatcagcgccgtgccgaagcagtgaacaatgttctggaagatattatccggttacatcgcggagaactgagtatctgtcgtgccactgttcattttcaggaaatacaaaagcagttcgatacttctgtttttgcagaagggatcacttatgccctggaccagataaaggcagacaatcaccccggataa

SEQ ID NO: 207862 - DNA, 216 bp, Klebsiella oxytoca; identical to SEQ ID NO: 7238

SEQ ID NO: 207863 - DNA, 303 bp, Klebsiella oxytoca
atgttgacagttagaaaccctgacggggttgttatgtatgacatgggtgactattcaacgcgatttgtcgcgcaattgaacatcacgctacccgcccgacagcaaagcgttaacgctgcttttcaggttaatgattcggagttttttgccacgattgtggaggggaacagttcgctggtagcggggattctttataccagccttttggccatcgctcaaaatggatcaatccaggttaccgcccttgatggggcggtatcttatgacagaccggtgaaagttgacgtttacaagtttgcatga

SEQ ID NO: 207864 - DNA, 645 bp, Klebsiella oxytoca
atgtcttatggagcagcgataagaaatcagaacggcgcgattgttgttgattcaaatttcaggcataccgtttttcatgataagcgcatgcctcaaatcattgacactggtgcttatgacggaaatatgcaatttgggagaatcagagagttaggctatttatcaccggactatgaaccaaaaccggggtttctgcattggttcaggctcactcctaatacgtggggttttccgggagcatggatgtttaagcccggacaagttgagatcataagaacatcgcgaactcaggcattacagaaaggtgtattgaacgtttacagtgagagccaagagcttttgtggtctgatattagctcctataacatgcccagaatcagggggtttattaccccctctctggcagttgataataatgtcgaggccatatctccagggtttaatccgtggatacttcttaacaattgccctggtaatttgagtgatgatggctcagttattggttatagtggtttaacgtttcattgggatggtggaacgctacggtataagtgggaacgtcgataccaacggccatttacagatgtttttggaggcaaaccgattctaaacatcccatatgccatatttaattatggattatag

SEQ ID NO: 207865 - DNA, 153 bp, Klebsiella oxytoca
atggcctccatcaatactgatgcaacgaaaaaagagcaaaccaaccaagccattcagaagatgtttgatgaggctgagttttatctgaagctgactgataatatttcagtgctatgtcaaagatatggacttttttggcccccccctccttaa

SEQ ID NO: 207866 - DNA, 306 bp, Klebsiella oxytoca
atgaatgataatccagaagagcacctattccagaccctatatttattaaggaaaatgaaaggtgggcacacgttttattcaacaattgatgaagtgctgcgccagtataatgctacatctgcgggggcggtgataaataaagaccagttgctggctgtaattagtaagtattcattaaagcaaaaaacatcgttaggaaggcctgtccctccattcgaaaccaggggtggtgaaggcaacaacattacccatattggtatgattgatagggcttataaagtgccttcggaatggtccaacagataa

SEQ ID NO: 207867 - DNA, 705 bp, Klebsiella oxytoca
atgactaaaatgaatgtagcaaatcgcagctcagttgtcactaagatgtcaagtcgcgagatcgctaaattgacaggtaaacagcataaagatgtgcttcatgactgccgaaaaatgttcgaatcgctcaatcttcaatcggcggacttttccgccgattaccaagatggccgaggacgcacttatcaggagtactggcttgatcaggacctgaccatgacactgatgatggggtacagcattccgctccgtcataaagtagcgactcgctggcgtcaactggagtcaggcgaggttctaccgcagaaatcagcgtcgcatcttcctgagttccggcgcgcccgcgcaatcaagatggaggttgaggcgatgagcctcgctctttcctttatgccgaagcttagcgatgtcgccaagcaaaccgcaatggcacgggcggtaaatgatgcggcgggtattgagttgttgccattacctaagctcgaagagcattaccacagcgctagcgaagtgggagaaatgctcggcgtatcggcgcaaaaggtggggcgtatcgccaatgccaacaatctcaagacggacgaatttgggatttttgtgatggataagtcagcctactccagcaagcaggttgaggcgttccgctacaatgcagaaggtgtaaaggcattgcgccacctgatccatggcgctgacgtggcgtaa

SEQ ID NO: 207868 - DNA, 360 bp, Klebsiella oxytoca
atggaagatgaacaagaacggcaactagagcttaggagggcacttcaaaagcgacttgagaaggttacacctgagttgctgtcagagtttctctttttaaaaggtattgaaaccttcaagtgcctgctttgcggaagtgaggatatcggcattcctcaatgtcagcatcacacctctcgcaagaacggtaatgagggtaaggctttcgttgattatatcaaggtcgatgcagacggccccccgcactccctaatgcactttcagtaccgcatcatttgtcgcaactgcgggtttacccatcaccttgctgtatggccagtgctaaaatggattgaagatggtgagaacgatgccaagtag

SEQ ID NO: 207869 - DNA, 1038 bp, Klebsiella oxytoca
atggcagaagtaccgttaccaactccaaccgacaaccaggtacccagtacggatatccgggacgcagtttatgccagcgccatgctggataaggttgtcaccagtactgaggcgaaatataccgatcgcctcggcggtgagcactacaccgtagatggtattaaggcggaaggggacaaggttgttgaggatacacgacagaatttaattcctcttagccgtcagtatatgacgctggctgatgctcaggctgatatcgctaatataccagatggcagcacaacctatgtgcgcagcgctgacggcagctcgcttgctgatgagtacgttaacaatgccggttcgcttgtagcaaccggacggaaaatgccttcagataaaaatcttgtcaaaacaactgatgagtactctgatgcgcggggttttgcctgggggaaagtcatggagaatggtgatgtactgcctggcaccctgcagggattggacggattaccagcgcctgaaaacgtcgccgcgtatgcaactaaaggcgtcgcagtctatgaccttgatccggccgacatccctgtcggtcacgcgattgtcaaagatggtattgttttgctggaagtcgaccagtcagggtgccttaattacctcccaccactcaatcgccgcgcccgtcagtcggtgaatcaacgccctgaaatggtcctcactcagcttccagcgtccgtgcgtaccgctgtagaaccactcgccctgcgcgcgtgtaaatacatgttgtctacctgggtgccgacgtgggttcccctggcgggtggtacgggactaccgacgagcggttcaacgatggacagcatagaacaatacccgctgatgctggccggggtcgttcactggattagctggtgtgatgccggttatgccacgtgggatgaaacgtttattggcgtcagttacaacaccgctgtttcatggattgtgcagggtctggatttagtggtgaatgcgcatttggctaacggtggttggtggggaggcccgccgccgccgtag

SEQ ID NO: 207870 - DNA, 582 bp, Klebsiella oxytoca
gtgactgccggactgagctacagccggagtatcggtggaggctatctcacgctgggtccgtccctttctcacggcgtcccgttcgccggcgcgacacgggatgacccggcgcatcccggcctgccccgcagcgaattccggcgcttcagcgttagcgcaagctggttttaccccatgacatcctctgtgtactggctgacctcagcctgggggcagaccacgcctgacagactttatgccagtgagcaactgtccgtcggagggcagtattcggtcagggggtttaaagagcagtatctcagcggtaaccgcggcagctactggcgcaatgaactgacatggcaatggatgacggtgccgggcgtgggggcattctcagcaacgggtgcactggataccgggcatgtcatgcgccaggaagggataaccgacggcggaacgctgacaggggcttccgtcggactggagctggctggccgctggttcagccagtccctgacgctgggggtgccgctgtcgtaccccgacagactctctccggataaacacgtggtttactggcaggccaccgtttcactttaa

SEQ ID NO: 207871 - DNA, 1071 bp, Klebsiella oxytoca
atgtctctcatgctctccagacacggcatttggtactaccgcaaagtcaatctcatgccatgcggtaaacgccgtgagtatcgtcgttcgttaggcacacggtctaaaactgaagctttgaaacgtgttgaacgttttgtagatcgtccgtggaccgtgcttgaaactcccttggttacttcagtaccaccagaaaatgtacaaatccttgctggacttgatgaattaaaatatcagtctgaacagtacgttactttcaaaagtaaagaggtaggggagcgggaaacggcatctatacggcgttgcttaaatagttacttcaaatttactaaccaacctaccagtaaaacccaggcggcagcgtttattgctgggcttgatctatctattccgacaaagaataagtacgttaagaaaattggtggctttttcaggtggttaagtaatcgagtggatttcgaggtaaagaacccattcgatggtttaatgcagaaggataaggagtctgctgccagcaaacgcgaaagttacagtgctagccagataaagcgactaatttcttccctggattcattgcctgagtggaaacgatggatcattctgctaggtcgttttactgggatgagagctaatgaaatttgtcagctatatcgttgtgacataaagaaaatcgatgaaatctggtgtgccgtggttgatgatagtcaggaagggcaaacagtcaaaacagatagcagtaaacgaagtattccattgcacaaagaactgatttataacggtttccttgagtatgtagagaaggcaaaggctcgtctgttcccgcaactgacattttataaaggttcattcagccattacttcactcgctggtttagcagtttccgtaagaggatttctgtacctgaatttcactcactcaggcattatgttgcaacagcgttcaaaacggctggcgttgcagaacagtttgcgggggcatttttagggcatgcaaacagttcaattacgtataatcgctatggtaaatctgttggtttgtcagggctttatgcgttattggtgcatctttaa

SEQ ID NO: 207872 - DNA, 144 bp, Klebsiella oxytoca
atggggctcgagatactcaggatgctggtctggagccattactgcattgtgttctcggttagcatgagcctactacagccatgtttaaaattcgtttacgatgtagtactttttgtttcgtgttcactgaaaaactgcccatga

SEQ ID NO: 207873 - DNA, 2856 bp, Klebsiella oxytoca
atgttgatgcatgatatccaagccaagttatcgtcaaatttaataggtaggctgttgggtagagactgcatttttgtccagaatgacgtcctgatcgcatcaaagaatgatatttcgatcgcatcagattcctttcgtgaatgcaaaggttttgcaactttgcaaaatggtatctttggtcaggtcttggtcctcaatattggcaataagtccgtaaaatatcgatttctccaaaagagcggctcagcagaatttttgaaagtcctcaatgcatccattgccgaattcatcaacgactatctttctaaaaccttcaatgaattcgaagcttatgtgattcatgagtacccaagagacacccgcatgggttgcatttctctgctttgcaagagtttgagtgagtattactacgcacaagctgatgtatgggatatgtgtctaaaatcagagtccatacaaaaagttaagaaaattgtcggctaccacccagtacaggcggaagttctacgtgaatatcacgagaattaccagcttgaaaaacgaatgtcattcttcgaccgggttgagtcaaacccgttgactcacgaacaacgtttgggtgtcttgcggtctaatgatatgaacatggttttggcagcagcaggtacgggtaaaacatctgttatggttgctaaggctcttgatctcattgaccgtggcctagctaacccttcagaaatactcgtgctggcctataaccgtgcggcagctgaagaactcaggggacgccttgttgacaaagcagagtcaggtcagatcaagttagaatcattcccacaaatatcgacttttcatgcattaggcaggtggcttctacataacactggtgtaccaacctacttgagtgaatttactgaagacgaaatgaaattcaagcagtgggttacttcgtggttagaaaaatacctcgaatcaaatagtgctaacttactgaacttcataagcctttttcctcaacctgtaaatccttttggcttcaatactcaagctgaatatgaaagatatgttcgagataatgagttcagaaccttaaacggagacaaagttaaaggttatcaggagcttctgatagctaattttttgtacatgaatggggttgcttatacctacgaagctccttatgtgagtaaaagacgtatcgatattggtttcgactatcgccctgatttttatattcaagacacaaatatttacattgagcacttcggtatagatcgtcaggggaacactcgggcagacattgatgcagcaaaatacaatgaagctattcgtaacaagcgtgcacttcatgctgagtgtgggacatcgttgattgaaacgttccattatgaatggattgaagagaatctgacttccagtctgaaaattaaactggagaagcaaggtatcatatgtaagcccataaaatcagaagatgtgttgaaaaaacttcgtgaagaagggcgtatagccgattggagtgacctattgaaaaaggcacttcaagcaattcgagttgagcggctgacggaagagttaatagcgaacaggcttgagagggctggtataagccaacctaaaaatgccgcaacattattggatgcattacatcaagggtacattcaagagctcaaaaatcaaaatgccattgattttgacgacatgattattcgagccattcaggtaattgaaaatgaagactacatccctaagtggcggtacatcttggtcgatgagttccaagatatatcagcggcacgtatggagttcattaaagccattatagcgaaaggacctgaaccatccctgactgtagtaggggatgactggcagtcaatttatcgcttctctggtggtaagttggagttgacaactagatttggtgaaatgatcggtaactacaccgctaccaaattacaaaaaacctttcgctacaacaacagtatcgcaaacactgccgggcaattcataatggaaaaccctgagcagtataagaagcacatagaaacgcacgcaaaggtaaatctgtcacagatatatttgctggatagtaaacctgagaaacagcaaggagtatatgagcgagttaaggaaatcgttctgaagattagagagaacgacgccaatggtagtatcgcaatcattgcacgatataactacctgataaatgaagctaaagaattgttgaatcattctcggctacaaaaaaacactagcttttggacctttcataaatcaaaggggctagaggcggattattgtattcttattggattcttccagggaaggaagggtttccctaatgaaaataaggatgaagctattattgaagccttgctaccatctctggattcgtatcctcattctgaagaaagacgtctattgtacgttggtattacacgtgcaaagaaaaaattgtacataattgctgatcccacagctccgtctagtttcattaccgagttgcttgctcctaagtacgatctgaatattgtgtcggcaacatttaaagagcagtacaggaaaattttcaagtgccctaactgtgaggatgggtacttaaggttgattaaaggtatctacggtgaattctacacatgtagtacaggactcgggtgtagcgttggtaaggccagggtttgttcaatgtgccgggcaccttctgttgattctagatacacaagtacctgtaataacgttgcatgtggtaactcgattaaaatatgtgacatatgtggacgcccaatgaaacttcgtcatggtaaatatggcgagttttggggatgcacaggttatggaatcaaagacgatcaatgcaaaaataccaataaaaagtaa

SEQ ID NO: 207874 - DNA, 534 bp, Klebsiella oxytoca
atgaacctgataagtgaattgcagtaccaggtaaatcccagccatgcagtactgtcaccgtgtcgaaactaccgctacgccctcagtcggatatgggatgcgagcctgccctatgtgctgtttataggactcaatccctcgacagcagacgaaactgaagatgatcccactatccgacgctgcattggttttgccaaaagctgggggtatggtggtctgatcatggctaacctcttcgcttggcgtgcaaccgaacctgcggagatgatgcggcaggatgacccactcggtgagaaaaatgatgcctggctggtagagcttgccagcaatgcaggagtggttgttgcagcttggggtaacgacgggagctttcgacagcggtcggctcatgtgcggacatttttaacgggcttgcattatctaaaattgaatggcacgggggagccagcccaccccctgtatctgaaacagaccttaacgccagttctctggactgtaatggcagaaagtccagcaagcgaaacggataactaa

SEQ ID NO: 207875 - DNA, 1155 bp, Klebsiella oxytoca
atggatcttgaggggcgtcgagttgttcaagtgcaaaaaggggctgaaatcctaaaacatgtggagcctggtgattttgtaatcagcatgcgaagctttcaaggcggcatagagtattgttgtcacgaaggttgcgtcagttcagcatatgttcctctagtacctattaaatgggtttgctcagactactttaagtatttgttcaaatcagcatcttatatccaagccttacagagtacctcaaatcttgtacgagatggtcaagctctgcggtttgagaacttttcacaaattgaccttcctgttgtgcctgttgaagaacaacgcactatcgccgcattcctcgactatgaaaccgcccgtatcgacaagctgattgccaaacagcagcgactgatagaactgctcaaagaaaagcggcaggcggtgatttcccacgctgtcaccaaaggtctgaaccctgatgctccgatgaaagattccggcgtagagtggttaggggaagtgccgaagcattgggatgttacgcgagctaagtttttactcaagttcataaccagcgggtctcgtggttgggccgaattctactcagatgaaggtgaacttttttttagaattactaacttaactagagatacaatccgtcctaaattagattcgatacaattcgttctaccccctgctggagccgagggtgttcgttctcgaattcgtttaggggatctacttgtatcgattaccgctgatttaggttctgtctgtgtagctgatagctccataaacggaggttatgttagccagcacgtcgccttaattcgcccgaatacccgggtaacatcctccgattggcttggatatttcatcctgtctgattcgtcaaaggaacagttattgggctctggctatggaggaaccaaaatccaattgagcctatctgatatgcgtgatctttgggtagcatttccccccaatgaagaacaaaacgaaatttcggttttcttattggataggatcgagcatttcgaaaccctaatgaatagagcacaacgccaaatatcactacaacaagaacgtcgtaccgctctgatttccgccgccgtgactggcaaaatcgacctacggggctggacccaacctaaagaggtgaaggcatga

SEQ ID NO: 207876 - DNA, 573 bp, Klebsiella oxytoca
atgagccggatatttctgtactgccgagttagtacttcagagcaaactgtagacaaccagcttttggcactcgctcaacgtggttataccgtgccgcctgctcgggcaatcaccgaaacgattagtggtggtgtatgtgcgatggaaaggccaggattcaaaaacctcgtacagaataagctggaagcaggcgattcgttggtagtactgaaacttgatcggctcggtcgcgatatgatcgacgtacttagtactgtcgacatgcttcgagctaaagatatagtcgttaagtccctggacctagacggtgtagatctcaccagttctgctggtcgttttcagatgagcgtacttgcggccgtcgcgaactttgaaaaggaccgcatccgtgaacggacccaggaaggacttgcaaaagcaaaggctcaagggaagaagctaggccgtcctaacgctaccagtactgatcgtatcctggcatgtaaagaaaatgggctgtcccagtccatgacggcaaaagaacttggtgtctccatcgctaccgtaaagaggtactggaactttgcccaataa

SEQ ID NO: 207877 - DNA, 438 bp, Klebsiella oxytoca
atgagtatgattgacataaccagcagggctataaattacagtacatttttcaatcttaagcacttaaagaggaagaaaaaccttgataaggcgtttgagctgttaagtgactatgggattgtgttgaatgtggtcgaggatcatatatggacccgcgatacctatgaccttacctccggtcattatgatcctgtcaccttgaccattagtgtgccaaaccggacttttgaactggcatgcaaaggagagcgagaagccctttttgtgcttttccatgaattggggcatctcgtattagggcaccgcccacttcttcataaaggtaataaaccagcattagaaattgaagatgctgagtggcaagctgatttgtttgccgaggtggttttaaaggagttaggtttttatatggaccagctttcgtttgactttttatga

SEQ ID NO: 207878 - DNA, 360 bp, Klebsiella oxytoca
atggcactcactgaattcggtaaggccgttagaaaagcgaggatagataccgactgcacactgcttacaatggcccaggcactgggagttacttctgcttttttgagtggtttagaaacgggaagtaaaaagatcccaaaaaaatgggtgaaggaaattcaggcattttttaaagttaggggttatgaattgggtaaccttcaggaacttgctgatgtttctaatcagtttgtctctcttgatggtttatctcagaaccagcagatgttagtagctggatttgcaaaatctcctctgacaccggagcagctaaagcgcatagccgagctgatgaaaagcataaaccatactgaggaataa

SEQ ID NO: 207879 - DNA, 1764 bp, Klebsiella oxytoca
atggcggtggaaaaactgattgtcgaccatatcgacacctggaccacggcgctgcaaacccgctccacggcagggcgcggcagctcgggtaagattgacctgtacggcattaagaagctgcgcgagctgattctggagctggcggtgcgcggcaagctggtgccgcaggatccgaacgatgaaccggcgtcggtgctgctggagcgtattgcggcggaaaaggccgagctggtgaagcagggtaaaattaaaaagcagaaacccttgccggagattagcgaggaggaaaaaccgtttgagcttccggtggggtgggagtgggtacagattagtgaaattggccatgactggggacaaaaaacacctgatgaagatttcacttacattgatgttggctcgataaataaagagtatggcattattgaagaaccatctattctttcagcgaaagatgcaccatcccgagcgagaaaaatcgttcaaaaaggaactgtcatatattcaactatccgcccatatttattgaatatagcgataattgagagtgttttctccccagagccgatcgctagcacagcctttgctattattcatccctacacggcgatgaatgctaatttcatatattattacttacgatctcctgtatttattaattatgttgaaagttgccagacaggagtcgcctatccggcgatcaatgacaagcagttcttttctgggataatcgcagttccgccgtcatccgagcaggtccgcataactaaaaaaatcaaagaacttatgtctcgctgcgaccaactggaacagcactccctgatcagtctggacgcccatcaacagctggttgaaaccctgctaaccacgctaaccgacagccagaacgccaatgaactggccgaaaactgggcgcgtatcagcgagcatttcgatacgctgtttaccaccgaagccagcattgacgccttaaaacagaccattctgcaactggcggtgatgggcaaactggtaccgcaggatccgaacgatgaacctgcctctgaactgctcaaacgtattgcgcaggaaaaagcgcaactggtgaaagacgggaaaattaaaaagcaaaaaccattaccgccgattagtgatgaggaaaaaccgtttgaactgccggatgggtgggaatggtgccgcctgggtgaactagcccttaaatccgaggctggctggagtcctcaatgtgaaaatacaccaagatcaggagagcaatggggtgtactgaaaatcagtgccgttacttggggtgaatatcaaccagaggaaaataaagccctgccagctcacttatcacccagagaagagtttgaagtaaaagaaaatgatttcttaatttctcgcgcaaatacggctgaacttgtcgcccgctctgtcgttgtcccggaaaaaacacctggtaaccttatgctcagcgataaaattattcggttcgaattttcctcattagtcagcgctcactacataagcttggtgaataactctatattttcacgtgagtattataaagaagtagctggaggaacaagttcatcaatgaaaaatgtctccagaaaccaggtttcagaattactaattggtttacctggatataatgagcagttaaaaatcgttgaaaatatagttaaatacattcagatatgtgaagttctgacttctaaaattaaatccgcccaacaaacccagctccacctggccgatgccctcaccgacgccgccataaattaa

SEQ ID NO: 207880 - DNA, 1398 bp, Klebsiella oxytoca
atgctaaaatacatttcaggcgattgtgggtcggccaaaacatatgtaatgattgaaatgataaaacgtactaatataccgtatttagtagttcactcagaacttcagttgatgaaacagtcagtcgcagcgttaggtgatatctgtacggtaatatcatcagaaacccatagcaatgttgaagaggcagtaaacatttttctcaagcaaccttcacacagagtactaatcatcagtgaacgtgcatttttgcgtatttcagatctctcgttggtcaaaaaccgtaaaatcatgctagatgatgttgttagtcttcattgctttaaggtgatcaatactgagaaaaaacatgaggtacataaacaactgtttaccagatttaccgatctagataaacagtactgtaccgctgtgcctatcacccgtttcaatgatgatctgctatccgatattcataaacgtttcgagttcatagaactttatgatgagttcagaatgaacagcaattttttcagtactaaaattcaggacggacatgaagtgtaccgcgatgactgtaaccagctatcaattatggcatgggtagatgtacagaagtatgtggatggtggcctggatatgacattcatggcgaaccaattcacagaatcactactgtaccgttcgaacccaggtctgtttacagaagtcactgtgtcattacgtcagcgtacattacccgtcaaagaccgcctgaaagtgttctattttctcgataagaaacgctttaccagtactttcaggactgacaaccctaatgcattgcctaccattgcacattgcatagagcagaacgtaacgggtcagtactactacacgtcgaacagttcaactaaaggcgacatgagcaggattctcacgtcaggccagtacatatcaccaaacagccgtggtatgaacgcgtaccagaactacacaacagcggtgtggctagccagtatgaaacctagccaagttgaagtggtgatgtgtcgtgagcagttcggcattacgggccaggatctggtgcaggccagggagtttgaaaacctgtaccagttcatcaaccgttcgaatctgcgtgattacagttctcagtctgaaatcgtggtttacgtagtcgacagagaacaggctgagtcactgggtactaccaacatccatcacatcgatctgggtctggaagataacagtactgaaacgttgaaaccaggtcgcccggaagtattcaatgcagatgataagaagctgagaaaagcattcagtacgtttaagtcgagacataacggcgatgtcagtactgaacagttcgataaatggtgtacgaagagaaagctgtcagaacagcaggtagagatgttgagagggatgataaagtaa

SEQ ID NO: 207881 - DNA, 126 bp, Klebsiella oxytoca
atgctgattatgagtattcttatgctgccctgggggctggtgctgatttttacctttttcgccagcgcgaccgccgcccataaccgccgcgtttcatcgaataccgacgagacaaaagtcggctag

SEQ ID NO: 207882 - DNA, 768 bp, Klebsiella oxytoca
atgacccttgaagttgttcctggaagcctgaccagtcccgacccttccattaaaaactatgccccctatgctcccgctatcggcgtgaccggttataccgaccgctggcgcccggcgctggatttttcagccagtattacgggagacgccgttattgcttatccgagtcccctggtgccggataatgttttgtcgggaaacacaacgaatccgccagtcattgtcgatcagtctggtgttcgcatggtcgactgtgccacaacaggagcgctggcagcgctgacagacattaaccgtaagttcggtgacgtcagtttgctggcggtatggtatgaagtacacggctccgcatcccactccattctgaccatcggaggattgcggttcagccgggcaagcgccagctggggtctgtccaaaatgtccggcgctgcagggacaacactgagcatttccaacgatccggctgccggaggtgtggctatttccgcacgtcgctatgccgctattctgactatccctgttgacagcgcagccgccgtaacgttgcgcctgattggtgcgggctcatccgctgtcagtgtttctggcattatcacccgcggtggttctgcagatgaacaacgtcggttgcggtttggtaaagattcgggcggctcggcgaataccggcccgcagtttgccgaaatggttatttgggaacgcctgctgactatggaagaaatttcggccgctgctcactatgcctcagacaaatacagtctttga

SEQ ID NO: 207883 - DNA, 762 bp, Klebsiella oxytoca
atgataactggtaataaagttacacctactagtacagctctgcaggctagagtcattctgtaccaaccaagtcaacgtcccttggcgctgaaggggcagtggatggagactagttttggtcgttgtcgagttaccggaagactaggacaacgtcatgcggatattgtggaaacaatgctctatgtggccgagaaacgtcgagaaatttctgatggaggaatcgagttattagtagatccagcgaaagtacgccgaactctatccgatgcacaatacagttatgatcgaattaaaaaactactcgttgatctacgagtggcaactgttgaaatagtaacaccagatttagaaaaaaacggttattgcattctaggtggtttaattgaccatgtcgtaccctcaccaatgaccagacgtaaccctctaactggtggtgaacgtaacctatggagagtacgcttgggtgttgcattggtaatgttgttgaagcgagatttgcattttcatcatgatccaggtcctattgctcgtctccagcatggtattagccaagcagttgcacgtcatatattaacacataagcacgatcctaaaggcggctggcatattgatacattaattttagctgtcagtggtgaaggtactaataatatgacattacgtaactatcggcggagattaaaagaagatagcaaacaatttctagcgattggcattgagatacaaaattctaggataaaacgagctacaacggcccggtag

SEQ ID NO: 207884 - DNA, 435 bp, Klebsiella oxytoca
atgtccaggactccctatacacggttacgcattgagggcttccgcaaagcagaggcttccctgagacttgaaggaatggaccccagtggtacgccactgtacgagtccgttaaagcacgtatcatttcaggtgatctgacgtatgagcaggggcgttctgagatttttgcatactacacaaaagtagataccgccgggcctgtgacagtgggagagatgctggcagaggaatttttaaaaccgctgaacatgtctcatgaggaactggcggaatctatgggtatttgcaggcaggagattgaagatattatctgcggtttacgtcgtcttacggatgacgagactcgcgttcttgctgccatatttggtactgatgaagacttctggagtaatctgcaggagatgcaagttcaccgagaacaacagcataagtaa

SEQ ID NO: 207885 - DNA, 798 bp, Klebsiella oxytoca
atgaaagtttttattaacgagctgtcaattgttgggcaagctactaatcaagatgatgcgatgcatattctttctgaactggcggcgttggccgctcgggcgagaaatattagtttcgggaataaagcttaccggacccgaacgttaggacacaaattgattactggaaacttgagtgtcaaggaggtgcttgttgcaagttctgaaagaggactcgcgattgacgagcgccagcgcaaactcgccattgaggtgtttctaaagcaaccttacgctgaaaactatcacactcaacctcatgatactattaacgatcacgttggtacttgccttaaagattcttgctttgatgatgcagcatcaagtataggagcgccattaacgatttctgcacgaacctgtcaatcctatcagttttcctccactactatttttagctcgctatgcggcgcgaaaactgttttgaatgtagtggatgatagtagtctagacagcattctttgggtgtttgagcataatcctaagcataaagtgaaggagtatcgtgcagcgggtgaactcgtgagtgttatggatcttagtcccgctgatgcgcaattagctcttagtaatggcattaagatcaatgctagggtttatagctactttaatggctcctggtaccagttccactgtcatcaaggcaatatctaccacggatttaaaatcgaactagagcagaataatcctgatcatatgagggcattagctatttctacgtcattagctcacgctccatatggacagatttttgtatga

SEQ ID NO: 207886 - DNA, 1089 bp, Klebsiella oxytoca
atgatttcgacattaaagttgcaaaatattaaatgttttgacagggcgaaatttaagttttcaaatcttacagtattttgtggtgcgaattctgcagggaaatctacagctattcaatctctactcctgctccgacaaaatcataataatagtaagcttaagtcagggaagcttagtcttgttggtgagtatttttcggtaggtcatgcccgggatctaataagtcacactccagttggagagtcgttatcgattgccattgacgatttaatgtttgtttctgatctaaagaaagctcaagctggtgattatcatattaatttcgattctactccagaccttgaccatgattttttttccgcagactttaattacttaagtgcttacaggctatcgcctcagaatagctatgatacaaatttcgaatcagataagctggatttgggtatatatggacagtatgctatagcggctctggttagatatggcgataaaccagcacctaatcaaaagctagcaaagttaatttgttctgggcttgatgatgctgaggaaagagccataagcttggctgtcgcgtttaaagaggctatgaagaagttcataagctctgattttgacatagttgctagcccacacttaaatctagataaagtctctaacaccttttcagcaggggctacggctaaccaagttcgccctgtcaatacaggatttgggataagtaatgtaattcccattgtgctggcggccctttgtactcgagagggagggtacctcattgtggaaaatccagaggttcaccttcatcctgcagctcagtcatcgctcgcctctttgctgacacttacggcaacgtgtaatgttcaggtgatattagagactcatagtgatcatatagttaacggtattcgtgttttttctaaagagaatgtactcgataacggttttgttactgtgaattctgtaagggcgataaagactggtcgagttgtaacagaaattattatagaaaacgacggcgggttgagtaacatggatgaaggattctttgatcaagctgaaaaggatttgttgaggttattctga

SEQ ID NO: 207887 - DNA, 1032 bp, Klebsiella oxytoca
atgatggattacaacgaatttgataggtcttttaggtatcgcaaaacgactcagtcgataccctcgcttttagaggggttgcgtagcaatcggattcaatgtgatccgatgtttgcctattctaagtcttggtcgaatatttctaagtcaacctttatcgaaagtatattggttggaatgcctgctgaggatattctttgtgaagaaaataattacggagagttgttcgttcttgatggtgtgcagcgtctaatgtgtcttcaggattttttcaatgacgaattcaagttgcaaggtttaaagcttattccgtcacttgaaggacattattattctcagcttccttatggtcaaacatctgtttttcacaatcgcactgagcttgggattacaattataagttatgatacagacgccattctaaagttcgagtttttcaaaagagttcattctgactcttataggtttcccgttcagctggcgcgtaactatgcgtttagagaacacttatattttattcgggatctacaagacgcttctcgtaatcacttagctccaagagagcagcattcttacaggttttcagttgagacatctaaagctactcataggggtgtttcagagtttgatgaactatacttggccttgtgttgtgcgtcattggtatatcataatcgtatgccgccatcgaatattagatacccagggaggtttagtgacctgcttgacgaaactgctatatacttacaacgaaccccaagtgatttttttcctctgaaagaggtagttttaaatacattatcgagagtaaatatgtccttaggctctacaattctctttacagatttcccccgtcgtggatatcactcctatcttggaaatgagatattgttggatagtgacagtgtcattgcctgttttatagatggcttgaaagaccgaaatataaatctggaagacttagagagtcgcagaataggatatcgcaataatcgatctccacagtcattttttaatgatatctttaattag

SEQ ID NO: 207888 - DNA, 396 bp, Klebsiella oxytoca
atgcttgacgatccgccgactgcgcgagtgacatacgagcaaaaaaatacgctcaacaatatgagtgttgagtatgccaaggcacagcggaagagatacttgaaggaaacggctcaaattcgggctttcttggctgctccggaaaacattgaattattacgtatgtacgagtcggtagtagatgagttccaactcaagatcattgcaaagcgtaaggactatcaaacttttgatgaggtaatggaatatctggttgaaatattgttcaaccgtgaccctatcttgcggcagcacgctcacaagcgcttgacgcgtgctgtactgttttacatgtactggaattgtgatattggggaggtaggcgatgctacggccaacgaagcactctcatcctga

SEQ ID NO: 207889 - DNA, 1260 bp, Klebsiella oxytoca
atgtctggcacgtatgctgttgaagctgttccattttattttgaactggcaaaaattcttctcatcactcagtcaggtatagttctcaaagcaaggcttaactacacacatatcgacccatggataacacgtgccgcttttgtaaaaggggttaaagtttctggtggcgggcgcatcaagcgactggaggtcagacaatgtgacacccccaatgttaaaggcttatccattgaccgcctgattacgggcttcagttatgatgttgatgtgtcagatattaatgccgttggggtcagcgagccatcaactgccaatttttcgtactgttttggtcgttccagagcagctaaccttcgagtagggggatcatcttctgtcacagataatgccgcgctcaagttcatgagctgtccaaaaatgcagttctctggtatcacaagtgacaacacaacagccaccggcactcagggggactatggtgtttttggcgatgccttttttacaccctattactgctggaacaggggagtatccgtagatggtattactgttgagaaaccacgatctccagttaatcgggcagtatggttctttggtctacttgattcttttgtcagcaatatcaaggggggacaagtattccttcaagggtgtgtgaacagcgttttcagcgaaattgttatcccacaagagccactcgagacccgggatctggtcggttgtgaagtgcgtgcgttctgcaaagcatttactattcttggcggtgtggacactacgtatcaaatcagaactactggtcttggttccggagccagcctgaatatcgcgggacgttttggtgcaggaaccagaaatccactgactggcgaaacctatttaattggaaaacgaaacaaaatcaatattgatagcctttcagaatcgacttctgcagtaacgatttacgctcagtctcaggatcgtctcattatcggtggagactgcatagataaagacactgtcgcatcaagtattgtttttggctcaaatatcacgaatcccaaaatgcagccgaacctgctaacaggttcaatggcatctggttcaggctggacaggtgttcgtatcaagggcggaataagtttcgatggggattatcgggatggatactggaaatctaacgggaaatacttgtgggtgaccggaagcaacatactcaaacttcatctgacaaaacccgatagcgatagtcctagcggtgctatcactattggtccatag

SEQ ID NO: 207890 - DNA, 267 bp, Klebsiella oxytoca
atgccatttgtaaaaaaaatcgttacagacaaacgtgtttcattcccactgttacaactagttctgccctctgagagctcagaagttgagattacagtaaccgtaacaggcgtctccggactttcggaagcaactggcgtagctgagtatatggttgaagtttatggcactcagggctcaatactgcgaacagagtttccttactcaggtgcaggtaaccccattgatgaagctgaaaaatatcttcaatccaatatcggtttataa

SEQ ID NO: 207891 - DNA, 636 bp, Klebsiella oxytoca
atgactcagcgaattcagcagatccaacgtatcgtgcaacagcaaggaatcactcgacttgtgcacttcactcgcgtcgataatttagcaagcattatgcaacatggaatagttccgatagcaaacgcaccagggcgtcgtattgcaccagttattaatgacgaaagtagatgggatgggcatagggatgcctcctgtctatcaattacacgccctaatcaccatatgtttttcggactacgtgctgataaccctcaagttgaatgggtggtattgcttttacaaccgtcattactttggacaaaaccttgtgcgttttgttgtcacaatgcagccgatggaagaattagcagtcaacccttaccccaacttcaaaatctcgcatcgctctctggcatgttcaatgaacttgaaaatttttcatcgcggcaagatcaacgcttgcaaccttacgacactacagatgtacaagcagaagtgttagtatttgatacaattgaaccgcaatatatctttggtgctgcatttaacaagcaagaggcgaaagcagcttacgaaggcctacttgctggaagacaggtacaactccaagctacaggaggcgggctattcgcttcccgttcatttgttcgataa

SEQ ID NO: 207892 - DNA, 708 bp, Klebsiella oxytoca
atggcacaaagacccgtatatatccctgttcatgaaaaatcgctcttcgttaaaactgagcttgtagatttcacgtggtttccgggaatgtcagtctcacaaaagcagaagtcaattgactctctccatgaagcagcaaagacaagcctgcctaatgtcgacaagatccttgagatttccagcaagtcccgtgacaccctcggcgttgcattgagtgctttcaacctttcgttcaccacactgaaacagcaacggacattaactatcgaatgtgcatttcagggaagcaaagtcttccagcgtggcgggccatatgctgatatgtttgaaatgacgcctcgggaggctaaaaaagacaagcgccttctgacctctggtcgtctgataggcttcaaattttttggtaaggaatgggagttagagcctcagaccgctttttacgactggctttatatcagcgcgttaaggaaacagcaggaactggctgaacagattgttgaatatgacgcgttcactgatattgagtttaaccctgaacgctcgatcaactgccaggcttactccgctgctctttatgtttctctgtttaagcaaagtcttcttgatcaagccatctcctcaaaggaaagtttcttagatacgatcaagaatatgtctatcagtaacgcccgacaaaatgaaactaatcaacctggtttcggattctga

SEQ ID NO: 207893 - DNA, 297 bp, Klebsiella oxytoca
atgaagatcgacattatgggcgtggcccaaaccaggcttctgagcgtcagcgttaagacattagatgatgctggaattttgaatatcagcggcctctgccgcaagctgggcgttaagcgctcaaccttcctcagcaaggtggcatcctccggccttgaacaggcgattttgcattatgcagcgctcaaaaagcagcgggatgtgctcgccactctgtcagagaaagatgcagccgcgtttttagcagcctgtaacgcaggtaatagcgcaagcaagaccagcagcaccaaacactaa

SEQ ID NO: 207894 - DNA, 447 bp, Klebsiella oxytoca
atgaacaaaccaaaatcccaacgtctcgacctcaccagcatgacaggcgagcagatcgcagaccttattctgaatggcaaatacaccaagccagcgctctgggcgttcatcagccgaaatggtggtgcagacgccgcacatgcaaagcatcctcaactggctgttgcacttcatatcctgaaaaaggaaaagaagaaggcgaaaagtgcccgtctggtcaagacgatcctgaaaccgctatcccgccagtatgctgacggtcaatccatgactgagatactggccccggtgctccagagctatcgccgtctataccgtgaaaaactcaacctcgatatgacgcccgagcaggtgatcatgttcttggttgccacccacggtgtggagaacctggaacaatacggttacagcgttgcgggcaacttcccgacattgccaacagtgtga

SEQ ID NO: 207895 - DNA, 216 bp, Klebsiella oxytoca
atgaaaaaatgtacaacaacattaaccttgttggccctgctggcttgccagccagcgcacgccggacgcatcaccatgcagttaacagaccaggaggagacagcaaacggcaaaaccttatgccgctatgaaaacagcatttatagcttcacgattacccagaacggcaagcattgtccgtccgtgaagaccttcgacacggaggactcagactga

SEQ ID NO: 207896 - DNA, 132 bp, Klebsiella oxytoca
atgtcgaacagcagcattatggggttagcgctcgcgcttcgcaacgtcgaagccggtcaggcggttaaaatcccggcgatgaccgggcagcagttgcgccagttgctggcgtggctggaagcattgaagtaa

SEQ ID NO: 207897 - DNA, 819 bp, Klebsiella oxytoca
atgacctgcttattcgcaccttccttagttgcactctcaagactggtcggagatgcgcaagcagagtcgcccagatcgccttctcattctgaattaagttatgctttcgagaagcatggattagcgcatatcgatcccaagaatcagcaaactgtgggaaaaacaaagcgagttcgaactgttctgtcttgggctttggataataatcctgatgcaggtcagaaactggcatatacattattgcagaatgtaaaggtagctggaggtttcaggaaggagtcaagtaattatgctgggcatgatgctattttgggtttgatcgagtctttcaaagaacaagggttaattctgacagagtctgggtcactacttacccaaaatattgaggggcttcgaggtcgggaattaactgatgcgttgaaaaaatacgcagacagagcaagacgtggcgcagaggatgcagcattgctttctggtacaagcaaagatttattagaagcaacagcagcacatgttctaactcaaaaatatggagcttatcctcagcaagcgaatttccctgctctacttggtcaggcttttattgcgctgggtatggcaactcctgttggacaaactcaggataatgaacctccacattcgagccttgaaagaggaatgtttgagacggcggtaggaattaatcgtttgagaaacaagcaaggaactggtcatggacgcccctggattccgtcaataaaagattatgaagccgaggctgctattgaaatggctggcgtgatcgcgagttacatgctggataaactaaaaataaattga

SEQ ID NO: 207898 - DNA, 597 bp, Klebsiella oxytoca
atgaataactctcttctcccgccctcttcaacggcgtggatgcgcagtaccgagagcgcatcagccagactgtcggccattacggtggcgcttcgcacgctgtggacgccgacggcatgccctgttgatttgctgccgtatctggcctgggcgctgtcggtagatcgctgggacaaggattggccagcagaacgcaaaattaccgctatccaaaaatcgtactggctgcacagacgcaaaggtacacgcggtgcggtgcgccgcgttgttgaggatatggggttttcagcaacgtttgctgagtggtttgaggttgacgacgaggcgggaacattccggcttgaagtggatgttaacgagacgggcatcaccactagaacacttggtgaacttaaccgactggtaggcgacgccaaaccagtaagcaggcatatggcgcagttcaatatcgcagccagggtgaaaggtgatatttacgttggtgcctcgctttgttgcggggaaataatcagcgtatatccaccggactatgaacctgctgaaaatatcctttataacgggattattttccatgacggaaactataacttcggatga

SEQ ID NO: 207899 - DNA, 1077 bp, Klebsiella oxytoca
atgactaatattacagaatctccgtcgtgggaagagagcatcagcctgatagccagaaacgaacgcgtgacaggcggtcaggatggtgtggcaaacagaccattgaaggggctggctaacaggactagctaccttaagaaaaagtatgatgaggtagcggaggatgtttccggcaaagttgaagccgtgaaaacatttgctgaaggagcgacgctcctctcgccgcgtgatgaaattgtgtatggaaattatcgccttgtctggacgggggagtttccaaaaagcgtcccggcagacagcacccctgtcagctcaggtggcatcagcgctggagcctgggcttatacgtcagacgggccattgcgccgggatattactgcacagactggcgcatccatgattggcgggttgagttttttaaccgtcgaaatgtattcgtatctcgttgaagggagcgactggcgaaaggcaattcaggctgctattgaccaggctcaccagaattatcttgccgggagtggcccgacaaatattctcattggtggtgagttcactgttactctcaatccggattcaacattgatccccggcgaagttgctgcgggccgtggttcgctgtgtatgcgcagtggcgtaacactgatgggtggtggttcaatcactcttgatggcagttttaccggctcgtccagcggtgcaatcattactaactgggaaggtgctgccgataactgcaagattcagggaataacatttaatggtagccgtggcaccactgccggtacgggaatcacctgtattaatatcgtggactcggataatgtcactattgacaacgttaaggcgcttgacagtacatcgggcggcatttatctgcggcgtgcaaataacgcagtttacgggtgctcaaactcccggatactaaactgctatgtgaataatgtagggtatatcggcattcagtgtgagcgtcccaacgggatgaccattacgggatgcaccataacctcttgcggtgataatggcattgatatctttggtaacgtaaccgaagagaccggtcaggggctttgttga

SEQ ID NO: 207900 - DNA, 429 bp, Klebsiella oxytoca
atgaagcgcacaccattttaccgcaggcccggcatgtccgggcagttctcagggcttcgcgaacgcgtgatctggatgattcagacccgcgggcgtccagtgaccggcagcgaaatagcggagaaattcggcgtaacgctcatcgagtttaaccgcgttgccaactgcataacccgaggtggcggacagatagcgaagatcgtctcatctgaaacctggctcaacgatgccggaatatgcgaccgcacctttaccctggttacaaagccaaaggtcattacaccaaagggtaagtctcgccttttcactcggcgctctatggcccaggcagcaaagggaaataagcagcagtgcattgaaaaagctgcgcgccgcagccgtttaatcgcctctggtctttatatcgacgaaatggaggctgttttatga

SEQ ID NO: 207901 - DNA, 888 bp, Klebsiella oxytoca
atgtatcatctcgacaacaccagcggcgtaccggagatgccggagccgaaagaacagcagtccatgactccacgttggtttggcgaaagtcaacaacagggcgggataagctggccgggtgcagactggtttaacgtggtacaggccgaattactgaacctgctgtcggctgcaggtattgagcctgaaaagttcgcctatgaccagttgagtaaggcaattcctgttctgggagatgctcagctaagaagcaatcttagttctcatgatgaggggttaggtggagcgttggtagctcatgttcagccggggatatttaccggaacgcttcgcgattttctcaattcagctatcaagttcgttacgccagaactttacggttatagcgaatccgggactaatgatgaaaatacggcagcaatagaaactgcattgaaaattgccggcagcaatagtctgacctgtaaatttcaggggggtgtctattccggtaatgacattgaagtcgatttcacggttaacattgaggtggcaccgtcttcttttctcgacttttctcttattattagggggaaacattttgatgcacgaaatacggttaacaccgtcattccgtgggaatcattcccggcaggaacatccattgtcgccggtgatttttctgctttcaatccgggtagcgcaatagctgtaaaactcaacgataacgatggtggaagtgctggaatagggaacgagacaggtattgatatctctcttatctcagataaaagcgatacatcattaaggctcgcaagtgccacacgtttcccttaccaaaaccctgatgtgatagagctaaggaaggtgcgaataagcaggtcatttcttcccaagctgactcgctga

SEQ ID NO: 207902 - DNA, 540 bp, Klebsiella oxytoca
atgggactgaaagacgctaatatcgggcgctcacttgcagagcttggccgccgcatgcgcctgatggtggaccgggcgctggtgcgcattgtgacggacagcctcggacggcagaacctgcaggtgcagtcgctggctgatgagaccaatgacgacgtcgagcgcttccagaactacgggtttaccagcgtcccgcctgcgggatcagaggcgattgtcgtcgccgtgggcggacgtcgtggcggtctggtggccatcgccgtcgaggataaagggagtcgtcctcgtggcggcgaagaaggcgacgttattctttatcatcaggagggacatgttatcgttttaaaaaagaatggcctcgccgaaataagggtaaagaagattaatttaattgccgaggagtcttgcgacattatcggtaaacagataaatatcaccggccccacttctttcagtgaagatattcaggttaagggaaaaagcttccttaagcattttcatatagacggggatggtaatgatacttccgagcctaaatga

SEQ ID NO: 207903 - DNA, 537 bp, Klebsiella oxytoca
ttgagcaccttaagagacaacccaaactgttgtgagtatgaggaacatatgaagaaaaaaataggaattgtaatgttgatggggctgcttccctttacttctttggggaaagagcttccaacatcagattatgtattatcacaactacagtcaggaaagttggtcaatgacgggaagtggatagagaaaaacaataacgatgggaaagcttaccaaagcctcaagtcaggcgagtatagttttacattgtcaaaagactttttcgaagttgctcaatcagtagatcccaatgggatagattcagagaataatgctcttaaagttcatacggtttgtcttatgattgccacaataggattaaaacggaatcttactgaacaagagaactcagcggttattgatacagttgctggctcagcacaaattgttccgaccggagcttatagtgttgtcgatggatttgatttttatagtttgattaaagctgttaatggtaatccagtttttacctgcggcctcagaaacgcaattcattaa

SEQ ID NO: 207904 - DNA, 390 bp, Klebsiella oxytoca
atgagtgatgatctctttggtgatgtgcaggacgacagcattcttgagcacatggatgatagtgacttggaaaatgttaaatttcctgttctcattgctgagctaaatgacctgttacggtatgagtttcagcgtattgggattgccccctctcactctattgaagtcgtttccgcgatctgcagccagttaggtggtatccagatttatcttccgcgcgggaaggttcttgagtattttatccgtgatattaaaatctggcgtgattacactggagataatgttaaagagctggctcataagtatgaagttacgtttaatactatttataaggctatccgcagaatgagacgtattgagcaccttaagagacaacccaaactgttgtga

SEQ ID NO: 207905 - DNA, 801 bp, Klebsiella oxytoca
atgaaaaataaaagacaaattaacattataaaatatcttgatactttcgatgtgatgagaacccctgataatgggcggattagcttgatatatgaaaaagccatacattacaacatgtattctgtttacatcaaagaccgtgagggtgcggattatttattcgaaaggtttgtgaatggtgaggtgaaagttaaaaaatggaatgcgaatgaaaatatattcaacattgattctattctctttccaaaagatcttgagtgtgattctttttcgggtgtttattattatcatgcgcatgagttgagatttaattcattaaatgatttgagtttttttaagctgctaagatttagacgcttcgctaacgcagagaataaaagatttagccgtgagaagtttctttatcgtcagcgtaagcaagaaattactgatgcaatgactgttttagcctccgttgttagaatctatcgagagcaggaaggcgaaaggccattcagcgaaatactagttatgaatgatgttgctggtagattatgggtctatcacgatgatcaatcacggatgagaaaagaactccgtctgtgtcttgattcacttgttgaaaatggcgatatttcaaggactgagttggggtataggccaacaggaaaagcggtaaataccttggctaattttaataaaacagagcagcgatatacagaaaacatacgcagccagaggagtatgttttgggctactctatttgctgcaataggtggtctgggaagtatgtttgccgcgtttatagggcttatgaaatag

SEQ ID NO: 207906 - DNA, 585 bp, Klebsiella oxytoca
atgattccattaattaattacaccatcttaactgatgcattgcacgctctgaaagaaggcaatattcgtcactgtaaatccctcggatttactttcgacgaaatgaatgctcttaatcagttatcactcgatgaactgtttacggtcagccgggcggcagttccctttgtttcggtcagtgtccgccatgatgttctgcatcatttactggcgcaggcccgccaggaataccagcatcaacaggagattaaccgtgctatccgcctgggtggctctatctcgttgctcaaccactattttggcctgacatcaaatgaagtctgccttcgtcgccggttgctgagtgtcagcgtgccgtatgggcggacgcctgaaccagatgaagagacagatgccgaaatctggaggcaatggcaaaaatgtcgggtggataaccttgaatcctccgacgcgctggccgccatgatgcaggtgacggaaaagctattgccggacgccgaaggtctgtctctcaccaccatctggaagcgcatcacactctgcgaaaaggaagccgccaacaggagggcatcaaatgccggatga

SEQ ID NO: 207907 - DNA, 234 bp, Klebsiella oxytoca
atgagaaaacccgattattatgcatatgttgcccaggaaagtcagccggatactcagggcgagaaaaatacgtactggacaaaagtcggcgttgcctttgctcaccacggtaaagccggtctgaatattgtcctgacgcccggtattgccgtctccggcaaactagtcctgctggaacctcgcgaggaaaacagtccgcagcagagtacggctcctgtcgaaaccacgcagtaa

SEQ ID NO: 207908 - DNA, 663 bp, Klebsiella oxytoca
atgctttccaccactgcctttctggcggcggccatgcagtgcgccgccagcattcatccgtccacggcactcgacgtggcgcgggtggaatccggttttaacccgtatgccattgccgagattgtcccgaactccggagaatcttccggcgataaacacgttaattctcaccagccagccagtcggggagaggcagagcatattctccgcagcctaatggctcagggccgccgttactctgttggactgatgcaaatcaccagcaccaatttccgccattacggcgtcacggccagcgacctacttaacccttgcatcaatctgtcggtatttgagcgcattctcgccgactgttaccggcgcggcggcaccctgaaacgagcactcagttgttactactccggcaactttgaaaccggacagcgaccggaatccgcctttaaccagaccagctacgtacagcgcattggctatgtcgtcccgtccacgcgggaagaccggcaccgtgcccctgaccggagtgtacagccctctgtccgttatcccgccgttgtgctgcgcggcgagcctgccggtgccactgcgccgatcctgacttctctgcattatcccggtgccgtcattcgcggcgctatccctgttatccctgatgaggataaatga

SEQ ID NO: 207909 - DNA, 138 bp, Klebsiella oxytoca
atggtttttaaccggcaacgctgcaaggcgcagactgaggcggaacgcagcacgcagcacagcgagtaccgaacagtctacgcctcgcagtggaataaaaaatcgtccggcctggcggtatcgccgccaggccggtga

SEQ ID NO: 207910 - DNA, 948 bp, Klebsiella oxytoca
atgacgatttccctgcgcaccacccggacaagcgcccctaacaccgcagcggcgaccagcgtatccccgctggacccgtcaggctcctcaaaaacgaaattttctaaaaccagaacggatatttatcagaccgttaccgatagcatcattgcagtgctggaagccggtgtgaaaccctggtcttgcccgtggcagcgtgtatctggcatgtctggtttgccatcgaattacgccaccggcgtagcctacagcggtatgaacatcatgttgctgtggtgcagtgcatcaaaacagggtttcagcgattcccgctggatgacctacaaacaggcacaggtagcaggtggacaggttcgcaagggtgagcatggcacaacagctattttctataccacgctggagaaggaaaacgacgccggagaagttgaacaaatccctatgctgaaaactttcaccgtgtttaacgttcagcaaatcgacggtttaactctgaccacagaaactgttagcccggaagcaacctttgacccggtgccgcaggctgagaacctgttacggaagagtggcgcaaacatcatcgagaaaggacaaaacgcctttttcattccatcaacagatgaagtctggctacctgagcgccatctgttttcagatgcggctaatttctacgctacaggtctgcatgagctggttcactggagtggtggcaaaaaacgtctgaaccgtgaaatgaaagggaagtttggcaatgcggattatgcagaggaagaacttgtcgcggaactgggaagtgcctttctgatggctgatcttggcattgagggagaggtacaacatgaaagctatattgcttcctggctgaaagcgttgaaaaacgacaagcgttatattttcaaagcggccagcgctgcctccaaagcacatcgttacctgatggataaactctga

SEQ ID NO: 207911 - DNA, 216 bp, Klebsiella oxytoca; identical to SEQ ID NO: 166269

SEQ ID NO: 207912 - DNA, 474 bp, Klebsiella oxytoca; identical to SEQ ID NO: 99300

SEQ ID NO: 207913 - DNA, 900 bp, Klebsiella oxytoca
atgattgacccgcttattagaaatctacaggctgacattgcattgcttcagctttacatcgcccaacgccaaaagactggttttcacgatatggaaagaatggtggaagcgttgaccatctttatgtttcgtgcactgcaaatgggtgagttgaaaaaccttaatcagattaaagctaactttccagccattgatttagctgacaatcaaaaaatgatagcggttcaagttactactaatgcaagcccggcaaaaataaataaaaccattgaagcttttgaaaagaagaatgaatcaggcgtgagcctcaaagataaatactctgtattatatattttcggtttttgtaaaacctcaaaacactctgttccaagttattgtaaattaattgacaccaactatcttataggcgaactgtgcgataaagcagatgaagacatgatccaggatattcttgatgccattagacgccatcgggattacacttcattacacccttgggatgataaggattcacttgaaataatccttgacgtcattaatcgcaacgcaattaagcatagaatgatttgcgaaggcagcctctctgatatggttataggcttcaaggaaataaatgaagtaattggaaagggaacaatccaacgtaagcaacgttccaaatctatagctgatttcaaagatcaaagcatagttgtattcctgagaggtgtaacggatgatctatctcatattcaagctataataaataaatcaagagtgtgtaatgacgattttgtctgcattagccatgaagacatggctagaattgatcagttaaaaattaaaatagccaatgattcgtcaaaaattgcaaagctataccatataaaaatggaaataaatgtaatcaatctctaa

SEQ ID NO: 207914 - DNA, 360 bp, Klebsiella oxytoca
gtgctgcgccttcacgcgctggtaaatctccacctgacgcgccgggtcactttccagactgagcgcctgacactgctccacatcgagcgtgttctctgccagcagggcaatcagttccggggcaaggctggcgagcttcagcatgcgctggacgtggcgcgaactgtaccccagctggtccccgatttgcgccggggtcttgccctgctcagacagcgtgcggaaaccgctgatttgctctgccgggtgcatcgccacccggttgttgttctcgaccatcgaagccactactgccagttcgtcgctgacacgcttcacgatgacctgatgcccggcatcgatgcgctgctcgcgttgtaa

SEQ ID NO: 207915 - DNA, 306 bp, Klebsiella oxytoca
atggattataccgtttcggagctggatatctggacgattctggcacgtctggacgacatcccggaagaacagcgccttgagtcgggcgtatctgccagtgcggtgatgacgctgatagatgaggtgaaagcggccgcgacggaagtgagggtgccggctgacctgcttgaaaccctgctgatgaccgccgaacaggcattgtggcacagggaatggaccgcccgggatggtaatcacccggtgccggaaagtgtgaagcgccgcctggctgatacagcgaaagtgcgcgcattaatgaaaatctga

SEQ ID NO: 207916 - DNA, 285 bp, Klebsiella oxytoca
atggaaaataaatggatacttgaggatgctgtcagcattcttaaaactttgggtcatatcaacctttggtatctcgaagagcagttcggtcagttgccagccacccgaatcattgtctctgacgataaccgcacagtggcgatgtggtctgagcaaaaacacggctgggaaatatggacgaccgcactaactgtttccattggaatcagaagtacggttgctgccagtggccaacgtgtgactcctgaatggttgttccagcagatgataattgagcccatctag

SEQ ID NO: 207917 - DNA, 216 bp, Klebsiella oxytoca
atgggcaaacttggcgaaaacgtaccactagtcatcgacaaagtcgtcgattttatggcgtccagtcaggcatttatggagtatctgaagaaatcacctcgcctgagtcacgtaccggaagagatcccggaagagaaagcggcgatgtttctggagcgattagaacactaccgcaaactttatcagccggtcgagaaccaggcgaaagaagtttga

SEQ ID NO: 207918 - DNA, 453 bp, Klebsiella oxytoca
ttgattgccgccgtcgagttactgaccgaggcggtcaatattctggtgcttcaggtgttccgcaaagacgattatgcggtgaaatacgccgtcgaaccgctgctggacggtagcggcccgctgggcgatctttcgctccggctcaagcttatctatgggctgggcgtgattagccgtcatgagtatgaagatgcggagctgctgatggcgctgcgtgaagagctgaaccatgacggcagcgaatatgccttcacggatgatgaaattcttgggccgctgggtgagctgcactgcgtctctgccctgccgcccgcgccgctctttgacgatagcgatgccgacctgctggcaatgcaaaaacagcgctatcaacaggtcgttcgctcaacgatggtactttctctgaccgagctgatttcccgaatcagcttgaaaaaagcctttcagaaataa

SEQ ID NO: 207919 - DNA, 357 bp, Klebsiella oxytoca
gtggcgcttggcaaagccgcgatctgctgcaatgaaccgctaaagcattggcacgatcagtttaatcgctacgacacgcggctgtcccgcatctgcgagaaggtgccgatccgcaagtccggcacggccggacgcgtccgcgccgggctgccgttcaaggccaatcgacctggcgttcggcaggatcaggcggttccagacgagcagggtctggccatctcaagcaccgcgtgccggtattgctgtcaggcgttgaggtcgcgcgcccattccagtcacgacttaccgcaccgtacgtggcatcgccttcgcgttcaggtttgccagcgccgctcattgcacggctcgcacaactag

SEQ ID NO: 207920 - DNA, 621 bp, Klebsiella oxytoca
atgaaaacaaccagtcgacggaaacgcctgagtcggccggaggcgcaggctcagacacgcgagcatcttgtcgaagccgcgaagaggctattcattgagtgtggtttcgcgggcacatccctgcgcgatatcgccgaggaagccggatattcgcagggcgcgttctattcgaacttcccttgcaaggaggctgtgctgctcgaacttctgaagcgacatgtggccttggaagacgatgagatcgaaactatcgtagccgacaggaaccattcgccagagcaaatcctggctaaattggaagaatggcttacaaggttcgagaaggcccgggactggtcggttttgactatcgagcttcagttgcacgcgatgaggagcccgtcattcgccgaaagctacgctgccgtctggatggagcatgagcagcgggtggcgttgatgctaagacgaatgttcgagcgcctcggccaaacgccaccggctgacgtgacgccaatcgccgctggcctcatcgcgctgacgaacggtcttgtcgtacagcagagtgccggccggccaacctatatttcagccaccattgccatgttcctgcgcgccgtcctcactttgggagccgaatag

SEQ ID NO: 207921 - DNA, 1155 bp, Klebsiella oxytoca
atgccaatcaaaatcgcagtcctgaaggaaacgaaacccggtgagaagcgcgtctccatggtgccttctgtcgtgcagcggctggaacgcctcggcgcctcggccgtgttcgaaagaggtgcggggaccgcagcgactttcgatgacggcgcgtatagtcacgcgtcctttgcggaaacgcccgaagcgctggttgcggacgcggacatcgtccttgccgtgcaaccgccgccagcggtggtagccggaacgatgaaagcgggagccgtgctgatctcgttcgtctacggccaggcgaaccgcgaactggtggcgaccctgcgcgacaaaaagataacggcatttgccatggagctcgtgcccaggatcagccgtgcacagtccatggacgcgctgtccagccaggcggccctcgccggctactacgcgccgcttctgggtgcggtccacatgccgcgcatcctgccgatgatgacgacggcggtcggctcgctgcgtgccgccaaggtgctggtgatggggctaggcgtcgccggtctctccgcgttggcgacggcgcatcgacttggcgcgatctgtgagggctatgatgtccgcccggaaacggccgagcaggcgcgctcgcttggcgcgaaattcgtcgacacgggcgtcgatgcccggggggaaggtggatacgcgcgagaactgactgctgaggaacaggcgaaggtgcggcaggtcctgtcgcagcatatcgccgaggccgacatgatcatcaccacggcggcggtgccgggcaagcgtgcgccggtactgatcgaggccgatcagatcgccgcgatgaaaccgggcgccgtgatcgtcgatctcggcgccgagggtggcggcaattgtgcaggcacgaagcctggagaaacggtaacggtcgggccggcaatcattctggggccgctcgacgtcccatccgcgctcgctcagcacgcgagcgagctctacgccaagaacattctcaacctgctgacgctcatcgtgaaggatggcgcactcgccctcgacttcgaggacgaggttatcgctggtaccgtgctcacgcacgccggcgaaatccgcaatgaagcggcgcgcagcgctgtcgagggtaaggtttcaagcgatacggagaccgcgaaatga

SEQ ID NO: 207922 - DNA, 309 bp, Klebsiella oxytoca
atgaccatcgatacctccatgacatggctgatcgccctctacatcttcatgctagcggcgttcaccggatacgaagtcatcagccgcgttccctcgattctgcacacgccgctgatgtccggatcgaacttcatccacggcatcgtcgtcgtcggtgccctgcatgcccttattaacgcaaccagtctgttcggacaagtcctcggcttcatcgccgtcgcgctcggcgcggccaatgccgccggcggctatgtcgtgacagaccgaatgctcgccatgttcaagtccagcggcgacgggaggaagtga

SEQ ID NO: 207923 - DNA, 1416 bp, Klebsiella oxytoca
atgtttgtacagcacattgctggactaagcgggctcgctgccgctgtcctcttcatcttcggcctgaagcgcatgtcgtcacccgtgacggcgctatccggcatcgtcgtggcaggcctcggaatggtggtcgcggtcgcagtgagcttcctggcggtcttcgacgtggcagagaccgtccgcccgcatcttggcgtcaatcttattctggcggtcgccgcaatcgcacttggcggtggctgggcctggctgcgcggcaggaaggtcgaaatgaccgcgatgccgcagatggtcgcgctctataacggcatgggcggcggtgcggcagcagcggtggccgcggttgagatttcggcacgcggtaccccgagcgcgctcatcctggcggtgaccgccgctggcgcgctgatcggctccatctcgctcacgggctccgtgattgcttgggcgaaacttgacggtaagatcaacaagccgttccgtttcggcgggcagcgagctgtcaacggcgcgctctttctcgtaacagtgctcctcggaattgcccttgtcgccttcttcgacagtccggcgcttccgcttctcgccatattgttctttctcggagcacttgccttcggcatcatgatgaccctgccgatcggcggcgctgacatgccggtggtgatctcgctctataacgccttcaccggccttgccgtggggctggagggttacgcgctccagaacccggcgctgatgattgcaggcatggttgtgggttccgcaggtacgttgcttacggtgctgatggcgaaggcaatgaaccgctcgctggccaatgtgctgttctcgaacttcggcgatgcgaccgttgcgggcggcgacacaactcatggcgagatgaagagcgccgatgcgagcgacgccgccatcgccatgcgctacgcatcgagcgtcgtgatcattcccggctatggccttgcagtcgcgcaggcgcagcagaagctatacgaattcgtcaagctgcttcaggcggccggcgtggacgtcaagttcgccatccatccggtcgcgggccgcatgcccgggcatatgaacgtgctgctcgccgaggccggtgtgccctacgacatcatctacgacatggaagacatcaacgccgacttcgtgaataccgacgtcgcgctggtgatcggggcgaacgacgtcgtcaatccggcggcgcgcaccgacaagacctcgccgatctacggcatgccgatcctcaacgccgaccaggcccatcaggtctatgtgatcaagcgcggtcggggcaaaggctattccggcgtcgagaaccttctgttcttcgaggaaaactgcaacatggtctacggcgatgcgcaggccgtgatgacccggatggtccaagccgtgaaagatctcggcgcctga

SEQ ID NO: 207924 - DNA, 1392 bp, Klebsiella oxytoca
atggcctatgcaaccatcaatccctacactggggagaccgtcgcgacatttcccgatgccacggacgcggaggcgaaagctgctctggacaaggcggatgccgcattccacacatggcgcgaaacctcgtttgccgaacgtggccgcattctgcagaacgctgccgatctcctgcgtcgcgacagcgatgcctatgcgaagctgctgacgctggaaatgggcaagctcttcgccgaggccaaggcggaagtcgagctctctgcaaagatcttcgagtactatgtcaggcacgccgaggcgctattgaagcccgaaaagcttccggttctcgacccggccgagggcgaagcggttctggtgcatgaaccgctcggcgtgttggtcgccatcgagccctggaattttccctactatcagatcgcccgcatcctggcgccacagctttcggccggaaacacgctcatccttaagcatgcctccaacgtgccacagagtgcggccgccttcgaaaagctgatgagcgaggccggcctgccggaggggtgcttcaagaacctctatgcgacgcgcgaccagatcaacatgatcatcaacgatcctcgcgtgcacggtgtcgccctgaccgggtccgaggctgcgggctcgatcatcgcggcggaagccggcaaggcgttgaaaaaatcgacgatggaacttggcggcgctgacgccttcgtcgtactcaaggacgccgatctgaagaagaccatcgactgggccgtcttcggccgtcattggaacggtggacaggtctgcgtgtcatcgaagcgcatgatcgtggttgacgaggtctatgatgcgttcctcgatggctaccggaaaggtgtggccaggctgatcgccggcgatccctttgatccgaagacgacgctggcgccgctgtcctcgcaaaaggctgcagacgatatcaaggagcagatccgaaaggcggtgagctatggcgccaaggccgaggaagttggcctgcctgttcccaaccagggcgccttcgtgcagccgaccatcctgaccgacgtcggcgaagccaacccggcccgctactgggaattcttcggtcccgtctcaatgctattccgcgccagggatgaggacgacgccgtgcgcattgccaacgactcgcctttcggtctcggcggttcggtttttacggccgacgaacagcacggctttaaggtcgcgaagcgcatttcgacagggatggtctttgtcaaccacccgaccaaggtggaggccgacttgccctttggcggtatccgccgttccggctacgggcgcgaactgcttggcctcggcctcaaggagttcgtcaaccacaagctgatcgacgtggtcgatatcgaggcccatttttag

SEQ ID NO: 207925 - DNA, 780 bp, Klebsiella oxytoca
atggcactgaacgaaaaagtcattctggttacgggcgcagcccagggcatcggccgtggcatcgcgctgcggttggccgctgacggcgcggatatcgcgcttgtcgacctgaaggccgacaagctggaagctgtaaaaaaggaagttgaagcgctcggtcgcaaggcgagcaccttctccgccgacgtcagcaagcgggataacgtctatgcggccatcgaccatgccgaaaaggaactcggcggcttcgatgtgatcgtcaataatgccggcattgcccaggtcaatccgatcgcggacgttttgccggaagaggtggatcgcatcttcaagatcaacatcgagggcgtgctctggggcatccaggcggcggcgaccaagttcaaggcgcgcaagcagaagggcaagatcatcaacgcctcgtccatcgccggccatgacggttttgcgatgctgggcgtctattcggcgaccaaattcgcggtccgggcgctgacccaggcggcggcgaaggaatacgccagcgctggcattaccgtgaacgcctattgcccgggtattgtcggtaccgacatgtgggtggagatcgacgaacgcttttccgaggtcaccggcacgccgaagggcgagacctacaagaagtacgtcgacggcatcgcgcttggccgggcacaaacgcccgaagacgtagccgctctcgtcgccttcctcgccagcgacgattccgactacatcacggggcaggcgatcctaacagatggcggcatcgtctatcggtaa

SEQ ID NO: 207926 - DNA, 327 bp, Klebsiella oxytoca
atggcggcatcgtctatcggtaatatgaaaagcggcggtcccgatgcatgcaatggtcctgaatgctgtcggcactccgctcgtctggaccgagtttccagacagaacgcccgctcccggcgaatccgcgtgaaggtttttgcctgcggcgtgtgccgcaccgatctgcatgtggtggatggggaactgccccatccccacatcccgatcattccaggccacgacattgtcggacgggtcgacgcgctcggcgacggcgtgtccggcctcacgatcggcgagcgggtcggcataccctggttggcggccgtcggctttgttgaataa

SEQ ID NO: 207927 - DNA, 627 bp, Klebsiella oxytoca
atgatacgactgaaaggctgtctgctcgccgcctgtctgttatcgccgctgactcaggcggctgatctcggtacctggggggatttatggcccgtccgggagcaggacatgctgcagctcatcacgcagcgtctgcagtcgctgcaatcctctggccagtgggaccagacgatggacgcgtttaagcagcgggttatcgagaacagtcagcgtccggcgccggtggaaggcattaagcgtgcggagaaatacgagcagcgctggtttgatcccagcatccgcctgaccgaagacctgaaggacaatgaggggcgggtgtttgcccgcaagggcgatgtggtgaacccgcttaaaaccgtaccgtttgtccagaccctgtacttcatcaatggtgacgatgccgaccagctggcctggatgaagcgtcaggtgccggaaaccctgatgagcaaaattatcctggtgcgcggcagtatccctgacacctccgcagcgctggacagccggatctatttcgaccagaacggcgtactgagcaagcgatttggcctgacggcggtcccggcgcggatcacgccggcgccctccggtgaacggctgaatattgagaccttccctgtaaaataa

SEQ ID NO: 207928 - DNA, 390 bp, Klebsiella oxytoca
atgaaaaacaacaccgaacaaccggtcagtacgacctctcatacctttcgccggatacctgtcatcgtcgctctcgtgcttttcgccctggcaaccagcgcgtttctctcgcgcatggttctggagtactccacgccgcgggtggtggcttttgatatgaagaaaacgctcgacagttttatggacagtgtcagccagaagcagctgacagaggcgcagtcaaaagcgctctctgatcggtttaacgacgcgctggagaagagtctggcggagtatcagcagcagcatcatgtggtcattctggtttcacctgccgtggttcagggcgcacccgatgtgacccgcaacatccagcacgacattgcccgccggatgaaaggagaacagtaa

SEQ ID NO: 207929 - DNA, 537 bp, Klebsiella oxytoca
atggcagcacgtggcgttaataaagtcattctggtcggacatctggggcaggacccggacgtgcgttatatgcccaacggcggcgcagtggcaaacctgacgctggccacgtccgaaacatggcgtgataagcagacgggagagatgcgcgaaaacaccgaatggcaccgtgttgtcatgttcggcaagctcgcggaagtggcgggcgaatacctgcgtaaaggcgcgcaggtctacatcgagggccagatgcgtacccgtagctggcaggacgataccggcgccacgcgctacgtcaccgaggtgctggtcgggcagaacggcaccatgcagatgctcggcggtcgtcgtggaaccggtgagcctgagagtgctgcgccgcagcagcccccgcagccgcagagtcctgctgccccggctaaatcccagaaagcgaagggcggtaaaaaaggccgtcaggataccgctccgtctcagttacctccccagccgttcccggacgattacccgctgaccgatgacgatgcgcccttttaa

SEQ ID NO: 207930 - DNA, 3072 bp, Klebsiella oxytoca
atggcgaaaactgacaccagtgagcgctggttcgaggcgcgcgtggtacgcagcttgaccggtgtgccgcagcccgagtacagccatgagctggctcccacggacttcgccgccacccacaacggctacgtgcagggcaagcccaccgactacaaccgcgacgtggcgctggatgtgacacagctgctcgccttcttgcaatccacccagcccaaggcagtagacacgctggaactggcggcggacggcatcaagcgcactcagttcctgcaccgattgcaaggtgagatcaccaagcgcggtgtggtggatgtgcttcgcaagggggttagccacggccccgtacacgtcgatctctacaagctgctacccacgccgggcaacgcagcagcagcagacgccttcggcaagaacatcttcagcgttacccgacaggtacgctacagcaacgaatccggcaacgagttagacttggccatcttcatcaacggtctgccggtgctgactttcgagttgaagaactcgctgaccaagcagaccctggccgacgccatcgtccagtaccagaccacgcgcagcccgcaggagctgctgttccagttggggcgttgtgtggcgcacattgcagtggatgatgtggaggctgcgttctgtaccgagctgaagggcaaggcctcgtggttcctgccatttaaccagggctggaacagcggcgctggcaacccacccaatccggatggtctgaagactgattacctatggaagcaggtgctgactcgcgagtcgctggccaacatcatcgagagctacgcgcaggtggtagaagaggaagaagtggacgctggcggcaagaaacgcaagaagcgcaagcagatcttcccacgcttccatcagttgcgcacggtgcgagcccttctgcgcctcgcccatgcggatggggtgggtaatcgttacctaatccagcattcggcaggaagcggcaagagcaacaccattgcctggctggcgcaccagttggtggagctgcgccgcaaggacgatccgctgacggtgcagttcgactccatcatcgtcatcaccgaccggcgtgcgttggacacacagatcgcccgcaccatcaagggttatgaccatgtggcggcgatcttcggccactccgacaacgcgcaggagctgcgcgagtatctgcgccggggcaagaagatcatcgtcaccacggtgcagaaattcccgttcatcctcgatgagctgggcgacctctcaggcaagagcttcgcgctgttgatcgacgaggcgcattccagccaaggcggcaagactacggcgcggatgcacgaagccctcggcggcaaggttgctgcggaggagttcgaggaggacagcacgcaggatgcagtcaacgcggaaatcgagaagcgtattgcctcgcgcaaactgttggccaacgccagctacttcgcgttcactgccacacctaagaacaagacgttggagttgttcggcgagaagaccctggtcggtgacaaggtgcagtcccgctcgcccgaagaactgacctacaccaccaagcaggcgatccaggagaagttcatcctcgacgtggtggagaactacaccacctacgacagcttctatcaagtggctaagacagtggcggacgatccggagttcgataaggtgaaggcgctgaagaagatccgccactacgtcgagtcgcacgacaaggccatccgccgcaaggccgagatcatggtcgatcacttcatcgcacaggttgtgggtaagcagaaaattggcggcaaagcgcgggccatgatcgtgtgcaacggcgttgagcgggccatcgactactggcgcgaggtgtcggattacctcacacagatcaagagcccgtacaaagctatcgtggcatattcgggtgatttcgagattggtggtcagaagaagaccgaggccgatctcaatgggtttccaagtaaggacattccggcaaatctcaagcaagacccgtatcgcttcctcatcgttgctaacaagtttgtcaccggcttcgatgagcccttgctgcacactatgtatgtggacaagccactggcgggcgttctggcggtgcagaccctgtcacgtctgaaccgggctcatccgcaaaagcacgacactttcgtgctcgactttgctgacaacgccgaggcggtgaaggcagcgttccaggactattatcgcgctaccatccagactggagaaaccgacgccaacaaactgcacgacctaaaggctgaactcgacgggcagcaggtgtatagctggcaacaggtggaagaattggtgaccttgtacttgagtggcgaagacagggacaaactcgaccccatcctcgatgtgtgcgtggccgaatacaccgacaagctcggcgaggacgatcaggtcaagtttaagggtaaagccaaggccttcgtgcgcagctacggctttcttgctgcgattctgagctacggccacccgacgtgggagaagctctcgatcttcctgaatttcctcatccccaagctgccagcacccaaagaggaagatctctccaggggggtgctggagactatcgacatggacagctacagggtggaggccaaagcggcgctgaagatggcaatggccgacgccgacgccacggtcgagccagtgccgccgggcggcggtggcggcaagggcgaggcagacatcgacaaactttccgcgatcatcaagaccttcaacgacctgttcggcaacatcgagtggaaggacgaggacaaaatccgcaaggtcatcaccgaggaaatccctgcgcgagtagcgcaggacaaggcttaccagaatgcgcaggcgaactccgacaagcagaacgccaagttggagcacgacaaggcgctcaaccgcgtggtgcttgagctgctttccgaccacaccgagttgttcaagcagttcagcgacaactccaacttcaagcgctggctgacggacacagtgttcgatgcgacctaccagcggggcgcggtgccgccgaaagcaccgccgcagactggggcgtcggcatga

SEQ ID NO: 207931 - DNA, 972 bp, Klebsiella oxytoca; identical to SEQ ID NO: 127364

SEQ ID NO: 207932 - DNA, 2382 bp, Klebsiella oxytoca
atgcataagaagcaacaacaagaccaaagccagatcaagtggatttccgatttcatctggaacattgccgatgaccgcttgcgcgacgtctatgtacgcggcaagtaccgcgacgtgatcctgcccttcaccgtactgcgacggcttgatgccgtgctagaggcgacgaaggatgctgtgctagagcgcaagaagctccttgatgcccataaagtggtcgagcaagacggcgctctgcgtatggcagcaggccaagccttctacaacgtatcggaatttactctggccaagctcaaggccagtgccgcaggccagcggctgcgtgatgattttattgcgtatctggatggattttcgcccaacgtccaggaaatcctcgccaagttcagtttccacaaccagatccagaagttggtggattcccacgttctgggctacttgattgaagatttcctcgacccggaggtcaatctctcgccgttgccggtgaaggatgccgacggccgcatcaagctgccgccgctggacaaccatggcataggcactgtgttcgaagagctgatccgccgctttaacgaagataacaatgaagaggcaggcgagcacttcaccccgcgcgacgtggtgcagctcatggccaagctgctgttccttcctgtggccgagcgcatcgagtctagcacctattcgctctacgacggctcctgcggcaccggcggcatgctcaccgtggccgaggaatcgctacacgagcttgccgggcagcatggcaaggaagtctccatccacctgttcgggcaagaaattagcgacgaaacctacgccatctgcaaggccgatctgctcttgaagggcgaaggcgaggaggccgagaacatcgtcggtggcgctgataagtccactctgtccgctgaccagttccgttcgcgcgaatttgatttcatgatctccaacccgccctacggcaagagttggaagaccgatctggagcgcatgggcggcaagaaggaattcaatgaccagcgcttcatcgtcagccacgcgggcaatgctgagttcaagcttatcacccgctccagcgacggacagctcatgttcctggtgaataagctgcaaaagatgaaacaccacacgccgttgggcagccgcatcgcactggttcataatggctccgcgctgttcaccggcgatgcaggccagggcgagagtaacatccgccgttgggtgctggagaacgactggctggaggccatcatcgccctgccgctcaacattttctacaacaccggcatcgccacctatatctgggtgttggccaacaagaaagccgaagcgcgtcgtgacaaagtgcagttgatcgatgcaagtggctggttccagccgctgcgccgcaatctcggcaagaagaattgtgaactctcggatggagacatccagcgaatcatcgacatctacctcggcgaggcgcaagaaaccgccgagtcgaaatggttcgacactcaggacttcggctactggaagatcactgtcgagcgcccgctgcgcctgaaaagccagctctccgacgagcgaatcgaactcctgcgttttgccaccggcgacgaggcgatacgcgccgagatctacgccacccacggcgaggcgctctataccgatttcgccaagctcaagccgaccatcgaggcatggctgaaaggcgaggacgagaacgaagaggacgagaacgaagacagcggcgatgacagcgagactcccgccgcgcgtaaggccgtgcccgccaagcgccgcaagaagctgctcgacgcatcgacgtggctgcgcgacaaggcgctgatggtggtggcgcaacgggtgcaaaaagctctaggtagcgccgtgttcgatgaccacaatgaattccgtacccgcttcgatactgccctgaaagctcagggtgacaagctcagcgcacccgagaagaaggccatctacaaagctgtgagctggcgtgacgaaacggccccgccagtcattgccaaacgcagcaaactcaaggcgagcgacttctttgagcccggcttcgatggcgcgtacctggagacagtgggcaaggatcggttcatggtcgagtacgaacccgacagtgagctgcgcgataccgagcaggtaccgctgaaggagtcgggtggtatcgatgcgtttttcgagcgggaagtgctgccgcatgtaccggacgcctggatcgctaccgacaagacccagatcggttatgagatatcgtttgcccgctacttctacaagcccacaccactgcgcacgctggccgaaatccgcgccgacatcctcgctctggagcagcaaagcgaggggttgctgcacaagatagtgggggtagaaaaataa

SEQ ID NO: 207933 - DNA, 1731 bp, Klebsiella oxytoca
atggccaagacacttgaagcccacgacaaactgatccgcgagatcttcgaaggcagctaccagttcgagattccggactaccagcgtccctatgcctggacaaccgagcaggccacagagctgttcgatgatctgcactcggcgatgctggatgcgcgtgtctccggtgcaaccagccaatacttcctcggcagtatcgttctgatcaagaacgaccgagagcccaaatcgtcggtggtcgatggccagcagcgcctgtcgacgctgacgatgctgtttgcagtgctgcgcgaggccatgccgcacgcagccgacgacatcaccgatttcctctacaagaagggcaaggtcagcctcggcgagaaaaatgaataccgcctgaccgcccgcgaggaggatgccgacttctttcgcaccaacattcaagagccgggcggcatcgcacagttggtcactagcaccgacaagctggaagacagccgacttcgataccgcgaaaacgccacgctgctgcttgccaaagccaaggcgctaccgcccgccgatctgagcgcactgtggcagttcctggccaacgactgctcgctggttgttatctccacgcccgatcttgaagctgcctaccgcatcttttccgtgctcaataatcgggggcttgacctcgcgcctatcgacatcatcaaggcgcaggttctgggcctaatccgcaccacggcaggcgacattaagagtcgggtctatgccaaggagtggagtcgcatcgaaacctcactgggccgtgacgcctttggtgatctgttcggtcacatccgtagcatctatgcgaagaagaagcagaagtacattttggtcaaagaattccaagagcacgtcaccgagtacaataaccctatcgccctgatcgactccgtcatcaaaccttacgcagaagtatgggacttcgtgcgcgacgctgactttgaggcgaccgagcacgcagagacgatcaacgagcacctgttctggctcaaccgcgtggacttcaaggactgggtacccccggcactggtgtatttcaagcgattccggcaaaaaccaaaattgctcgcagaattcttccaatcactagaacgccttacctatttcatgttggttacaaaggtgggtatcaacgaacgcatcgaaacctacgctgcgctcattaaagacatcgagtccacggccttcgacggcgatctagtcaccttgggcactctggcacttacagacaaacagaagcgagatttcgtggctgctctcgacggagatatctaccgcaacctgcccaaagcccgcatggcactggttttacgtctcgaatctctggttcgagcccctggagtgcagctgcaaaacgccgtgtcgctggagcatgtgctgccgcaaaacccgcctgacggttcggactggatcaagtggttcccggatgaagacgagcgagattgctggacgcaccgtttggccaatctagttccgctggataggaacaagaactcatctgccagcaactacgacttttccaagaagaaggatgcctacttcaggggtaagggcaaggcgtcgcccttcgtgctaacgcaggaagtcaggtcagaaaacgagtggacacccaaccttctggctgagcgtcagaaacgcctgatgggcgaactcaaaaatcattggaaactcgccgtcaccacagacaatgccagcgcctcagcggcgaattaa

SEQ ID NO: 207934 - DNA, 909 bp, Klebsiella oxytoca
atgattagttcaccctctaaacgggtcgaggatttgagccttgcccagcgcgagcggctggcctacatcgacttccagctctacttcttcggtgatattgggcgcccagacctgattgagcgcttcggtgtggcgccggcaggggcaactcgcgatctggctctttaccgggaaatcgcaccgcagaacattgaattcgatggtagcaacaagatctaccgcataggcaaggcgtttgttccaattttcgagcactcgacgcaacgtgttttgtcgacactcgcgcttgggtttggagatggtgtgaacgtcgactcgcggccgctgctgccatgcgagtctccagtggctttgagctgcccacggatggatgtgctggccccaatctgccgggctatccacgccaagcggccagtagccatccgctaccactcaatgagcagcggtgagaccgagcggatcattgtgccctttgcgctggtcgataccggcctgtgctggcacgtccgagcttttgatcgcaagagtggcgagttccgcgacttcgttgtcacccgcattgaagcgcctatcctgcttgatgaagaacccaaggctaacgagcgttcggacaacgacattcagtggactcggatcgtggagttggacttagtgcctcatccgcgctttgcgcgtcccgaggtcatcaagatggactacgggatgaccaacgggtcgatcaagatgcgcgtgcgggctgctgttgcgggctacatgctgctgcactggagcgtggactgctcgcctgaccatcgcctcaaagaagaacagtatcgcctatggcttagcgatccgctggtgctgtacggagtcgagagcgccaagctggctccaggataccaagccctgagcagttccaaggaatcatag

SEQ ID NO: 207935 - DNA, 2139 bp, Klebsiella oxytoca
atgtatatttccaaactgaccctggtgaattacaaaaacttcaagaacacgtctctgcggtttcacaagggagtgaacaccattatcggggaaaacggctcagggaaatctaacatcctgcgagctattcgcctcctgcttgacgacaatatggtgcgttctgcttatcgtctggaagagggcgatttcagccgatcactcgaccaatggcaggggcactggatcatcatcagcatggagtttgacgagatcaccactgatgaatccgttcaggcactctttctccacggtacggctcccttggacgatgggccaatacataaggccacatataatctcattttccgacccaaaaaagacatcaggttgaagctggcagccttagaattgtttgattttaaagaactctcggagattcgtgacgcaatcaccatcgatgattacgaaacgcttttcactggacggagcagtgctgatttcggaaatccagcggtataccgaagtatcgttggagattttgatatatgtgatttctcatcagagacggagtttccagaaattggggcaaaggtgccgggcttcctttcagttacgaaagaggtctcgctgactttcatccaggccttgcgcgatgttgtttctgagtttcacaacaatcgcactaaccctttactcactttgctgaagagcaagagtggagatatcaatccactaacgatggaaccaatctccgagatggtccgcggacttaatgcctcaatcgaaggacttgaggatgttcagtcagttcgcaatcatattcgtgagaccattaaggacgccgcaggtgaaacttactcccctgcttcactctcaatcaagtcagatctccctgaagaagcagataaactttttcagtccctgcgactattcgttggtgaatcagaagaagggtacgaaggtgcaattcatgagctgagccttggcggtgccaacctaatatacctgactctcaaactactggagttcaagtaccagcgggaaaagctagccatggccaatttccttttgattgaagagccggaagcgcacatccatactcatattcaaaaaacgctgttcgatcgcatcgcatatagcgatgcgcagatcatttacaccacgcactcaactcacatctccgaagtcagtaatgtaagcaatgtaaacatactgggccgtcacggagcgttttgcgaggcctatcagcctgccagaggtctagatcccacccaaatcaatagcatccagcgttatttggacgcggtgcgtagtaatctcctcttcgccaaaagtgtgatactcgttgagggtgatgtggaggagatcctgataccaatactgattaagcttgtactgggcgtaagcgttgacgagttgggcatcagtgtcatcaacattcgtagcacaggattcaagaatgttgcggttctcttccatgacctacgtattaagaaacgatgcgccatcatcactgatttggataaggccttctttaatatcaccgtacaggcaactgataatgccattgtggcaaagataaaggcaaaagctgcgggatctcagaaagccggtttagaacggcaggccgatttgacagagttcacggcagaaaatccatggattgaaaccttttacgccaaacacaccttcgaggtcgactttgtcgcagccggcaaccaagaggctatcgtccagaccattccgaaagtttacaaggatcaggtaaccagggaagaggcgaagctgcaactcaagtccggagacctgcaacaaatgggtagtcgtacgctgacaatggctcggcaagagggtaaggggtggttcgcgcttttgctcgctgaatacctcactccccaagtccagatacctgaatacatcatacaggccatccattttgcacatggcaaatttccgcgttcccttattgtcagaattctccagtatcgcactgaataccgatatggagcagatgtggcaaatctgccagcgaaacaattatttcttcaggagataaatcgttttgcgcaaggagatattggcctggctgagttcaggataacaattggacgtttattaccgggagaccccattattgtattcttagggaagttgcaatga

SEQ ID NO: 207936 - DNA, 1785 bp, Klebsiella oxytoca
atgaggttcgtttgggatccaagtgacctcaatcctgaacaggcggcagcagtgacagagccatcgagcatttttctgatcgcttgcccgggtagcggaaaaacgcgcaccctgacctacaaaattgcctatgaactctctcgtcgaactgataagcggatggttgttgccattacctacacccaccgtgcagccgatgagatccaagaacgtattgaggatttgggcgttgatacttctgggctatggattggtaccatccatgccttttgcctggagtggatccttaagccatatggcatttattcgcctgaactagcgcgtggttaccgcgttatcgacccgtacgatcgtgagcgtctgctggagaggctgtgcgctcagtataaaggtatcactcactgggattgtgactactacgttactgaaacgggttatcaacttggctgtgtcgatacgagaaaacatcctattattcaaaacgttttgaaggaatattttaaagagctttcatcaagccgacagatcgacttcgaacttatcctttggtatgcgtactgcttgatgcgggacagacctcctatcgcagtactgctctctcgcgtgttttcccacatcctcgtggatgagtatcaggataccaaacagattcagtactctattttgacgtcgatacttcgcgctggaaggggggagaccaaaatactcatcgttggtgatccgaatcaagcaatctatggctcactgggtggctacgctatgccattagatgaattccgtgcgcaagccggaatcccgataaaggagtttgcgctcagcctaaactatcgctccagtgagcgaatcatcagctatttttcgaactacagcgtacacgctagcaaaatcaccggtgctggcaaagatgctaaatttcccagccggattacctataatcaaaaggttacacgcagcaatgttcatgatgagattgtaaggctgattcggaagagtctagacaacggctactcacccgaaaacatctgcgtcctcgctccacagtgggttttgcttgcctccacgactcgaaaactagttgcaatgttgcctgatcagcaatttgatggcccaggcctcatacctttcagtaataacttcgataatttctggttcaaggtttccaaggttttactgacggattcttccccagcattacttatcaggcgactgcgttgggcaaacgaagtaataaaagatcttgatagtttcggcgttgatactaagacactgacaccgagaatcttgctgcgggagagtaacgcgctcacggtcaatgagttggacggactccgctacctggaccaggccttcaccgagctgctcaagaggctcaatatttctccggaaattcatcctgcgctcttgactcatcgagaggcttttttcagcagctcagctgcgcgaatagagcgtctgcaaaaggaaggggcgacatacatcaatcaaatatccgtcttcaaaaaagtctttcgcgaaagaagcggcatcactgtctccaccattcatggtgtcaagggtgccgagttcgatgtcgtcatcgcctttggattattggagggcatggtaccgcacttcaatgaagtgaatggacatgttgccgcaagcaagctcctctatgtattgagctctcgtgctcgaaaaaatcttcatttaatctcggagtcagaacgtcagagaggaagatacagtagctattccgcgaccgaattactcgcggcctgcatctttaattatgacgaggagtaa

SEQ ID NO: 207937 - DNA, 339 bp, Klebsiella oxytoca
atgaatatcagcatcgttagttccggctcttccattctgcgtaccgatggttttgtgcgcaacatccacgccgctaacccgttcgatgttgtccgcgccgatgtggtgcttgcgcgcatcgagaaagaggcggggcgctgctgcgggctgcattacgagctgtatcaggcgcgcgtgctgggcgatgcgctggattatctggatgcgctgccgctgaaagaccgcccgacgttcatgggcgcggcggcaaaacgcgggtatctgcttacgctggcggaagaagagcacgcggaggaagcccgtgatgtgctgctgagtgaactggcggcaaacgagtag

SEQ ID NO: 207938 - DNA, 2967 bp, Klebsiella oxytoca; identical to SEQ ID NO: 140040

SEQ ID NO: 207939 - DNA, 402 bp, Klebsiella oxytoca; identical to SEQ ID NO: 98355

SEQ ID NO: 207940 - DNA, 1074 bp, Klebsiella oxytoca
gtgtataattcattagaagatatcgtcaacatatttaacagcacaaaagacatatcgtcattaccgcgtgcatttttaaggttaagaggtaaagcgttagagcgaaaagaattacttattgctcctgtaaaaagaataattaattggctttgcacgtccggtttaagcataaatgaatctgacattgatatatattcaagcccctcaagttattttaatgaaagaaaatcattaagctatgatttaatatgtattgactatctacttgttaacgactcggagcaagaaacaatacctttcattaataatattaagaatgaatcagcagagcagggatacactccctcatttattttaatgtcttcacatgaaaatcttattacgaacgacttccttgatataaaatcaaagttaagcatgactagttctcgctttagaattatggaaaagccgagtacaaatttaaattctagggaagtcatatggaaaacaacctttaaacagatatttgaacaaaaaaaattcatacatgatatagagatgtttattcatggttggattaaccattttcaaattgcttccttaagtctagccaaaatactttgggcgctagatgcacatagcttagatgtattacgtcgtacagcaaaagatgacaatataagtttttcagaatattttacagaagtaattttcaaaaaggtattagctgagttcgaatcttcattaaatactggtgctgaatcagttagatcttcaggggaaacattgcaaaccgtattagaaaataatattttaatcagtccgggaaatgaggttcaggactcacgattgatattaaagacacttcttaaggatacaaattggcatgaaagaaactggtatcaaattcaagaatcatatccagtcttggttaacgaggcatgtgatctaccatcgctttatcattaccaattaaaatggttgaaggaaaatttaagattcggaattgttttaagaaataaagaaacaaaagcactgctagtaaatttaactcagccatgtgacttagggaaggtgcgaacaagttcctga

SEQ ID NO: 207941 - DNA, 966 bp, Klebsiella oxytoca
  misc_feature (683)..(710): n is a, c, g, or t
atgatgttacttaatagacaacaggagctgaatatagcaaaatctagtgctataggtaacgtcaggattattgataatgcggtaactcagcccgagcctgttaagcctaaaaaaatattagttatcatagtcggcttagttcttggccttttggtttcagttggtgttgttttgttacgcgtattcttacgaaggggtattgaaacacctgagcaactcgaagagttgggtataaatgtatatgcaagtattcctgtttcagagttactaactcaaaaagctaccaaggtagaggggtggaaaagaaaggaacaatctgagagtcaaacgttccttgctattgaaaatccagctgatatagcaattgaagcaattagaggattacgtacaagccttcactttgcgatgatggagtccagaaataatattttaatgatatctggtgctagtcctaacgctggtaagacctttgttagtacaaatttatccgcggtaatagcgcaaacaggaaaatccgttctttatattgataccgatatgcgtaaaggttatgcgcacaagttgtttgcgttagataataatcatggcctttcggaaatattatcaggaaaagttgaagtctctcgagctgtcaaaaaagtaactagtgcaggtttcgatttcatttcgcgaggacaagttcnnnnnnnnnnnnnnnnnnnnnnnnnnnncattgtgattctcgataccccacctatattagctgtcactgatcctgcaattattggtcattatgccggtactacattacttgttgcaagatttgaaaaaaatacagcgaaagaaattgaaataagtgcaaaacgttttgaaaatagtggtgttattgtgaaaggttgtattttgaatggagtggtgaagaaagctagtagctattatggatacggctacaataactatggctattcgtataatgataaagagtaa

SEQ ID NO: 207942 - DNA, 687 bp, Klebsiella oxytoca
gtgtctggaaatataggggccaatccagaatccgagtcgctgtccgagtcagaatcgctgtcggaatcggagtcactgtcggaatccgagtcactgtcggaatccgagtcgctgtcagaatccgagtcactgtccgagtctgaatcgctgtcggaatccgagtcgctgtcagaatccgaatcgctgtcggagtcagaatcggagtcgctgtcgctatccgagtcgctgtcagaatccgaatcactgtccgagtcagaatcgctgtcggaatcggagtcgctgtcggaatccgaatcactgtcagcatccgaatcactgtcagagtcggagtcgctgtcggaatccgaatcactgtcggagtcgctgtcggaatctgaatcactgtccgagtccgagtcgctgtcggaatccgagtcactgtcggaatcggagtcactgtcggaatccgagtcactgtcagaatccgaatcactgtcagagtcggagtcgctgtcagaatccgaatcactgtcggaatcggaatcgctgtcagagtccgagtcgctgtcagaatcggagtcactgtctgcatcggagtcgctgtcagaatccgaatcggagtcgctgtcagagtccgaatcgctgtcggaatccgagtcactgtcagaatcggagtcgctgtcggagtcagaatcgctgtcagagtag

SEQ ID NO: 207943 - DNA, 204 bp, Klebsiella oxytoca
atggtacgtgataaattacttgaggctaacgatccttacaaaattctattcgtagatcttaaacaagtacttagtgttagcgatgaatatgattcatatcttaacaaaattaagaactgcttaacagaacttatcaaagcataccctaaaatgcttaatgcatttcagaagcatttattagggaaggtgcgaacaagttcctga

SEQ ID NO: 207944 - DNA, 702 bp, Klebsiella oxytoca
atgaataactccaggtatatgttttgggttctgattcttagccggattccatcattctggatttggaatgtgatcaaatcgcaagtggtgaaaagtaaaatatcacattcttctatccatattgcaccatcggatctctcatgtgaaaagctctctgagattttactgcccgaaaggactctgtgtccactcatacaagatgttgccgttttcgaagacctttttcttggaaaagatgaggggatattaaatcaaagtaagaaagatggattatctaaaaaagagttacaagttatgtctagtgcttttaatggcgatagcgttacctcacaggctgatctgcttggagtaagtaaaaaaacagtctataaccagagattatctgggataaagaaaatggtggggatagtcccctttctgttttggagttttcgtgaaaaatctgagatgcagatcgagggtatcaaaatgttgaacgcactgacgccatttgagcgagagtttgcgcatgcattatattgcaatgagttatttgttgtattacagcctataactaagggcacggatgaattagagggatttgaggttctgataagatggtatagtaacggtcaggttctgatgccagtcgattttctcccaaaattgcactctacttatgtttggataatactcacggcttttttaatacaaaaacggtga

SEQ ID NO: 207945 - DNA, 540 bp, Klebsiella oxytoca; identical to SEQ ID NO: 193090

SEQ ID NO: 207946 - DNA, 564 bp, Klebsiella oxytoca
atgacaaccttgaataaagccgtatcaattaaccaccccatcgcaagtattaaccatctgctaccttttgaacaacgtcagcatattgagaagctctatttcccaaaggttcaacaggccactgacaagatgtctaaagcagaaatggagtatcaggatgctgtagaatctcgttcagtgttgattaatcagaaagctgctgaatatctggctaatccttcagaacgtcacggattcattgtgaagcaggtttatccaactaaccagcaacaagtgattcaaagcatggctgaacaaggttatatggttcaccgtgtaggaatgggcttaatctatttcatctcaactaaaaagaatgccctgaaagatgcaactgataaggcaaccgctgaagctgaatcaaccattgaaaaaatgattgaacggctacgggtaaaagcctctgaagctgtccaccagcgaaacaagattgtaattgaagcccgtaaagcccttgattcaattaagccattcgaaagctatttaaacgttattgtaactgactctaaagaggtgtccgaatga

SEQ ID NO: 207947 - DNA, 768 bp, Klebsiella oxytoca
atgcccggccacatcgtcggtcacctgcagatcgctgaccggagtcaccgtcgtgtccactgtaatttcaaacgccggggaacgctcgctgacgttcccggccttgtccgtcacggtggtgctcaggctgtggtcgccctcgtccagggtgtccggcgtgaagctccagcgtccgtcctccccggcaaccaccgtacccagtaccgtgtcgccgtcatagatggtcaccgtggcccccgcctcggcggtaccgctcagggtcggtgtggcgtcgttggtcagatcgccgctggtcagcgggccggtatgcccggccacgtcgtcggtcacctccggcgcactggcagacggcgcggtggtatcaatcgtcagctcaaacgccggggaacgctcgctgacgttcccggccttgtccgtcaccgtggtgctcaggctgtggtcgccctcgttcagggtgtccggcgtgaaactccagcgtccgtcctccccggcaaccaccgtacccagtaccgtgtcgccgtcatagatcgtgaccgtggcccccgcctcggcggtaccgctcagggtcggcgtggcatcattggtcagatcgccgctggccagcgggccggtgtgcccggccacgtcgtcggtcacctccggcgcactggcagacggcgcggtggtatcaattgtcagctcaaacaccggagagcgctcgctgacgttcccggccttgtccgtcaccgtagcgctcaggctatgaggaccttcgctaagctccggtaa

SEQ ID NO: 207948 - DNA, 519 bp, Klebsiella oxytoca
atgcgcagcatcgcctccgggaatttcagccgcaccgcacaccgctcccgggggcggcgcaaagcgccttgcccgggctacaggttcagcattgtctgcgggcaggtagcccggacagatgcgcagcatcgcctccgggaatttcagccgcaccgcacaccgctcccgggggcggcgcaaagcgccttgcccgggctactgattcagcgttgtctgcgggcaggtagcccggacagatgcgcagcatcgcctcggggaaattcagccgcaccgcacaccgctccgggggcggcgcaaagcgccttgcccgggctacaggttcagcattgtctgcgggcaggtagcccggacagatgcgcagcatcgcctccgggaaattcagccgtaccgcacaccgctcgcgggggcggcgcaaagcgccttgcccgggctacggattcagcgttgtctgcgggcaggcagcccggacagatgcgcagcatcgcctccgggaaaaggcgctgcctgctaagagtgtga

SEQ ID NO: 207949 - DNA, 1200 bp, Klebsiella oxytoca
atggtgccgaaactacgatttagtgagttcaacactccgtggaaacaagtgtcattaggggaggtctgtgctgatgctgcttatggcatgaacagtgctgcaacagcatttgatggaagcaataaatatattagaattacagatatagatgatgaaagtcgggagtttagcccttcacctttaacgtcaccatctggtacgcttgacaataaatatcttctcagagatggtgacattgttttcgccagaacgggagctagtgtagggaaatcatatttatataaaaaaaatgatggcaaattatatttcgccggatttcttatcaggttatcaataaacaaagcaaatccatgcttcgtttataaccaaacacttactaggaaatatcgtaagtgggttaaaatttattcaatgagatccgggcagcctggcataaatgctgaagagtataaagagtttgatttcgcaataccctcctcagaagaacaaaataaaattgcaaatttcctgtcatctattgatgaaagaatagcgttaatgaacaaacagtataagctgctgtgtcagtataaaaaaagtatgatgcaaaagatttttagtcaggcgttgcgattcaaagatgataatggaaaagtgttcccagagtggacatgtaaaactattaatgaccttggggaaattgttggtggtggaaccccagacactaactcacttttatattggaatggtgaaataccttggttcactccttctgaaataaaagaaaagtttgtctctgcaagctatagaacaattacacctgaaggtttggcaacatcctctgcaaagctaattccagcaggtacagtattgtttacctcaagagcgacaattggagatgttgcgatcgctcaataccagtgttcaacaaaccaaggttttcaaaatatttgtgttaacaaaaacaacagtaactactttgtttattatttattatgttcacttaaaaatactttcattcgtcgtgctggaggttctacattcccagaaattagtaagtcaaactttcaatctacggaaatattagtaccttcattgtcagaacaaactaaaattgctagatttctctctgccgttgacgacaagatcactagcaaaaaagcagaactggataagttaaaaatctggaagcagggcatgctccagcaaatgttcgtatag

SEQ ID NO: 207950 - DNA, 3402 bp, Klebsiella oxytoca
atggataatttattaaaaaaacgtcttgtttcctggttaaaagcgggaaataccggcttttatttgcaaagtagtgaagaagaacggactgaccagcttttaacggctttctccagagagtcaggtcttgtcttaagagaatggaacctggcgtggggatgggttgattttaaaacacgcagacctgtacaggagttaacccagcatgcccccggtttcgaaaccatgctgtccgggctggtggatgatgatccggaaaatacaatttatgtgttccgtaatatacgaagtgtccttgccgcttcgcctttggctgtggtaaggcttcgggagtttctgatgagattacggcgccatcatcagggcgagagctgcgtagtctgtattgatgagcatgccgaactttccgacctgcttgaaccgctgatgaagcttattgaaatccctcttccgcaaaaagatgccataaaaagtagagcctgtgactttgccaaatctcacgtgctcgaagtgccagaggctctattaaacagggtcagtaccacacttacggggctgacattcagccagattgaccagtcgctgatgctggcattgaatattcacggtacgcttgatgaacaagcagtgtcgaccttgctcaaggaaaaagagcaaataattggcaaaggtggcgtacttgagatggtcagggtcagggacagcatggaggatatcggtggtctggaaaatctgaaggactggcttaagcgtaaggctgcggttttcctccggcttgcggaagcagaggaagctggcattcagccgcctaaaggagtgctcgtagccgggatgccgggatgtggtaaatctctcactgctaaagctgttgccggtttgttcgaattgcccttgctgaggttagatattggttcgctactcggcaaatatgtgggcgaaagtgaacacaacatgcgacgagccctgggaatggccgaatcaatcagcccatgtatcctgtgggtggacgaactggagaaggctttcgttggtataggctcatcgaacgcctcagaagtgacgtcaaggcttcttggttatttcctgacatggatgcaggaaaagaaaagtactgttttcgtggtggcaaccgcaaacaacgtgaccgccttacctcctgagctgttgcgcaaagggcgatttgacgaggtgttctatgtcggatttccctatatatccgaaagaaaagaaatcctcagaattcatcttaagaaagcctgggatatgttaacgactgaacagcagcatcagttgggttcgcagagtcggaattttgctggtgccgatattcataatgcggtaaatgatgcacgtgaaaatgctttccttgatggtgaggatttagatttccaaagactcagcagagccctgaaagcaactgtacctttgcgcgaaacgttgagggaccaggtaagtaaatatgagacgctgttcgataaaatgaagcttaaggctgcatcgcacatagatggcctgagcgtctcacaaatgattgccaaagcggatgatgataattatgtcgaacgattgaaagttgctgagaatgaggagtgcacggaagatcttctcgaaaaactctcggaagatacttatgcgccagttcgtttagccgtgtttaaaaatccgggctgtacccaacgattgttatcgaagtgtattacgggttcagaaagtgatgataaaaaggaccaggaaatacttaaagcagcctgtgttcaccagaatgcgccggccaaccttttaacatccctgatagagcgaaaaaaattaagtaaagatatcatgctgtctatagctgagggggaatattgtagtgctgtggtgctcgatggattaatggctgttaaagatagtgcgcttaatcaggctgtattacgtcatattaactgcgctgacagtattcgtgatgaatacgtcaattctggcgcactagcattgaaaaatgcactggcgtcaaatccaaccctaagcgaggcacatcaaaatatccttattgaggacaagcgagtaagagtttccttagccagaaatgcatcaattacggagttgaacaaaaaaaggttagcttttgatacggatcctgctgtagttcgagctttcgaagaaactttattaaatgactcatccgaatttgaatgcaagagtaaaaatagtaaatcagacgcattgttgcttgaaataaaaagcactaagcctgctaccttgatagaaatagcaagtaaaattaaccttcctgatatagttcagataaaattcgcacaaaccatcaataatatttccgccctggctgagtttgccaggaatcctacgctgtgtttagaagcccaagatatattagccataaaatgtggctccacaattaggtctattttggccagcaatgcacatcttgacaaaaaaacacaggaacacttattcattgaaggagacgagtcaatacaagaaataatcgctgaaaataattcgattactgaaagtatacaaaacagaattattgaaagtggtaaacgtaatcttatactatcccttgcttataattcaaacattacccgtgatgcatgcctcgcaatttttgatatggaagacaggaggttgcataaggttttatcgaaaaaccctgctttgcccgaatctgctcaaattaactatttgaactgtgaggataatgatgcggatgaattaagacgtggacttagtatcaatccgggcatatctccagttgtttttgagaccttagcatcgaatcctgattttcatttcttgttgctatcaaatccttcaatttcttcatttgactatagtaagattaaatctgaatttatgggcagggaagtaacagactataactcacacgcgcacaaattatatatgaataatccaaacctccccgagttttttcaacattactttatccagtccgcccaaagaaacccctacgcattaaagaaaatagcggctaatattggtatattaccctcatcacaggatatactcgtcgacagtaaagtccttgatgttcttttaaatttaatcgataacccttcaagcacaattcgcactataaaaacagcaaaagaaaatatcaccaggaatcctaagctctctactgagttacgagacttataccgttctaaaatccaaaacctggaaaataaaagattatcaaatcagtgcaaatataccacctccagtaaaggtttaattatagacccaaaaacaattgaagagcttaattataacaaaggtgtgcaacataacattgataaattaactaacattcgcaacctgatatctgagttagaaattgaaaagtctgaaaaagcctcaggatttgcttccatgctttggaataaagctcgctaa

SEQ ID NO: 207951 - DNA, 1581 bp, Klebsiella oxytoca
atggctgtaaatgagactttagataaggctgcaccagcggtattagatttatcacatctcttcgatgagtcgtttctggaaaatctggcggacgatgtcaacctggaactggttcatgatggtagtgatttggtggccactgccatcgttttaaaagaatttactcatcagatcagccagcatccggacgcagagcccgaaacctggctggttgctcagtttcgtaaacatgccgaactctgggaaagtgatacccttcttgtcaaagatgccaaagagattatcagtacggtcaatcgccagcgtgaattagctcaatccctgacaattagcctagaaaagggcaagagccgtaataactggctagctaagcaactggaaaattcggctaagtgtcacggcgttctcagtgtcagggattatgcccggggcattgatgaggctctgaatgaagcgaacaaaaaaatggcaacggccattttccgtactgatggcatgattaatatgaaccccaatcttgatggattcattgctgaagttcatcacgtcaatacctttaatgtgaatgcaaaagctgcggggtcatcatcaagagctgagctggtcattaatccagggaatgtttacaataaaaactctgtagatattcagatcaaagacgctaatggtaaagttgtgcgccgttatcagtcgaaatactgcgcagatgctaatgcgactcagacggcctttgagaaaggtgattatcgtggtcagggatcattggtccctgagaatcagtcagaagggatgacacgtaaatctgttgaagtcattgagcatgatggcatcaaatccacgccgctttctaaagaagaagccgttaagcaacgtgaaagagcccatcaggaaaagaaggccacagatatcgactgggccgttgccgacagcaaaactattggcaaggagttaggaaaaactgccctcatttccgcaggccttggcgtcgcttttcaggcggcccgaatttctggccgcaggatctggaatcacttgacaggcaaagagaacaactctgctcaggaggacattcgtgagtttgtcacttcatcggttaccactgcaggtggagcattgctgacggtagctatttcaggtggattaactgttgcatgcaaaaaaggatttttaggccaggtgatgaaaaactccccggtcggacgtctggctatgctcgggactgttacggtcgagaacctgaaaaatatacacgaccttgccatgggtaagatttcaaaagaagaagccctggatcgcatgggcagtacaacggtcactacgcttgcaggtatagccggagccgatactggcgtgactttaggcgccacaattggaaccatttttggtccagtaggaacttttgttggcggaatggttggcgggatagcgtgtggcatgttggggagtacgataggagataaaatctacacggcgtctaaatccctcgttaagtcagtagcttcttccatcggtaacacagcaagcgctgttggacagagtgtatcaaatgcttttaattctattatcagtttgttcagttaa

SEQ ID NO: 207952 - DNA, 939 bp, Klebsiella oxytoca
gtgaatacgacgaaaggagcgagtgagaagctcgcgaacagactggctgagatcatcatccagttgcatcagaaaagtcaggtaagccgtgtcgaactggcagaaaaattccatgtatctgctcgtacaatctttcgtgatttgaatcgcctcagcgccttaatagagcatagcggtggagacaattaccgcctctctcctgagttccgtcaatccttgctgatgagcgatattgaccacctgattaaaatttctggcgctgctgaaatctttgccggccagaatgctggattctggtcctctcttctcaaagacgatcagcatcacgaattctcagtaaaaacaatgtcccctgaatatctggataaaagtaacttttcccagacttttggcttgctgcgacaggcaattaattcgcacaaatattgctcttttcactataaaaacaaatcacgcctcgttcagccgtatcggttggttaattcaaaaaatatctggtacctggtggccgttgaagagcaaaaaccgaaaagcttcctggtaagcggcatctcctggttaaaacgggaagatggaacgttcgtgcctgaaaaatatatcgagcagtgtattgagcaggaagatgatgtctggtttagcctgaataagtttcccgtcacactgcatgtcgatgccagtgttgcccattattttttacgtcgaaatgttttgccttcccaagtcattactcagcaccataataacggcagtcttgaagttatttgtgagatagccgatgaaagacaattgctgccgtggatacgctactggttgcctcatctgagaattgtttcacctcaaaccttacactcggtgctcatacagcaactgaatgaagcacttaacctgttctcatccccagaagaaataaataaggagcaaaatgatggctgtaaatga

SEQ ID NO: 207953 - DNA, 318 bp, Klebsiella oxytoca
atggtcacacaacgttatgaccgcctcgcaacctgctgtccggaatgcggcaacgacatggagtacctcagcgaagtcggtgcggagcaacaggaactggtctccagcgccctgaaagtgacccgcacggtcaggatgaaaaaggcctgcatccgatgcgactgcatcggtgaagcctctgcgccatcacgtcccatcgaccgtggcatagccggaccgggcctgccggcccgcgtgttaacgggcaagtactgtgaacacacgccactgtattgcaagactgaaatcctggcgcgtcaggggggctggctgccttag

SEQ ID NO: 207954 - DNA, 2856 bp, Klebsiella oxytoca
atgaatgaagtcagttctgtacaggttaacttccttggtaaactttttagaaaaccctcagtcaattcgacttcagagacgttatggttttcccttcagggtaaagaagtggcccattaccctctcagggcgatgcgttcgtttgcgcatgttgatgagtcggtgctgggaagtcagttgcgttttcgttccgatggtactgagattaaaaccggatttttgcaaaaaagagcaacagcaaattttctgaggtttatcaacaaatctgtctcagaacatattcaggattacctgagaacatgtttttctgaatttgatgctttagtgattaaccattacccaagagacacctggtcagagcagattgaaagcatgctgtcagaactgcaccaacattacatggtgcaacctgaaatctggaagacgtatttacccgcttcggttattgagaggattgaggcgatggtaaaattctatccattggatatggcatccctacgtgaatatcatgaaagctaccaactttataaacgtgaagcattctttgatgttgtggaagcgaatcctctcacagctgagcagcgattaggtgttttaaggtctaatgaccgtaatatggttttagccgctgcgggcacggggaaaacatccgttatggttgctaaagctctagacctgatcgacagaaaactcgctgaaccttctgaaattcttgttcttgcttataacaaggctgcagcaagtgagctgaaagaacgtctggaaagcaaagctattaatggaaatgtaactctggtcaccaaaccctatatttccacttttcatgcgttgggcagacagatactcagagatgcaagtatttccactcagatgagtgtgtttgctgaggataactataaacttaaacagtgggttacaaaatggatttatgaatatatcagcgccgacccagcgcgcgtttttgatttgattgagctgacgaccccgcccgtcgatgctatgcagttcaatacgaaatcggagtatgaaaaatatctacgtgataatgatttcagaacgctgggtggcgaaaaggtgagaggttaccaagaacttttgctggctaacttcatgcatgttaacaaaatagaatatgagtatgaatcaccgtatgtaacgaaacggcggctggagctggggttcgactaccgtcccgactttcacattaaagatacaaatatttatattgagcactatggtactgaccggaacgggaaaactcgaccagacattgatgccagccagtacagtgaaattaaaaataaaaagcgcgctctccatgaagagtgtggaactacgttgatcgaaacatttcattttgaatggcaggagaaaaatttactaccagcatttaagactaaactagctgcggcaggggtcagttgtgatcctatgagcccacatgaaatttttgaaaaattgaaccaacagcaggagttaggaagttgggctgaattgatgacgaaagctctcaagtcaatccgcgtcgaaaggttagataaaaaaggaatattagagcgtttaacatcggcgaaaatatttaatgctgaaaaatataccgaaatattagatgagttgcatagtggttatatttatgagctcaagcatcagaatgcaattgattttgatgacatgatcatcagggcgatagaggttattgacaatggggcatatatcccccaatggaaatatgttctacttgatgaatttcaggatgtttctgctgccagaatggaattcattcagtgcattttagcaaaaggtcctacaccttctctgactgttgtcggggatgactggcaatccatttatcggttttccggcggtaaactggagctgactacacgctttggggatcttgttggtcattgcacgttaaccaaacttcagaaaacgttcaggtacaacaatagcatagccaaaactgccgggactttcattatgcaaaaccccgagcagtataaaaaggagattgatactcatcataaagttgaggagcctcaggtttatcttcttgatgataaagtcggtgttcaaaggagtttatgcgacaaagcgctggaggtggtaaagaaaataaggcagcacgaacccaccgcatcgatagctattatcgctcgctataattacctattagcagaagccaaacaggctgtatggggcgctgaatttaaagaaaacatattattctggagttttcataaatcgaaggggcttgaagcggactattgtattttgattggcttttctcaggggaaaacaggctttcctaacgaaaacagagatgatgctgtcatcgaagcgctgttaccctctctggacaccttcccgcattctgaagagcggcgcctcctgtacgtgggtatcacgcgtgcaaggcacaagtgctacatcattgccgatccaacagcaccatctgactttattaccgagcttcttacgccaaaatacgatttgcaaatcgtctctgataccttcaaagagcagtatcgcaaaatgtttaagtgctcatactgcgagccaggctaccttcgactggtaaagggtaagtttggagattattacagttgtagtactggactgggatgtacagtaggaaaggcaagggtatgtgaaaaatgcgctgcaccttcatttgatatgcgaagttacagccaatgcaataatcctgcgtgtgataacaaaatgaaaatatgtgaaaaatgtggcaggcctatgaaattaaagcagagtaagtttggagagttctgggggtgtagtggctatgggattaaagacgaccaatgtactcataaatcaatattaggtctgacttga

SEQ ID NO: 207955 - DNA, 639 bp, Klebsiella oxytoca
atggctgattatcatccggcagtttttgaatatcaggcttttaattgtccatattgtggagtttatgcgcgacaattttggcgcactctgtatggcaacggtcaaaatcttggtgtaaaagatacgccgtttcggatgtcttcatgttcacattgtggtgatagtgcctattggtgccaagaaaaaatgatagtccctgcggctggtaatgttgaattacctaatccagacatgccggaagactgtaaggctgactacatggaagccagaagcataatcaatctgtctcctaaaggtgccgctgcgctactccgcttgtgcttacagaaactcatgcgccatctcggtgaaccggggaacaacattaacgcagacattaagtctctcgttgagaaaggattgcctgtgcgtatccaacaagctgctgacatttgtcgtatcgttggtaatcaggccgtgcatcccggagagattagccttgatgatgaccctcagttaacacatggtctctttaagttattgaatatcattgttgatgaccgcatcaccagacctaaagaaatcgaagcgatgttccagagtatgcctgaaggtccacggcaaggcatcgaaaagcgggacggcaaggctagcggatag

SEQ ID NO: 207956 - DNA, 492 bp, Klebsiella oxytoca
atgagtaatcaacaactatcagccaaccaaatcgcctaccttaaccgcgctatgtcagacggtaatggcctcatcgaaatcggtgagttggctcggggtcttggtaaacgacctgacaacgttaagcgtaaactggagagaatcttcccggaggatcatttactcaatctgaggaaaagatataaagcctcaattggtaagggggcatcgcgggagattgaaacttacatgctcgactacaagaccgctggcgctctcgctatgtcatatgacggtatgttaggcattgaggtcttaaccattcttgaggactccctgagcaccatccaagcgatgaccatccaagccgcaaaagataactccgctggcgtccttaaggccgctgctggcttccgtgagcggtaccgtgagcgcttggtgttccgtccgggtgcctccgaaaacgaggaccgcagcgttgcccttaagcgccttggacgtaagggtctgtaa

SEQ ID NO: 207957 - DNA, 294 bp, Klebsiella oxytoca
atgattggtgtaatactagaactaatatcaaaggggatggattttttcattaagagaaaaactattaaaacagatgtagaaaaaacaaatgccgaagggcagatagaaactaacaaagaagagattgaaaaggtatcattccattggcgtaatgctcttggctttgtgatcaccttaatcattctctataactggatcatagtaccagtactggatgcttttggtattgtggttatccaagtaccattgggtcaactgctacaagtactattgattatggttggtggtagctaa

SEQ ID NO: 207958 - DNA, 291 bp, Klebsiella oxytoca
atggattttactaatcttatgacagctattggtgtgaagttaacaccagtagaactaacaccagaatgtaccgtatacatcaaactaccttcaattactcaacacgcagaagtttcagatccatataaagcgatcttctattgtgtggttgatgaaagtggtaaacagatttttgattcacctgaacaagttgaacagaatgttgatttaacagtacaactaaaactaaatgccgagatcggtaaagtgtttgccaaatcctttaatgttgaggatgtagaggcaaagtaa

SEQ ID NO: 207959 - DNA, 552 bp, Klebsiella oxytoca
atggccatgacggtcgaagggaagaaggaactactgaaacaacaattagagacagtagaagttcatgcgtcatggttcagagaacaccggcttttctgtaccgtgaacgttgataccgtacaggcacggctatgtgtctttgacagggatattattcagctattggataagctggatttcatgaggcttgagatctcagagaactttgaagggcttgaactcggtatcaatcatccagtacttaaaacactgttaaacgtgggctatcgattgttccttgatgatcttggttccggtcgggctaacgttgcggcgttaactactggatgctatgaggcggtcaagatcgatagggcgttctaccgtgaggaagtacagaaacctacattcaacgtactgatgaagaacatcatgaagtactgcccttatgtaatcgtagagggagtagagcaacgccaggagctaccagtattacgcgatgctggagtaacggcggttcagggctatctataccgttcagtaccgttcgacaagatacacaaccttatctaa

SEQ ID NO: 207960 - DNA, 543 bp, Klebsiella oxytoca
atggcaattttaccagaaaagatttatatggtttcaaacccatatgattatcttgtaacaattcctgctaaaacacttttcgttatttcatatgtcagtactggtaattcaattacattagataacagcaatagtgatagtgaacaatcatttactatcacctttgaaactaacgttgcttcagaaaagctattctgtacaactattactaatggcattgccagtacttcccaatgtgaagtaatcgatccaacaaaacatactgaagaatacgcacgtattcgtaaaatgattgaagagatcgaagcggtaattgaagcaaaaattcaaggtggtgctaactacagcattacaattaataataaaactctagttagtgagtcattagcaaacttagaagcaatccgtgctcgttatattgaacgtgctaattctctatgggctaaaatgaatggtcaatctacatctggttcaagtaaaccatttaagagtatgactgtatttcgagatcctaactatccagatcgttggggtactcgctaa

SEQ ID NO: 207961 - DNA, 210 bp, Klebsiella oxytoca
atgtttaatattgattctaactcaatcatgataatttctcactacccaatgtccatatatctattatgcctcttaattccttctataatcaatccgtatgaacaatacgacgctcagtatgagtataaattgcttacttcctacaggacactactactagacccaggcaaagggactacttactattcagtacttaatcatgttctgtga

SEQ ID NO: 207962 - DNA, 315 bp, Klebsiella oxytoca
atgggcaataagaacggttacgatccatccataggtagaggtgttcatcagttctcacacgctggggtttggttcacggtctgttatcggggaagtgttcttgagcaattcaagtttggtgatcgggtgatatttgaaggttctgtaggagggttgttctggctgggaacggttgaaagggattgttttgtactgattagcgagacaccctttaacaacgtgttggatgctctagtttatctacatgctgaacgccgtgtggttgaacaacatgctgatgattggttctgtgggcaagaagaattaccgttctag

SEQ ID NO: 207963 - DNA, 249 bp, Klebsiella oxytoca
atggtggtggccctggtggcggattctcgcatggaccaggtttgcgttaataccagcaggccctttacagggcctattcgtatcaggtggtatcagtcgatacctccttttctgaacgaaaaaaacactatcacaggcgcctactgtaataccttagctggattgttcagcgctggtatcaaagagcggcaacgattcagttgcttcctgcactgctttcatcgtctttgctactacctcagtctctga

SEQ ID NO: 207964 - DNA, 234 bp, Klebsiella oxytoca
atgcgcagtgagagtgacgagtattacgatctggttaaacgttctacaggtgaaattgtgggcagtatcagggccgctggccgagccctggtgtacacggctagcgggattacttctatgcgaccgctacttgaggacgagggaatatttaatctcaacacaatgaccagttttctgcatcgcctcggctaccgagttatcccaccttctgataatatgaaatcaacggcctga

SEQ ID NO: 207965 - DNA, 264 bp, Klebsiella oxytoca
atggcagatgaagatcaccctacaagtcactattttcaaaagagattatcacaattgaaagtttgggagttttgtttaactttcatggctaacggagtgagaagttttgcgcggttgtcgacggcatattttgtgtatcgtataggcccctatttaccagtgcaaaaaagaaaacccgccgaagcgggttttctcatgctgccttaccatttctctctgtcaactttggcaaaattgaaagtagaaggctatccagttgtatag

SEQ ID NO: 207966 - DNA, 477 bp, Klebsiella oxytoca
atgtatcatatgagaggcaacagagtatccccgatgcaagaagaagaaatagcttataaagctatcaacttttgtaacgcattcggcatcgccgccaccaaacgcaaacgtaaacgatacgatcttctctttgaaaagctctctacttacgggataaccttaagtgttatggatgataaacagtgggaatctctaacatatgatctcacaatcggtcattgtgaccccgcatctcttacaataacaataccaaataaaatttatgaaaatgcttgcttaggagaagaacacgctctcgcagttatctttcatgagttagggcatttgcttctcgggcataaaccagtgttgcatttctcgaccaaagaacctactcgtgtggaggatgcagaatggcaagcggatacgtttgctgagatcattctggaaacaataggggttcgaacaagccaaatgtctttggatttctatatgtga

SEQ ID NO: 207967 - DNA, 360 bp, Klebsiella oxytoca
atggcactcactgaattcggtaaggccgtcagaaaagcgaggatagatactggcagcacacttttaaccatgtcccaggaattggaaaccacccctgcatttttgagtggtttagagaccggtagtaagaaaatcccacagaagtgggttaaaaaaatagacacctatttcaattccaaaggagttcatctcgaacatttggaagaacttgcggcggtcgcaaatgaaactgttccaattgatggactttcccaacagcagcagatgctggtggctggtttcgcaaaatcgcaatttacgccagagcagctcaaaagctttgctgaactgttacaaaagatcaacaacaatgaggtttga

SEQ ID NO: 207968 - DNA, 996 bp, Klebsiella oxytoca
atggaaaatcatgacgtttatatatacacaggtgatattcatcgggatggttaccaagacctcaccaatgagataaagaaacgaaaagctaaacatggtttgagaaaagatgttatcttctgtttagctacctatggtggggatcccaatgcgggttatcgcattgggagggcattacagcacaactacgacgaggttacgttgttagtagttgggccatgtaaaagtgctggtacattgattgccatcgcagccaacaaactcgtcattggggatatgggtgagttaggtccgttagacatacaactgaaaaaaaatgatgaaatcggtgaaatgagctcaggtttagccatcatgaccgctctagatgcgttaaaagatcgctcaatttctgcgtttaactctcatctagtgaaaataagatacgaaaatcagataagtaccaagatgtctgctgatatcgcgactagacttactgaagcacttgtatcgcctatggctgcccagattgaccccattaaattgggagagcaccaaagagccatgagcatagctttcacctatggtcagcgacttacagctaagtccaatattctcaaagatggtgctttgggaaaattgattgcttcttatccttcacatggttttgtgatcgatcgtaaggaagcaaaggaactattcaaatgtgtagagagtcctagcggtttgaccgaaatgctctatgcattattttgcgataaaatccatgatggtgagatagcaacatacgggaaaccgacagttgtggatttcacccatgatacggataacaatgaggaagataccgatgccaaagaatctgaagccggagatggaaagactcaacagaatgttggaaagccagatccaggaaagccaagatctggcaagaaaagcagagcaaaacctagacgagatcaagcgccaattggagccgtaccagttcaacaacctgatggacagcaacctgaagcgtga

SEQ ID NO: 207969 - DNA, 840 bp, Klebsiella oxytoca
atggagcaagagcaacaaagcaccgattcactttatgattttctttatgttgacaatcagcgcgcatcttcgcttctcgctcaaatgcatgggccaggcgtcgtaacatccatcaagcatgtcactgcagaaattgataagtctatgtccgatgcagggtttgacttaaaaattgtgaaatccaaaattggtgttgaagaaactatcaatcagacacaagaaaaaagttttgatgcctcctggacgctgccaataaacctgctcgataagcttgatgagaacgatttgataagaaccgagctcaacggagagaggctgggcagcactgttctatgcaaagggaggatgagaatttttgatatctcagttttccaaaaaagcgttccatttatagcaaagatgatggaaatgggacagccaaaactcccgcctaaggcaaaaaaatcaaactttaatgttgaagagcaattgattgcccctggagtgacatttggcatgatgaaagaagtattaaacatcgtcccaaacacattacaagttgatttcataaacgaatcagctcaaaccatatggatgactataaatcgagattacctgacaattaatccagatgatatggtactgaagtatggttcaagcctccctggtgagtggtatgtaattggtttcattgatgctcttccagaaaccgaagaagacatgacggatacttttaatttcgagcctaactcaatgaaagacggtatcaccggtatgctgtctggaataagggatttagctgggcgtagcagtaattcatacggaatgacacctctagttattttcagaaaaattcagtga

SEQ ID NO: 207970 - DNA, 135 bp, Klebsiella oxytoca
atgggcgaaggccgtatgtttctaatgcaattttttgttgataaaacatctttttttgatgaggtgtgggacgagtggaattggaggaagaactcgcggctttcattgccggcgaagtgggtggcgttgctttaa

SEQ ID NO: 207971 - DNA, 624 bp, Klebsiella oxytoca
atgatttttaacggggaaatggtgagggccattctcgacggtcggaagacgcagacgcgacggacagtgaaattccctgtacatgataaaaaccttgggtgcgagctggctggcaatgaactggccggggagctgtcggcagggaactatctgaacagcgcatttggcaagccaggcgaccgcatctggctacgagaggcattccaggtgcatagccgggctaccgacgtcgccacactggtatacaaagccagcgtgcgaaattccaggacggggcaaacccaacgagtgcatgtggcggtctgtaataaaccggcaactcctgagaagtggacaccagccatccacatgccgcgctgggccagccgcattctgctggaaatcagcgaagtgcgcgtggagcgattaaacgctatcagcgagcacgatgctcaggctgaaggggtagtgaagctacgagggggattctggcagcactatcagccaggctggacgcagcatcaattgagcgcccgcggctcattcgtaactctctggaaatcaatctacggcgaagaatcatggaattccaacccgtgggtttgggtcatcgagttcatacgtcttgaggagcgcgcagcatga

SEQ ID NO: 207972 - DNA, 636 bp, Klebsiella oxytoca
atgaagcagtttctggattttttaccgctggtagtcttcttcgcattctacaagctatatgatatttacgccgcgacaaccgcgctgattatcgccaccgccatcgtgctgatctacagctgggtacgctatcgcaaagtcgaaaaaatggcgctcattaccttcgtgctggtcgccgtgttcggcggattgactatcttcttccataacgacgagtttattaaatggaaggtaacggttatctacgtgctgttcgccagcgcgctgctgtttagccagtgggtgatgaagaagccgctgatccagcgcatgctggggaaagagctgacgctaccgcagcaggtgtggtcgcgcctcaatctggcctgggcggtattttttattctttgcggactggccaatatctacatcgctttctggctgccgcagaatatctgggtcaacttcaaggtcttcggcctgaccgcgctgacgctggtcttcactctgctgagcggcgtttatatctatcgccatatgccacaggatgacaaccaccaagctgccattctcccggcacgcagctttgcgtgccgtctcccccttgctccactgttatgctctctgaacaggattaaaaaaccgttttcttcatga

SEQ ID NO: 207973 - DNA, 1581 bp, Klebsiella oxytoca
atggctagaaaagcattaggttatgacagttttataacatttttattcgatgcagatcatccgggcttaacaaaaaattataactatgcaacaccatgtcaggatgaatttcttaaaatcattgcatcagtagaccagtctaaatctctccatgcaggggttcgccatggtgatgtccttattcataatattgcatcaaaaccatctaagtttattttccatccaaggccatctaaccctgatatttcttcttggactgcgggtagctatcaaggaaaaactgataaacgtgtattgtatactgcaattaatgaacttaaggataatttttctagcacgaaaacgtcaataaatcttgagctgatgtggcagaaattgcttgcgcataatatatacagcctttcgctttacccagtagatttagcccttgcaagtctgatagacaacaagtttatgagcttctcaccatatattggtatggccgaattggacagatatagctacttgcatattcgactttttgcagaacttccggattgtggtttttttcatcatggtacaatgttcagagctctttctatttttgatgagaaactggatggttttggtagcgaagttcaatcaataattcctattgtatatctacctttcattgaatatacagaacaagcaccaagttttccaagtagaagtaatttgtctgaacagttagaaaaactacctaataaacttcagactgtaatgcaggataatcattctgaacggatagctaaagagttgttatctacatttacttcagaaagtgagactttgtttaaaattgaatttgctactcaagcatcagatgatgactatttaaaagttcctgttgaaaaacttcttaattatgctttgaatatggaacatgaaaaaggaaagcataaagcctttcttttttatcagcatcttggaatagattccagtcaatggcgttaccttgcgtatcaattaataaatgaatccaatggcgcaaggatattaaatataaccagaacggaacatgctacaaagtatgagaccatcgtcgaagtagtaggtttaaacggaaacaagtgtgcagtaaaggcagcatggaagattagtgaaggtatttcacagctcattacggtttatcccgaaaaaaaacctcaagaagcacctaaagagaataccacgccactgcatctgattataaatgaaggggatgatgaaaattattggaggaatatatttgaggctgctcataacgaaggggttaaatctgcacaggagtgtattccagaacctatgccatggggaagttcattccgtgagagcggaggaatagagtctgaaggcaaatgtggctatgcatatatcatattggacggtgaaagtgactttgctaagtgggttttgtgtaataaatatggtaacaaaattcggggggcaactgatattgaaattcatgccaagagtagaagtcagtcaattgacagagaaaaggcctatgctgtttcattttcaaaaattctgtggctcaatggaattgatgtaagagatattactcatgttttaacttag

SEQ ID NO: 207974 - DNA, 2550 bp, Klebsiella oxytoca
atggatactatgttaaatagccttaaaattgcaagttcagctagcgaattaataagtaatgaaacatacgaacgtctcaaaagattaatttcaacaggtaacgctctagtattcgtaggcgcaggattttcaaaggactcaataaacataattgaaagtaccccacctttagcgaaagatcttgctttgcaaatttctgataagtcagcaaactatttaaaagaaatcggtgccgattctaactatatagaagaaattaagcagtgtgatgatttaatggtggcttcagatttctttcttaataacattcctcgaaaagatgaacttctaagattacttaaagataattatacaattaaagatgtaactcaagaacaattagatatctttagtatgaaatggcgaaggatatacactacaaactatgacaatgctattgaactttctttgattaaatcaggaaaatcggtcactcctcttacactcgaagatgtgccaaatcagtataagtccgctgaagatatctgcctccatattaatggtagaattgagcgttcaaaagaaaacgatctagactccgcaataaaactgacaacatcatcatatctttctccagagcagtttctaacatctagttggtatagacagtttaaaaccgacatagacaatgcgagtgctatagtttttcttgggtattctatgtatgacattgacattcaaaagatttttttcaatgatcaatcaattaaaaataaaaccttttttattacaagagaaggtactacaaaattccaaaattataagttagccatgtttggtgaagtaatcaacattggtgtcaacgcattttctcatattgcagccaaatgcattgaagaatctcatcaagataaagatgttggttttatagattctttagaactttacactcctgaagagaaatgtgaggaaataagagataatgatgtcgccaattttatggtttttgggaaagtgagtgaccgttatatagacgaggttactctcaatgacaatatgcaagataagataatcttacgtgaagaaattagtaagattattgagcacatagaaacagcaagtgatattttaattgccagcgatttaggtaatggaaaaagtatcatgacacgaatattgatgtcgaaattatcaaggaaaggatacctttgtttttattatttatttaatgaatttagcttcagtaaggacattgaacgactatcccgattgggacagaaaatagtaatcttcatagatgattatagtaactgtattgatgatactcgttatgctatagaaaaccgtaaggacaatatacaacttgtacttaccactcgacactttggctatgaaaacactaagcaacatttactagcgatggatatgagcaattttaaaactcataacattgattatttatcagattccgaagtggataatttcgtctatatagttgaccacctaggtggatggggcgaaaaagcagggttatctaggcgtgagaaattatcagagctcgatgaaaatgccaaaagtcaactttcgttcttgctattatctatccttaaatccgaagctatacaatctagaattaaagaaatatctagttttgctttaaataacaaagaatttaaagaaacagtttttgctattttattattagatgttattggtctccctttggtaagatctttaatttcagatgtggctgtcaatgaaaaaatatatagctcagaatttattgagaatgagggtgtgaaaaacttatttattataagtaatggcatggttaagactaaatctagtacgttgtctagatttctgatagcaaatgtttttgaaaataaatatgttgttaatcagatacttaaaattgttgagcatttgaatgttattaataaggatgcaaaagacaataaattatatactttgattacttctttactgaggttctctattattgaaaaactcctcccgcaaaggcgtgtggaaataaactacttttatgagaaagttaaacatattatacccgcactaataaacgatccacatttctgggtgcaatatgcaatgtccatgataccatttaaagattatccaagtgctgaccgatatttagagactgcctattctttggctgcaaggagaaataactatcatacaaaaaatattgatacacaacgtgcaagattacatcttttggtctctcttacaaaatctgggaatgaagcatttcttgagtttgaggctggtgataaccttatccgaattataccaaatgatatttataaataccgccaggtgcatagatatcgtgaagtgtatgagaaggtttacccaacatttaatgctaaacaaaaggtattttacgagtatgctgtaaaacgtattataaaagaatcagaaagtcctgatttggttgaggatttaacatataagattggcgttaattggctcgataagttgcgtgaaaatttaaaaatgatcgtggaaaatatacaggaaaacagacctaaaggtaaaaaatga

SEQ ID NO: 207975 - DNA, 243 bp, Klebsiella oxytoca
ttggctgcatcgcctgaatgcccgccaaaagagcagcaggagcagaatgtagccacccttaggctacagcaggcctttgaagccagtcagaagaacgaaaccgcctggctgaaccgtaaagccgaactggcggccgcagagcaggaatatcaggaacaggcgctggccggggatgaccgtataccgggcagaatgcagacactgcgcgacattatcgatgtcaaaaaatgggagataaattag

SEQ ID NO: 207976 - DNA, 1677 bp, Klebsiella oxytoca
atggatgaccaaaagagaggtttgataaatattaaaagcaatttattggttagtgcctgccctggggcagggaaaacaaagctattaattgggatgcttgaggataatttatatcataatgaagcttttcgttggcatattgtactaactcacactaacgctgcagctgatgagatctctggaaggatagataatcttaatatagatactgagagggtttggtgcggtactattcattcatttcttctagagtgggttgttaaaaaatatgctggcgccataccgcgacttgtagacggattttctttaattccagaatataagaaaaataaaataatccaaagcatagaagtggataagaaattagaaactagactacattataattgtgatgagaaaggcaatgcatttgtagaaccttattgccatttggtggatagtaaagataaagaatcgctagtaatccatgaatataatcgtattaaagaggataatagatatattgattttgatgatattataaatttaggcgttgattttcttaacaaaaactcaaaaatatgcgagcacctttcaaagttaattggaaatatttacttagatgagtcgcaagacaccagtttaatccaacttagagccttgtcatatataacgagatataatcgtgtttctgtttttatagttggtgataatgaccaagctatttatcaggatctaggggtatctgtaaagaacaaagatacccttaaatctgaattacaattatctgaattaaggcatgaaacgctgtctggttgttaccgatctcataaatcactggttgattattataaaaaatactctacctcgcagaatgatgttatttctatgcgagaaaatgatggtagctcccctattataaaagatatatcgaaagatgaattacctaaaagaatttttaatttaataagtcaatatcactcaaaatataacggtgttgatggtatagcaattataggccctgataagtactacctcatggggttgatcaatgatttgtatgatatttctgaatgttttgtttatgattttcaatatacaaatcctctttattgtgttagaaatactgttttttatgaattaataaaattagttctcctagatgtaagtgtggttaactatcaaagaagacattctctagcaagaaagataatcaactcaatccctgagttaaatcatctaaatccattgcagcttaagcgtgatttaaaagagttccaatctacaaaaaataattttattttatggttgaaagaactatatgtgtttttagaagtaaaataccacaaatctattaagttagagacagattacaatatttgcaatacagcagcttccgtagcaaaacttaaagctggcatgggagcaataaaaaaaatgataaacaaagataaaaatgttgtatctgtatctacgattcatggctcgaagggtgaggaatatgattatgtaatctctattggctatcatgacaaagtcgttccacatcaatcgtcttatgataaaggaaatgattatgctcaagatattgctaacagattaatgtatgtggctttctctagagcaaaggattacatgaatatatttatagatgatcgaaaggcggttagccctttctttatccgagaattggactga

SEQ ID NO: 207977 - DNA, 2133 bp, Klebsiella oxytoca
atgtttatcaagacactctcgttaagaaattttaggaattttaaggcaacatctctgacctttaaaaaagaatgtgttaataccattgttggcgaaaactcatcgggtaaaacaaatatttttgaggcgatgagacttatacttgacgatactttgccatattataaacgatatctttcagaaaatgattttcacagaggattaggagctgcatttggccattgggtaatagttagcttggagtttgatgagattggaggggatgaggaatcagaactactgtgtcaattaaatactactgtcaatggtggaggtactggccggataacttatatttataggccgcagttttacatcagagaacacctttttaaactaaatgaaattgcagattatgaagcacgtaaaagtgcatatcatactctgaaagagcagtattcaattgataagacaacctatgaatctttagtgttgtgccaaggtactgcagattttagtgataaccaaacatactctcttatggttggtgattttgatacactcttattctcagatcctaagctagaacgaattaatttaattggtaacaggcaacgtaattataacatacaggacaatatcagttgtacctatgctcgtgccttgagggatgtggttagtgagcttaagaacaatagattcaatccatttcaaaaactcttagaatatgtatctaaaggaattgataatgatgagactttgagcaaaaacatcagagatgtgaatgaaagaatatcatcgattgatgaggtaaagaaactctccgatggaatatcattatcaataacgaatgctgttggtacaacgtattcaccagttttaaatgttacctctgaattaccctgtgagctcaaagaattggttaaggttttacaattaaaggcaggagactcactttgtgaaggatatgtctccgaactttcagagatgagtcttggaggtgcaaatttaatctatttggctttgaaactgtatgagtatgaagaaggtattagtaaaaatcttctggctaactttctgataatagaagaacctgaggcacatattcatactcatatacaaaaatctttatttagcaatctcaaaaataataagacgcaggtttttatttccacgcattcaacccacatctcatcagtatcgaatatttcaactactaatgtacttgtaaaaaatggtcttgaaactatttcatgctcaccttccaaaggacttgaagaggataaaattaatcgtattgaacggttcctcgatgccataagaacagatattctttttgcaaaaaatgtaattctaattgagggagatgcagaggaaatattaatacctcacctcgtcaagaatacttttggcgtcacacttgatgaacttggtatttcattgatatctgtgcggggcactggatttgaattgctatcttcattgtttcatacagatcgaatcaaaaagaaatgtgcaattttaacagacgatgatataaatctatatggcgataacaagcccaattatctatcacaagaagaatataataaagctgtaaaatcggcagagtctggtgctgcccgtaaagccatcctggatgaaattgttgaaaataacaatttcattcgtgcatattactctaaatttacttttgaaatcgatttagtcctatcgggagctgtaagctattttgatcagatagctgatgagtcatttgagaaaaaagccttttatagcccatatcaagaagcattctcatcctctgatagacaaaaaatcggatgttacgctttaaagttagcaaacaagcataaaaagggttggtttgccatgatgctggctgacaagcttgatcccaatttccctatacctgatgcactttgtcattcattaggatttactggtgattttaataaatttactctggctaagatggttcggcatcgtgtcgaagtcattaaaaatagagatgggaatagtttgttaaatagtattcttgggcaggatgatttagcttttgttattgataatttagatgctgctttggcagtgtttaaagaacatttccctagtgatcctttaacttttttgcttgaggtgcattatggatga

SEQ ID NO: 207978 - DNA, 366 bp, Klebsiella oxytoca
atgcgcaggtcacatcttgtgccattatcgactcaagcgttagatttacttaatgaactcaaaatgatgacgggtaactatcgttatgtttttccggggcggaacgatccgaacaagccgatgagtgaagcgagtgttaatcaattagtaaagcgtgttggctatgctgggaaggttactggtcatggttttcggcatactttttcgacgattcttcacgactatgattttgatactacttggattgaacttcagttggctcatgttgataaaaattcaattagaggtacgtacaaccatgctcaatatatcgttggtagaaaaagaatgatgcaatggtactccgattttatattaaaggtgtga

SEQ ID NO: 207979 - DNA, 327 bp, Klebsiella oxytoca
gtggtaaaactgggaaggggcgaacttttcgaagcgattggtatgctgtcattcttccgggagcaagtgctgggaccgatgctgtaccgtcgcgccaatctaccgcaacgtggggttcgccgcattgaatgccacaatatcgatcctgagggcctactgacctccacgctggccacgcacgatcgtgactccgtcagcatcgccatcagaaaggcggttgatgcttatatcaatctgcgcgctgatgcgctgccggaaaatatcgcggacgatgcggcacgacgggcgctccttgccatgcttaaagtgtattcggaaaggggttaa

SEQ ID NO: 207980 - DNA, 324 bp, Klebsiella oxytoca
atgagcttacaatttgatgtttatcgcaatccatcggagagaaccaatcagctacagccatatattatggttattcaacatgattattactgtgatttgtctaccagacttactcttccattaggctatagtactcggctggcaggatactaccactccgcgtctccacggataaatattaattttcaatctttattcctgaatacaccagggatcaccagtgtagaaaagagcaaattaaaaaagaagcatttcgtctgtaatttaaaaagtagccacggagatgttatttcagccatcgatgctcttattaccaatacctga

SEQ ID NO: 207981 - DNA, 1929 bp, Klebsiella oxytoca
atggacgcacagcaaaagcaacaaatcaataatgctttcaactcaatacttcgagcagactatattaccttagaaaaaatatctgagcttgatcaattagagggctacttcattgattcatttggaatattgaacaaccttcttcataaacaagatagttttatatctggcaggcgaggcacggggaaaacaacaaatttacttcgtggttactatgaatgccttaaaacaataatacctaaacctaaatctgaatccttactcggaaacgtaaaaaccctacctatatatatagatcttagtacttgcaatgatatattcgactctgagaacgaactttccttactcgaaattcattttattagacaaattatttccgctcttaaaaaccagctttctttaatgtttgacgacaactttctaagtaacttcagaaaacagcatcaaactttaaatgaacttgactatatagagaaagtacttgttcagggaataacattaagtaaatcaaaggttattgacagctccttagcaattaaaaaaaccggctcacatgaactttccggcgaactaagcccaaccagcgcaaaaatatcagcaaaagtaggcggcgctactgaaaacaatgaaagcattaaattcacaacagtaaaaggattaaatgcccaggacttcctcaataaaataaatgaaattaagacaaaagctggcattgatgctatctatgtatttatagatgaatattctgacctaagcctagactcacaattgaaattcagtgcgcttttgaaattatttcttggttcaaaagtaggtatgttctttaaacttggtgtaattacagaccgttttaactttggagaaaaagttatcattgggagggatattttccctatacctcttgattttaacgaatattctgagcgatttaatggtgctatagcagccatgaataaaatgcaaatcttcgttactgaactgatacaaaagagaattgaaaaattctgttcttcaatgacaataggttcaatattcaaaggtgacacaaccgaaataatgactcgtttaacacgagaaaccatcggcgtatcaaggacacttggaataattttacaaaacgctttttcccaagctcaaaccaattcaactgattatcgaattggtctcgcagaaataaactatggaatcacctgtgcaagaaaaacatatcaaaaacaattcattggtggtgtaaagcaaaaactcatacctggattctacatggatctatggaacaaaatattagaaaaagcgattacagaaaaaaacaaatttcctaacagagccgccagccacttaatgatagaccccactagaaaagagtacttaaatattttatgcgagaactttttgctacatttcatttccgaaaacatcgcttcaaaacatggtggtagttataacctctactctcttgactatgatgtctgcactgagtacaacattaagtacgcaaataaaaaagatgattacacaccaataagatttatttacgacccggtcttatctggctttgatgcctattttctaaaaaccaagcaaaaaagttacagatgttctgtctgtaataaaatttatgatgagaatgatgttataagatcaaaagtcaaacgctgctttgatgatgacacagttctaatcgagattattcatcaagatgcaccgatgaccgaaggaaatttcgctgaagtagagattaaaatcttaggattaatatctcaattaagtgagcatgaagctatgacagcaagagatattgcagactctgtaggctgtacggtgcagaaggttgcaatttgggggagccgagtccttgaaaaatcgggaaaaataaatattaacaaaacccacaaacctcacaaatactattcaagtgatcttgagcagtaa

SEQ ID NO: 207982 - DNA, 291 bp, Klebsiella oxytoca
atgaccacacgacaaaacgtcacgagcaaacccgaagcagcacctgccaagcctcagcagcctcagcagccgcaggtggagtcgaccgaattcgccacgccagagaccgtcgcagcgcgggctgctgtgcaattgacaaacatcgccggcgccgggaacaagcgcgaggcaatgcctggcccggtagtttggttcgatagcgtgcagctcaaggaacaaaccccatcggacagcatctttgtccgcgtcataaactcgatttatacgggctcttcgcatttaagggtgtag

SEQ ID NO: 207983 - DNA, 651 bp, Klebsiella oxytoca
atgcacagccagcacgcccctgattcagtacggatcgccgtctcctttggagccttcaccgctacgctgacggaactgttgtcaaagcagcgcgcagaggagcccggcaccgcgatatgtctcacggaggcttcgttttccgagcaggttcggggagtgaaggatggccgctacgatcttgggtttgccgtagcaccgaccgctgagaccggactgcagagcgaggtgctatggcatgatgagattgccgtggcggttcccgcgctctcaccgctactggagtttgcggaaattacgctggagaaggccgtgcagtatcccgtggtgctttggtcaacagaacactgtgaaccccttagccgtcaggtcatgcaattgttgaactcggtgtcgccgaaactcaacgtggttgaccacgcgaagtcgttcgaactcatggcagttctggtcgctgcgggctacggaatcggcttcgcggctaagtcacgcatcgatacggctcggaagctaggcgtcgttatgcggcccctggcgggatcgccgaacgatctgagcacgtatttgctgcgcactcacaacgtgccgtcttcgttcactgaacgactgatcgagcgagcacgcaagctcgatcagtctgtatcacccgattga

SEQ ID NO: 207984 - DNA, 474 bp, Klebsiella oxytoca
atgcgaccatcgccgcgcggaaatcacccatggtcaactatgggacaaagtacctgcatcagcctggaagaacgtcgaatagatgagacgacgcctgctatcgggagaagcttgcgagatggcgagcatcaaacccgagcgtcatgctcctcatccaccatgacacctgcacgaacgagcttcaggcacttctccgtctcttccataaggaaagctgcgctgcattctagcgcatctgcaacattcaggattaccgcgagtgtgggcatgtgctcaccccgctcgatccggcccatgtgcgcccgctcaactccggccaaattagccagtgcttcctgtgccgttccacgctctgtcctcaacgcctttaccgccatgccaaaagccttggctggctccgcctcaaaacgcttactgcctgtaggccggcctcgccttatttcacgcttttgcatctacaaaagcgtgaaataa

SEQ ID NO: 207985 - DNA, 276 bp, Klebsiella oxytoca
atgcggaacaatcagccagtaaccgaccgtgaggtcacctattcaagtggcgtgcgactgatcacgaccaccgacctgcagggcgatatcactttcgtcaacgatgacttcgtgaacgtctcaggcttcaccagaagtgagctggtcgggcagcatcacaacatcatccgccaccccgatatgccggctgccgcttttgccgatatgtggcagaccatcaagtccggccgttcctggaagggcctggtaaaaaatggcctgtgtcaagcgttctga

SEQ ID NO: 207986 - DNA, 474 bp, Klebsiella oxytoca
atggaattacgccacctccgttgtttcatggctgtcgcggaagaactccactttgcccgcgctgccgagcggctgcatatcgagcagtcgccactgtcgcgtgcgatcaaggagttggaagaagatctgggtatgccgctatttgctcgcacgacgcgaagtacgcggctgacccgagccggcaagctgttccttgagcatgtgccctgcgtcttcgccgccttacagcaggcccgcgacagcgtgaaggccgcggccaacggctaccacgatcagttgcgcatcgcactgtcagacggcatcacgccttcacgcttgtccgccttgctggtgttgtgccggcaagaggaacccgaggttgaaatccgtctgtttgaggtgccgctgtcgcagcagatcaaggggctgcacgacgacctctacgacgtggggctcgcgcagtccgacgaggttggcggcgccggtctggtctga

SEQ ID NO: 207987 - DNA, 411 bp, Klebsiella oxytoca
atgttgattgacgccgagcagtttcccttggtttggatgcgaataaatgcgccgagcaacaaccccgaagcctcgccgtttgtcgagttcgaggcgctgctcgcacgtaaggaggttttcgtgctgctcaatgacgaggggcttgataaaggcgagcatgaacattcgccggaagaaatgaagcaaacctccctttggatgaaacgccacaagagtgaattgcgggccttcgtcaaggcggcgatctacatcgagccgagtatcgccaagcggctggcgaccaaggcgttcgctgtggtgtacgagaagttctggggctatcccatgcttatcgttgcctccaatgatgaggcactggccctggcaaagaagctattgccaggcgagcaagaggatgcacgggcactctag

SEQ ID NO: 207988 - DNA, 852 bp, Klebsiella oxytoca
atgtcgagcgttaccatcaccgatctgactgtgactagggacgttgataacgtcccacgcccggttgtcgccctgggtgccacaacagtatccaaggactgggagcatgcgaggcatcaacatcgcaaggctcaactgctttactccgtgcgcggcatcctcaactgtgaaatcgaagacggtgtttggatcgtcccaccgcaatgtgctgtatggataccaggagacttgccgcactcggcccgcggttcgggcgaaacggaatgttattgcctgttcgtggagcctgatgcggcgccggaccttccccaaacctgctgcacgatttcggtgtcaccgctattacgagaattgcttctgaaggcggcaggctttcccgagctatacgcgctggggagccgggaagaccggctgattgctgcattgctggatgagttggcggcggctccggtggaagacctgcatttgccgatgccgcgcgatccgcgattgcgtcggctcgcggaaatgctgttggccgaccctaccgataaaacctcgaagggcgattgggctacccgcattggcatgagcgagcgaagcatgagccggctcctgctgcatgaaatcgggatgagcttcggacgctggcgccggcaactgcatgtgatcctcgcgctgcaacgcttgaccaagggcgaaagcgtgcagacggtggcgttggaactgggttacgaaaatgccagcggcttcgtcaccatgttccgcaaggcggtaggcaagccgccagcccgatacctctccgatcgcacgaccagtgcagagtctgcctctgtgcccggcatcatgcttcccgatcaaatctctccttga

SEQ ID NO: 207989 - DNA, 138 bp, Klebsiella oxytoca
atgatctatctccagcttgccgatcaagttttcaatctatcggtcttttccgaagtcctgttagcgatgccgagccaaagcgttattcaatccagacaattcctcgtcgaactgccgcacggtcaaggagagatttga

SEQ ID NO: 207990 - DNA, 372 bp, Klebsiella oxytoca
gtgacgcgaaagccgaacgccgctcagtacgttggcctcaaagatacgaatccaatcgtcgtacgagatctgatcgaatggtttgggatcgaagatgccgaggttgttgaccagaacatcaatgtctggaagctgttctatcagcatcttgcagctttcggcatggctcaggtcggcagcaattccggcgacggtcgcgtcaggaagttcgtgcttcaacgcatccaccgcactatcgacgcgggtctgggttcgaccgttcactgtgacgaatgcgccctcggccgccaacgcgcgggcggtggcaagcccgatgccggccgtcgatcctgtcacgagagccccgctttcctttcagtccaaaatccatga

SEQ ID NO: 207991 - DNA, 522 bp, Klebsiella oxytoca
atgaacgacaccgccacgacccccacgaaaaagcgcgccggcctgctcgaatcggcgatgctcaagctgttcgcgcgcagcgcgcacgtgctggacatggaggacattggcagcgccttctgcctcgtcaccctcggcggcgaagcactgcgcaacatcgagtggacgactgggaatcggctcgaaccgctttcagaacaaagtctattgggcgacgggcaaagcgggactggactgacgttcgcacggcgcatcgtatgccgcctacgcgatagcccgaactacgccaccatcaacccggagcgcggctcctgtcgttgccgatgcgcacgcgctgcacacataagcaatcatcgccgcaacctcgtccggcgtggcgaagcgctgaagcagcgaggacggccgggccgtggcgagaaactcacgctccatagttgccacatcgacgctgcggctcgcggccatctgcgccacgaaccgacccgcccccagtttctcgctcgcatcccctgcacgcagtga

SEQ ID NO: 207992 - DNA, 735 bp, Klebsiella oxytoca
gtgatcggtgccgatggcttgcactcgggcgtgcgccggctggtcttaggccccgagcagcagttccttcgctatctgggtttctacattgtggtcttcgccgcgccgaacttcctcggtctcgatcactggcaggtattccatcagcacggagacatcatgggcagcatattggccatgaacaaagacgccgagataagaacgtatcttggtttcggtgcaacggagcccttggactacgattaccgcgatattgacgcgcagaaacgtctggtggccgagcggttcgccggagccggctgggagtttccgcagatactggcgcacatgcaggacgcgcccgatttctacttcgacgcgaccaaccagattcgcatggaagactggtcgcgcgggcgggtggtactgctcggcgatgcgggttacagcgtctcgccggccaccggtcaggggacgaccgtggcgatggtcggtgcctatgtgctggctggcgagctcgccacccacacatcggcgctggtagcgggcatcgatcgctacgagcacgagttgcgcgactacatcgcccgcaaccaggatcttgcgcttgacatgatgacgcaagttacctcgcaggaaatgtcgttgggccagcccacggagacggacagcatcacgcacccggatagcatcccggatttcggcgaaatgattcagcccatcgacctcaagaactacccggaattcgtaccatga

SEQ ID NO: 207993 - DNA, 465 bp, Klebsiella oxytoca
atgacagctcaacaccccatgccgaacaaagacatcagccttctcgtttccggtgccagtgtcgccgggctcaccaccgcctattggctcgcccgcaacggcgtcagggttacggtggtcgaacatgcgtcccatctgcgcccgggtggccaggcggtcgatgtgcgcggccctgcgctagaagtcgccgagcgtatgggcatcctcgcccatcttcaagagcgcagcaccaagctgaccggtgtgtccttcgtggatgccgagggcaaggaaatctaccggagtacggaacgctccgtgacgggtggacgattcgacagcccggacatcgaaatcctgcgcgatgacctttgtaaggtgctgtacgaggccgtgggcgatcgcgtggagttcctgtttgacgacagagtcacgtcgatcacccaggacgagaccggtgtggacgtcgcattcgccaacgcctag

SEQ ID NO: 207994 - DNA, 570 bp, Klebsiella oxytoca
atggccccgcgcgacgagcctactcgaatcattgatctgattacctcattcggcagcaagagcagtccgtcatccaagcacatgaagcacaccacagaaaccaatcccaagaccaacggcccgaagtcgttccatgaacaacgcttggaggcgagccacctgcggccaacgatcgctcgcgccagtgtcctggacgcgctggagaaggcggcgccccgctgtctcgatgccagtcagatgtatcgcatcctcagcccggagttcgagattctgacaccagcagcgatctaccgtgcgctgagtgatttatggactgccgggttgttggttcgcacggacggcgcacatggccgtgccctctataccctcaagcctgacgagcaaagttctcatcctgacacgctgcgctgccactgtggtgcgcgactggtttttatcgaggaccgcacattgcgagagcacctgcgaacgttcgctgccaaggaaggtttcgccctcggcgacgagccagcctttaccgtcaccgtgatgtgtgcggactgccggcaaccccgcaaacgcggccgatag

SEQ ID NO: 207995 - DNA, 1482 bp, Klebsiella oxytoca
atgtcgcactctaagtcgtttcctatccgcattgacgccatgactgttcctcaacgtcgggccatggtccccagttggcgtaacaccttcctggcgatcgcggtcgcagccctcgccacgggttgcgccagcggccccgactatcacgccccggctttgccggaaaccgcggccggcccctttgtcagcaagccggctaccacggacgccgccgcatcgctgccggcggactggtggaagctatacgacgatccggtgctcgacggcttggtccaggaagccttctcggccaataccaatctgcgcgtggccctggcaaacctcgaccgcgcacgggccatctacacggaagcacgcagcggcctatttccctcgaccaacgtatctggaggcacgggctatgggcgcgatcagaccacttggtttggcaccggccaggcgcctaagcaatggagttacagcgccggactcgacgtctcctacgaactcgacctgttcggccgggtcaggcgcgacattgaggctgcgcgcgacgacactgctgcggtcgccgccgcctacgatgccgccagggtggtcgttgttgcggagacgacacgggcctatgtggacgcgtgcacctacggcgaatccatcgacgtagcgcgttcgtccatcgagttggcccagcgcagcctggacctcatcggcagccaggagcacgccggctcggcatcgcgtctggatgtggaacgggctggcgtcacgctggctcaggcccaggccgccttgccgccactgcagggtcagcgggacgccgcactgttcgagttggccgcgctgatgggccgcacgccatcgcaagtgcctgactcagcgcgcgcatgcaccaaggcacccgagatcgtcggcgcactgccggtcggtgatggcaccgcactgctgcgtcgacgccccgacgtgcgccaggccgaacgtcaactggcggccgacaccgcccgcatcggcgtggccgtggccgatctctatccgcgcgtcacgctgggcgcctcgggcaactacctgcgtaacgactacctgaaaggcaatcgcacgctttccttctcgttcggacctttgatctcctggagctttcccaacacgatggtggcccgaagccgtattgcgcaggccaaggcgcagagcgcggcatcgttggccagcttcgatggcaccgtgctaaatgctctgaaagagtccgagcaatcgctgagcgcctacggtgcggcgatggggcaacgcaatgccctgatcgaggcacgcaatcgcgccgagaacgccttccggctggctgaccagcgctaccgtgccgggtccatcagctacctcgatgtgatcgtggcacagaccagcctgatcgacgcgaaatcgcaggtggccgctgccgaccagcgggtaggttccgcacgagtcagcgtgttcaaagcgctgggtgggggatgggaacaggccattacgcagtaa

SEQ ID NO: 207996 - DNA, 3093 bp, Klebsiella oxytoca
atgcatttcaccgacattttcatccgccgccccatcctggcactggtggtcagcctgttgatcctgctgatgggtgccaccgccgtgttcatgctgcccgtgcggcagtacccctatctcgaaaacgccaccatcagcgtgagcaccaccttgccaggcgcgacccaggaagtgatgcaaggcttcgtgaccacaccgatcgcgcagtccatcgccacggccagcggcatcgagtacctcagttcgaccaccacgcagggcaagagcgagatcaaggcgcggctggtgctcaacgccaatgccgatcgcgcgatgaccgaaatcctcgccaaggtgcagcaggtcaagtaccagttgccgactggcgtgaccgatccggtcatcagcaagtccaccgaaggcggcaccgccgtgcagtacgtcgccttctacagcgacacgctgtcgatcccgcaggtgacagacttcgccacccgcgtggcgcagccgctgttcaccggcattcccggtgtagcttcggccgacatcatgggcggacagacgttggccatgcgtatctggatcgacccggtacggctggccgcgcgcggtctgtcggccggcgagatttcggccgcactgcgagccaacaacgtgcaggccgcgccgggccagctcaagagttcgctgaccgtcaccaacatcagcgccgcaaccgacctgcgcggcgtcgatgacttccgccagatggtcatcaagtccagtcccgagggcggtgtggtgcggctgtccgacgtggccacgatggagattggcggccagaactacaacaacgccgcgtttgccaccggcaagccggcgatcttcatcggcatccagcctgcgcccgatggcaatccaatcgacatcgtcaagcaggccaaggaactgatacccaagatccgcgagatggcaccgcccggactgacggtggcacccaactatgacgtggccaccttcgttaacgcctccatcgaggaggtcaagcacaccctggtcgaagccatcgcgatcgtcatcgtggtgatcttcctgttccttggcaccttccgcgcggtcatcatcccagtggtcaccatcccgctatcgctggttggcactgctgcgctgatgctggcctgcgggttctcgatcaacttgctgacgctgctggcgatggtgttggcgatcggcctggtggtggacgacgccatcgtggtggtggagaacatccatcgccacatcgaggaaggctacacaccggtgcgcgcggccctgctgggcgcgcgcgagatcgtcgggccggtgatcgccatgaccatcacactggcggcggtttacgcacccatcggcatgatgggcgggctgaccggcgcactgttcaaggagttcgccttcacactggccggctcggtcatcgtctcaggcgtggtcgcgctgacactctcgccggtgatgagttcgatgctgctgagttcggcacagggcgagggacgactggcgaagcgggtcgaacacaccatgcaggggctgaccgctttctacggacgcctgctggcgcgcacgctcgccgcgcgcggcgcggtgctgctggtgggtgcggtggtattggcggccatcgtggtgctgttcaatggcacgcgccacgaactggcaccaatggaagaccagggcatcgtcctggccgtcaccaaggcaccgcagtatgcgggagtgggctacaccgcccgctatgcagagcaggtcgagaagatattcgagtcgatccccgagttcgacagcagcttcatgcacatcgctggtattgctggtggccagaaccagatgctcggtggggcgatcctcaaggactggtccaagcgcaagcgttcagccaccgagatccagggccagatccaggccgctggtggttccattgatggagaaaccgtcaccgccgtgcagatgcccccgctaccgggttccagcggcggcctgcccgtgcagatggtgctgcgttcgcccgatgacttcaagacgctgtacgagaccggcgagaagatcaagacggccgcctatgccagcgggttgttcctctatgtgcagaacgacctggcctacgacagcccgcaggcgcacatcagcatcgacaacgccaaggccagcgaaatgggcgtgaccatgcaatccgtcgccgataccctggcggtgctggtcggcgagaactacgtcaatcgcttcaacttccacgaccgctcttacgacgtaatcccgcaggtgcgcggcagcgaccgcatgacgccggaagacctcggacgcttctacgtcaagtccacctccggtgcgcaggtgccgctgtcgaccgtgacccgcgtcgaaatgcgcccgcaggccaaccagctcacccagttcggccagatgaactcggccacactggaaatgctgccggtgccgggcgtgagcatgggcgaagccgtggcgttcctgcaggcgcaagaactgccgcccggcaccagcgtggactggctcagcgacagccgccagttcgtgcaggaaggcaaccgcctgctggtgtccttctgcttcgcgctggtggtcatcttcctggtgctggcggcgcagttcgagagcctgcgcgatccgctggtgatcctggtgacggtgccgctcgcagtctgcggcgcgctggtgccgctgtggctgggctttgccacgctcaacatctacacccagatcggactggtcacgctgatcggcctgatctccaagcacggcatcctaatggtcaccttcgccaaccacatccagcaccacgagaacctcagtcgcatcgaggccatcgagaaggccgcggcagtgcgtatgcgccccgtgctgatgaccaccgcggcgatggtcgccggcctagtgccgttgctgttcgccgacggcgcgggttcggccagccgcttctctatcggcatcgtggtggtgatgggcatgctggtcggcaccttcttcacgctgttcgttctgcccaccgtctacagcttcatcgccaaggaccatcgggcagcggcggaaagtcctcgtgcccgcgaacttgcaactgcggaggcacccgatgtcgcactctaa

SEQ ID NO: 207997 - DNA, 1146 bp, Klebsiella oxytoca
atgagcaccgccgttatctcccgtgccaaacccgttgttatcagcgtcattggcctcgtcgtggtcttcggcctgctgtatgcctggcgcaccactcgcagcagcggcgcagaccatcaggccatgccgccgatgcccgtctcgacaatccgtgcagagcctcgcggcgtgtccgaggagttgcaggccgttggcagtttgcaagccgtgcgcgaagtgctgctggcccccgacacgtcagggcgcgtgaccgccatcaatttcgacgcgggccagttcgtgaaggaagggactgtgctagttcagctttacgacgcccccgaacaggcggatcgtgccgctgcggcggccaaggccgactttgcacaattgcagctccggcgttcgcaagagctggcccctaccggcgccgagccacgtgaactgctcgaacaacgcaaggcggaggccgcccaggcggtcgcggcggttcggcaactcgacgcgcgtatccagcagaaggccgttcgtgcgccgttctccggccagatcggcatccggcgcatcaaccccggccagtacctcaacgccggcgatgcgatcgccacgctgacccagctcgatccgctctacgtcaacttcacgctgccccagcaggatttgcccaagctgacgccgggcgcgtcggtgcaggtgacggtggatgcggcgccgggccaagtgttcaacgcgaaggtcagcaccatcgagccacgcatagacggcgaaacccgcaacgtggccgtccaggcactgctgcccaatgccgaccggctactgaagtccggcatgtattcgacggcgaagctggcgttgcccgccacgaccgacgccattgcgttgccgctgacggcgatccagacatcagcctccggcgacagcgtcgtgctcgtgcaagagatcaatgcggaagggatcggcaaggcggttgcggtaccagtcatcaccggccgccggctcggcgaggaagtcctagtgacgcatggcgtcaagcccggcgacatcgtggtgacagcgggccagaaccggctaccgcccggcgtgacggtgaagatcaacgcggccgctcctgccgccgcagtgctgcgtgccgccccggcggtcgcatctaccgccagcgcacgctag

SEQ ID NO: 207998 - DNA, 2316 bp, Klebsiella oxytoca
atggcggatctcacgactactggaaagctccgttggcaaattgatgtgcgagcgatgcccgccgtcgatcctcatctggatgggccgtgcaagggcgtcatgaggagcgcgccccgcactaggcttggctcggcagttgcggcggcaattttcattagcgcgcagggcgcattcgccgccgagccaacgcagatccaaaacaaggatggggaaaaatcgtctcaagaggcgatgaccttgccggccgtcaccgtaacgggccgcgtggatgcggcggcaaccgagggtacaggttcctacaccaccggcgagacggcggcggcgactcgcctgccgctgtcgctgcgggaaacaccgcagtcggtgacggtcatcacgcgccagcgtatggacgaccagcaattgaattcggtgcaggacgtgctggagaacaccacgggcgtcgcgtcataccagtccgacagcgagagaacgagtttctattcgcgcggcttcctgatcaacaacattcaatacgacggcatacccactgtcgtcggcgacatcatcaacggtagcggcatcggctctctcgacactgcgttctatgatcgtgtcgaggtcgtgcgcggcgccaccggcttgctgaccggcaccggcaacccctcggccgcgatcaacttggtgcgcaaacggccgacccgcgaattctcggcggccgcttcgctcggcgcggggagttgggacacctatcggggcatggccgacgtctcgacgcccttgaccgaggacggtcgcatccgcgcgcgcctggtggggacgtaccaggatggacactcgtacatcgacggctacaagccggagaggaaggcgttctacggcatcatcgaggcggatctgaccccggacacgacggtgagcctaggctacgactaccaggacatcacgccgaagggctccacctggggcggcttgccgctatggttcagcgacggcacgcaggcggagtattcgcgttccaagacctacgcgcaggactggagctattgggacaacacgctcaagacggcctttgccgagatcgagcaccgcttcgataacggctggaaggttcgggccgtcgccaaccagtaccgcaccgaatacgatgccgagctgctcggcctggtcggctaccccgaccgcgccacgggactgggtacctacccctatggggcctatccggtggcgttggccgcggaagggcgcagccgtcaaaacgccttcgatgtgatggccagcggcccctttgaactgctgggccgtcaacatgatctggtggtgggggcgacgagttcgcgtcgcacggccagcaaggaggaagtctcgcctttttatccaggctttgtgccggtcaatgtctatgacctgagcgctgcctatccccggcccgacttcgatgccatgacgtccatcccgacgcgcaccaggatcaagcagagtggcgtctacagcgcggcccggttttcgctggccgatcctctgaagctcatcgtcggcggccgcttcagcaactatgaaattgacgagagcgtcagcgggacgcctttccactacaagaggaccagcgaattcaccccgtatgccgggttgatctacgacatcgacaagacctactcggcctacatcagctacaccggcatcttcaacccgcagaccgactatcgggacagcaacggcaacgtgctcacgccgtccaaggggaaaaccaaggaaatcggcttgaaaggcgagtacctcgacgggcgtctgaatgcgtcggtcgccttgttcgagaccgagctggacaacgccgcccagatcgtcgccggaacctatacgccaggcggcgcccaagcctacaaaggcgtcgatggcaccaagtcgcgcggaatcgagctggacctacagggcgagttggcgcgtggctggaacatctacgctggtatcgcccacttcacggcgaaagatggcgatgacgtccgcttgaattcgcaaataccgcgcaccacggcccagcttttcaccacctaccagttgccgggagagtggaacaaattgacgctgggcggcggcgtcaaatggcaaagccgcatctaccaggcccccaacaccggcaccagctcgttgggcggggagcagagttcttatgccttggtgtcactggtggggcgttacgccatcacgaagaagatcaacgtggcagtcaacgtcaacaacttgttcgacaagaagtacgcgctacagaagggcgacttcgacaccgtgagttatggcgcaccgcgcaacgtgatgatgacgctgaactacaaattgtga

SEQ ID NO: 207999 - DNA, 459 bp, Klebsiella oxytoca
atgttgtccaaatccccgccctgccagcagccccctgtgaccgtgacccaccaacagaacaggattgccttgttctggctgaccaccgccgttggtgccgtgctattcgtgacgctgcaatcgttctcctacgtcaacgactacgtggtggcgcacggcgcgatgcccaccatcacgttcgatgccggcgcgctgtggatggtctccgcgttctatggcgcctggatcgtcacggtactgctggccttggccggaactgccaggacgcaatgggccgcactgagtcttggcggcctgatggtcgtcctgaacaccgccgctggagtcttcgatgggctgcgggatggcgggcacatcgcgttctcggccgtgttcttcatcgcgctgcccggcctatgcgccatcgtcgcggcctggcgccacctcaagagcaaaggagcacgtgatgtcgatgaatag

SEQ ID NO: 208000 - DNA, 408 bp, Klebsiella oxytoca
atgtcgatgaatagctcgaactttcccttcgtctggatgagcttgtcaccagagccggggcatgaccctgaaaatgacttcgtggaattcgaggccaacctgaagcgcggggagccgttcgtgctcttaagcgattctgcgccggctgaaggccatgaacacacaccagaagagaagaaacgcacgtcgctatggatgaaaaaacacaagggcgaactgcgcaagctggttctggcgatgatcctggtcgaacccagtccggccaagcgcctggggtttaaggcgtttgcagtcgtcttcgccaagttctggggctatccactgatccttgcttcgtcacgcgaggaagcgatgacgattgccaagggactgctgcctgggcaccccacgtcagccgctgcgtcgtag

SEQ ID NO: 208001 - DNA, 1500 bp, Klebsiella oxytoca
atgtcatccgaacgtcccccttaccaactgcatcccgtgacggtcacccgctgccagcaggttgcgccacacatgaagcgcatcaccattgatggcagttgcctgtccacgctgcggcccggtcttctgtctcaatggttcaagctgttcgtcccgctgggaaacggccaacgcagcagcgggggagcctatacggttcgctgcttcgaccaggccacccatgaacttgacatcgacatctttctgcacggcgacagcggccccgtgtccgcctgggccgagcgcgtgcaggtcggcgatgggttcgagatcagcgacgtgcatccgcgcagcggcttttccatcgatcccgccacggaacactacctgctgttcggtgacgaaacggcattgcccgcgatcggtgcgatcctggaagcactgccggcgcacgccaaagcgcaagtgtttgctgaggtggccaacccagccgagcggcaggctctgaccagtgcagccgcattgtccgtgagttggctgttccgtgacgacgacgcgcaagcgtcttccatgccgctcacgcggatgtcggaaatgagtgcggttgttgcccgccttgaaaacacctgccactaccttgagcgatccaagagacgcagcgacgatttcatcgatcagtcgaaccaggcgatcgagggacaaggcaagcatgtcgaggagatatccagtgccatgaccaggatgctcgatagccagacccatgtcgcggaggcatcggcgcgcacggcggatgcctcaaacgcttcgcgcgacgcaacggtgcaaggtcgggaacagttggagcatatggtcgggtcgatcaatcaactcgcactctcgctggaggacacccgggccacggtatcggcactggctgagcgcaataccgacatcggcaaggtcgtcgatgtcattacggccgtcgctgaccagatcaacctcctagccctgaacgcagccatagaagccgcacgtgctggtgaagcgggacgcggtttcgccgtggtggccgacgaggtacgaaacctggcacagcgcacccaacaatcaacgcgggatattcgcgaaattatcctgggcctcgaagaagatacacaagcgtgcgtagcggcgatcgagaacggggttgaagtgtcgcagcggaccgttgatctcgccggggagacggatcgtgcattcggtgtcatcctggaatccgtgagtcgcatcaatgaactggctggacatgtcgatacctcgatgatcgagcagtccagcatcagcgagcagaccgggaagcaaatgaccgtgttgcgagacagcgcgatggaagcggttaaggccagcggcgcagccaagcatgaagcggatcggctaggctggcagatagataacctgagcgcgctggccagtcacttcaatgccaacaccaaccgctggggccggccacagaggtcaagcaactttcttggctgcggcccatctgaaacaggagcagattga

SEQ ID NO: 208002 - DNA, 1206 bp, Klebsiella oxytoca
atgaccggccgcccctcgacggctcccatgtggggcgcggcatggctggtgacggccgtgttcatgctgtccaactcgccgacgccgctgtacgtccactggcagcaggaactgggtttctccaccggcacgctgacggtgatcttcgccctctacatcgccggtctgttgggcaccttgctggtggccgggcagttgtccgatcgctatggccgcaagccggtgctgctgccgggcctgctggccgcgctgacggcctgcctgttgttcgccagtgcgcagtcggtgctggcactgggcgctgcccgccttctgacgggcattgccgtgggcatcatggtgtcggccggcatggcggcggtcggtgacctgggcggcactgaacgcaggcgccaggcggctctgctggcctcggtgtcgatggtcttcggggccgggttaggaccgctgctcgcaggcggcctggcgcagacgatggtgcatccgattctgccggtgttcggcaccgaattggttgtcctcggcagcgcgctgatcgttgcctgcctgttgcccttacggcgttcgctgcgatccagcgaccagcctttgcggcttcggctgcccacggtgcctaccgccaaccggcggcatctggcctgcggcatcgccaccttcgggccgggcatcacggcgacatcgttcgtgctggcactgggaccatcactgctgtcgcggctgctcgacgtgcgcagtcccatgatcgccggcggcatggcgtgcgccatgttcctgaccgccacgggcgtgcagttcgcggtgcgtcactggccgatacgctctatcttcctgggcagcaccacggccacggtactggcgatggcgagcctaggcgtcgccgtgcatgcctcgctcgcgcccatgttggtggcggctgcgttgctggctggtgccggacagggcctgggccaattaggcggccttacattgattggactgcatgtttctgatgagcgacgtgctgaggccaatgcggtactgaatatcggtggctatatgcccgcgggcctactgccggtcggtgcgggttaccttatcgactggcttggagtagccaacggcactacggttttctgtgtctcgcttgctctgactgcaggtttgggagggatttttgtactatactctttagccgtttctaagataaatttagaacagtcaaaatag

SEQ ID NO: 208003 - DNA, 1017 bp, Klebsiella oxytoca
atgacccccatcgggacggacgccttgcccgccgaccttgcacggcatcgggcctatgcacgggtcttccagccaggacggctaaccttcggtttcatcgccccgttggaaggctacccggatgcccccgcgcccacgctggaaggacatgcggcgctggctcgccaggccgacgctctcggtttcgcggcgatctggctgcgcgacgtgccgttcctcgacccctcattcggggacgtggggcaaacccacgatccgatggtctatgccggctggctggcggcgatcacccagcacatcgcgatcggcacggccggcatggtgatgaccttgcgcgatcccgtgctgctcgccaagcaggcggccagtgtcgatcagctttccggcgggcgactgttgctggggctgtccacgggcgaccgggcaacggagtacccagccttggcccggccctacgacaaccgggcggaacgctatcgggaggcgcatgcgctgctgcgcgtcgtgagcgagcagcactttcccacgcaccagacggtgcattacgggaagctcgatggaaacctcgacctgatgcccaagcccgtgggcagccgtctgccgacactggcgatcggccgctgcggccaggacattgactggcttgccgaacatatggacggatggatctggcatcaaagcgacttcgagcgcctgccggacgtgctggcgcaatggcgtgccggcggcgatggacagatgttcaagccttatggctatggcgtcttctttgacctcgacgagaacccggacgctccgttgcaggtgggccgaggcatccgcacgggcaggaatgcgctgatcgccctttggaggcggcaacaggcgcaaggggtgtcccacgtcgcgttgaatctgaaaccgttgcggcgtcccggcgccgaagtcttggcggaactggccgaatacgtgctgccggagtttcccgtcgggatggtcgatgcggcgatgcaagacgccagggaggcccagccatga

SEQ ID NO: 208004 - DNA, 1533 bp, Klebsiella oxytoca
atgactgaaattcaggcctccaacggccacacaacaactcgtgagtggctgcaactgctggccgcctgcctcactggcctcctgatccccctgtgttttactggtcctgctgtagtccttccgtcagtcagccaagaacttggtgggacggcagtgcaactgaattgggtggtcaacggctacatcttgacctacggcagcgccatgatggcggccggcagccttaccgacacttatggtcgcaagcgcgtgtggttggtcggcttgtcgttgtttgcgctggtgacattcgccattccgctcgcaccaacggtcgggtggattgacgggctgcgtctgatgcaaggattggggggggcggccgcctttgctggcgccatgtcctcattggcacagaccttccacggccccatccgcacgagggtgttcagtctgctcggcaccacattcggcatcggcctggcattcgggccgctggcggcaggctggctggtggaggtctcaggctggcgctgggtgtttctggccacagcgcttatcggggtggccggcttcgtcctagtgtgggtcagtgccacggaatcccgcgacccggaagcaactggactggactggccgggcgccatcagcttcaccgctgcgcttaccttgttcacctacggcatcctgctggcaccagaagaaggctggcgcagcgtgactgtcattgggtcgttgctggcggcggtcgtgctattcgcggcattcgtgcgtatcgaacggcgcgtggcccgccccatgctcgatctgtcactgttcagccgtgcgcgtttcgtcggcgtgcaagtgctagccgcgtctccggccttcttctttgtcacgctgatcgtgatgctgccgggccgctttatcggcatcgatggactaggtgcgctcgaagcgggacaaatgatgattgccttggcagcgccgctgctgatcgtgccgttcctggccgcgctgctgtcgcgctggttcacctccggcgtgctgtccggcgtcgggctgctgctggtggctgtcgggctggtctggctgggccaggtgctggccggcggcgctagccccgcgttggtggcacccctggcgctgatcggcatcggcatcggcctgccgtggggactgatggacggcatggccgtgagcgtggtcgagaaggagcgcgcgggcatggcgactggcatcttcaattgcgtgcgcgtctcggccgacggcatcgccattgcggtagcgggcgcactactggcgtttcttatccagggcgggctactcggtgccttgtccgctgccgagcccgcagctgtaatcgaagcggccaaccgtgccgcgctgggcgatctgcaccaagccaccgcgctgctgccaggcgaacgtgcgttgctgctggcaacctacgacaccgcgttccgctgggtgctctacgttctggcggcgtcgtcggcactgaccgcgttgctggtgttcgccttgctcggccgctcgcgcgcacatgaagaagcgggagcggcttcatga

SEQ ID NO: 208005 - DNA, 678 bp, Klebsiella oxytoca
atggtgacgaacatggaatctctgactggtatgacgttcttcgtgcatgccgctgaaacccgcagtttttcggaagcaggccgcgtacttggtgtttcgtcgtcagcggtcggtaagagcattgcacggttggaggagcgtctcggcgtgcggttgcttcatcgcagtacccgcagcatcacgttaaccgccgaaggagtgctgttccttgagcgttgcagacgtatcctttgcgagatcgaagcagctgaaatggagctttctgaaaccaaacagctggcaaaggggaagcttcgagtaagcctgccattagtcagtaatctcgtcatgccagcagtgtccgcttttatgcagcgctatccagagattgagcttgatttggatttcactgatcggatagtcgatataatcgaagaaggctttgatgcggtaattcgtactggagatccggctgactcaagactcatgtcccgccagttaggaacgttccaactgcagttggtagcatcgcctcaatacctgaatagccgtggagcccctcaagtacctgctgacctcacccttcactcttgccttcaacacaaatttccgagcactggaaaattcgaggcctggccattagttctaggctctgtacgtaaagtattgtcgcaagcaccgcatagcgcaggccaatga

SEQ ID NO: 208006 - DNA, 402 bp, Klebsiella oxytoca
atggcaaagcggtatgaactccccgacgcagcctgggatctggttgcagatatcttcaccaaaaatcagcgcaccgggcgccctcgggccgatgatcgcctgatgctaaacggtattctctgggtgctttgctctggcgcagcctggcgagacatgcccgaacgattcggcccttggtcaacgatctatcaacggttccggggatggcgtgattgcggagcttttgatcagatgctcaagcgtcttcatatccgattgaatgagcagggtttgattgacttggaaacatggatgatcgactccactgccgtacgagcaacccgggcctcatcaggtgccgggaaaaaaggggatttgaagaaccgcaagaccacgcgctcgggcgcagccggggtggcctga

SEQ ID NO: 208007 - DNA, 1152 bp, Klebsiella oxytoca
atgacgaaaaagttagattatcttgtgaaagaaaatccagttcgtaccagcaagaatttaatgaaactgggagttttttctaccaatacagagggcggatgcacagtcacaaatgcacctgagagattacgcggcgacgactggccgggtaatcttgagatagccaaaattgccgatcaagcaggatttgaagcattcattcctgtggggcgatggaaggggtttggtgggaagaataataccggtggtgtgtgctatgagacttacacatgggctgctggaattgcagctttgacagatcagatagcggtctttacaacatcccatttgcctacggtccatccgttatttgccgccaagcaggctgtgactatcgatcatattagcagcgggcgcttcggattgaatattctctgcggttggtatggcgccgaaatgagaatgttcaacggcacaatgatggaccacgataagcgttatgattacgctgaagaatggttggaaattgcacagaatgcatggaccaagcaggagccgttcaacttcaccggcgaacatttttcgattgtcgaggctatgtccgaccccaagccgataaatccaccattcctaattaacgctggggggtcgccccgaggcaagcgcttttgcgcccaatactgtgatgcagcgtttttgataataaagcacatgcatggggaagaagccgttcggtcgcaaattgcgtcgtataaggatctggcgaagacggagttcggtagagatatacagatatggtgctatggctacgttgtgcagaaggacactgacgaggaagctgcggaatacctgaattactacgcgattgagcagggagatgacgaaggcgccgacaacatcacgagggagttgggaatacaaactggtatatttactcctgaagaagcagaggaattcaaatttcatttcaaggcaggtttcgcaggcgtaccactcgttgggtctgttgaatcaattatcaggcagttcaaaaaatactcggaatgggggatcgacggcattgccctgacctggctggattaccatgaaggtatcagcagcttcgtaagggatgtgctgccagccatggagaaagctggcttgcgaaatcgatttggttctgatggcgattaa

SEQ ID NO: 208008 - DNA, 855 bp, Klebsiella oxytoca
atgagcgcggttagtcctcctgatttcatcgatgtacattaccacgtgaacccagacgcttacgtgcgccgccacagcgccattcaggctggaagcgtatatgcgaaacataatggctgggtgatcttaaaaaatcatcttggctgcaccgctgcgcaagcctgggaagctcgcgaacaaggacttccggtattcggatctgtggtgctcaacgagatagccggaggtatcaattacagggtggtcgagcatagcctctgtcggaacggcgacaatgagttacgttttatcgttcacatgccaaccgttacaggccgttcacaccggagctcactgaagcgcgaaatcagcaatacaatactgacgcgcaatccgataaagcccttaacggtgagcaatgacgccgagaaattaactgcctcaacacttgatatcttccgaatggcacgcgattttccactggttatttcgacgggacacgccaataaaaaggaggtcaggctgcttgtagatgctgctgttaaatttgatgtgcggctgatgttgaatcaacccgccaatcctttgaccggattaactgctggtgagcttcttgaaattgctcaagcaccaaatatttacgtcgaacaaacgtcgctgacctatctattaggatatcaggacagggatgattactataaagttctcgaaaaagtaccgcgagcaatatacagctcggatcttggccaaacgagccagccggacatagaaaagtggcgcggcctttctgaaaaatggttcagtgaatgcaatttatctccccaacgcatccatgcgatccaatgtgggaatcccaaagaaatgttaactctatga

SEQ ID NO: 208009 - DNA, 783 bp, Klebsiella oxytoca
atggataataccgttacctatattaagcgtggtgaatcagagaaaaagatactcgtcatgtccccggtcatgccagaatgggacaacggtgatttctttcagccattgacggaatattttctgaaacatggctactcggtgtttatagttgacacattatcattatcgccacagctcaacgagcctatttcttattttagccagcgctgggccaaagaactcgaatctcatggccccttcgacatcgttgcaggttcagctttgggaggtgctcttgcacagttacttgtctccaaacacttgaaaacaaaggcttcctgcttactacttatttccgcacccaataataccgacgcagaacttcgaaaacggctggcggtgatcgctgagctggcccgagagggggatctcgatcaagcaatgagagtgcttgcctatcgtgttctcccggatacatgccaaccgctggcaacattggcgccaattaaatcaaatggctcactacagcaacgggaacgcctatatattggattcaattacttatacgaactagatattcgccctgagattaaggaatttacagggcgggtgttgaatataattggtgaacgatctcagctggtaaaagcttgcaacgcccaactggatgaatcccccgcacatcgaacagtcgtaattccgggcggagggatgagaccattaattgatgacgctctactcgttatctcagcgatagaaaagcatctatttaattggcaggagaacaataatgagcgcggttag

SEQ ID NO: 208010 - DNA, 981 bp, Klebsiella oxytoca
atgatgaacacactcacaacaccgctaacaaaattgctaaatatcaaacatccacttgttcttgccccaatgggcggagtttcaggtgccagactggccagcgctgttagcaacgcaggaggtttggggctcattggtgcaagttacggcgaagccaattggatgcggaccgagcttgctgcaatgcgcgatgtagctgccccctggggcgttgggttggtgatgtttacagtctccgagaagatggagctgttgcatctagctctagaccacgggcctgatgtagtggcgctatcgtttggcgataccacccccttcattcgccccatccgagacagcggcgccaagatcttggtccaggttcacgatgttgaccaagcggtggctgcacttgacgccggggcggatgcactgatcgtgcaaggagccgaagctggtgggcatagcttgcgccgatcttccttaccgctgtttcctgctgtgcgggacgctgtcggtgaggaacctgtcttgatcgcgacaggcggtattgcagatgggaggggggtcgcggccgcccttgctttgggtatggacggtgtcatgatggggacccgcttctatgcttgtgacgaagctcttccgtctttgcaggtcaaacagcgcgttgttgacgccgtagccagtgagactgttcgcacaagaattttcgacgacatccgcggcataagctggccatcgagatacagcggtcgagcgattgcaaatgactttacagcgcggtggataggcaatgaagcggaaatgttggccgccggagatacggttcagcaggactatatgaaggcggtagagacagacgacatatcagtacgagccatatgggctggtgaaatagtagatgtggtgcgagacgtacgtagcgccagtgaaattgtggaatcaacggtgacggaggcagtaaaaatcctgcgacgtatgcctcagattatcaacggctga

SEQ ID NO: 208011 - DNA, 342 bp, Klebsiella oxytoca
atgactaatgcacacgctttcgacaacaattccgtctccgatcaaaatgcaatttacctcgtaaatgtggttcatgttaacgagggacatcaagatttggctatcgatatactcaagaaaacggtcgagtacgtcgcgaagaaatatcctgcctttaagtggagcaggcttatgaagagcacagatggaaaaaccgtcatcaaccaagcgcagtggacaagcaaagatcaatttgaatcattattcaacgacgatcaattcctagccatttattccagattaaaagaaaccggaacgtgggaataccatttatacaacgtctctgaatatatcacgccgtaa

SEQ ID NO: 208012 - DNA, 573 bp, Klebsiella oxytoca
atgaaaaggcagacgttcccgagcaatttcacaaggggcggcaccatgaatagctccggcagcttggcgtatagtcaacgtgaagacgtggtgaaaaactttaaaaaggccatgcgccgtctcacaagcactgtgacaatcatcgcgacacgagatgaacaacggtcttatggaatgattgctacagcagttatttccgtcagcgcagctcccccggctattctcgtgtgcataaatcatacggcaagcctataccaaccttgtatagcatcgggacggttctccgtgaacctactcaccgatcgacacgcagacttggttggcacattttctggggatgtcaaaggcagcgcgagatttcaatgtggccgctggcttttcgaccgtggccttccttatcttgaggacgcacaggccactctgttctgcaccgtcgaaaatcgtaccccatacggaacgcacgacatattaatcgcacgagtcgatgaggctcttgccgtcgatgttatatcccctctgctttggcaggatggtcatcccgcaatatcgatatcaattgacgctaaaagttaa

SEQ ID NO: 208013 - DNA, 717 bp, Klebsiella oxytoca
atgtctgagtacgacaaagaaattcttgctcaactagacaatttggatacgccggcactttccgatgcccttgatagccttggaataaacggtggcctacttggcatcacgcaacaagtacaaggcacgcgctgctcggggttcgcttttaccgtgcagtacgagccagtaatagacaatattgggttcaaaaacgctgcgaactacattgatcaagtgccggaaaattcgattattgtatcggccaataacggccggatggattgcacagtgtggggagacatcatgacccatgttgcgacaatcaagggcattagaggaactgttatcgatggcgtagcgcgcgactttgataccctatcccagcttcattatcccttattcagtaaggggcgatttatgcagtcagcaaaaaatcgaactcaaatgcaagctgttcaggttccgctccaaatatctggcgtaacggtaaatcccggagacgcgattgtctgtgactctaacggctgcttagtcattccgtacgacaaactctccgaagtgatacggcgagcagcagcggttgaaaaaaccgagcgcggcataatcgacagcgtaaatgctgggcttccccttaaagacgcccgcctcaagcatcgctatgatcaaccctggctctcctctgatgaaaaggcagacgttcccgagcaatttcacaaggggcggcaccatgaatag

SEQ ID NO: 208014 - DNA, 1170 bp, Klebsiella oxytoca
atgacagaacttcatgaaacaggaaaaagaaaacgtatttgcgtattgcctggtgacggcatcggcgcggacgtcatggaacgcacacttcccattattgatgcacttgaaatacccctggatcttgagtttggccgaattggttggaaatgctgggaagaagaaggcgaaccagtgccgcgagcaacttgggatgccattcaacgatgcgatacgactttgctcggcgcgatcacaagcaagccggtgcgtgaggcagaggccgctcttccaccgtcactacgaggcatcggacataaattcacttcgcctgtgattcagttacgacaacggttggatctctatgcgaatgtcaggccaatcgtagacatattgggcaatagcggcttcaaattcacagttattcgtgaaaataccgaggggctttattcagggctggactttggttgtatacctgccgaattcgaaccactactacaaaagcgtgaagcagagggcgcaccttgggtgcgtgagggatcaaacgatgccgttttgtcggttcgattgcaaactcggagaggccttttgcggctattccgattcgcgttcacctatgcccaagaaaacaatttcaaccatgtaacattcgccgacaaaccaaatgtccttagatacagcagcgcctttgcccgagagcttcttgagcaggtagcggatgaatttcccgctttgagccatagcgttgacaatatcgatgctgttgcattgtggatggttcgacgccccgagcggtttggtgtgatcgtggctgagaacatgttcggtgacattttatccgatctgggggccggtgtaatgggcggccttggtctcgcgccgagcgccaacataggcgaatacaagtcttatttcgagcctgtgcatggtagtgcgccgtcctatgccggattagacaaggcgaaccccagtgcaatgttcctgaccctagctctaatgcttgactacttgggcttcagagaaagcgcacagataatttcgcaagccgtacgaattgtggctacgtcggatatacgtacttatgacctcaatggtcagcacggtacgagagctgtcgccgaagaaataatacttacggccagcacatttcactcatcaaaaaatctgccgggggacgttataaatgtctga

SEQ ID NO: 208015 - DNA, 1017 bp, Klebsiella oxytoca
atgaattccgtgaaaatcttagacgttactttgcgcgatggcgggtacaggaacaatttcaacttcacaaaggattatgcgtgcaaggccatctcacgattggctgatataggagtgcaatactgcgagataggctattgcaacggctccttcgtacgcaaaccagagcatggattaaccagttcagtgaatgtcgattatctgcgggctgtgtcaacatcatcaggacagaatttaagcctcgctgtcatggtccatccaagaaacgtcggaccatccgatttcgaaatgcttcacgaagaaggcgtttcaatgatcagggtctgcctgaaacgagaacagcttaacgagggtctcgccacgatcagactggcgaaatctttgggatttctggtcagcgccaatgtcactcacataaccgcccaggcagtcagtgccgtgattgatacatcgctccaagctgaaggtgcaggcgctgatctcgtctgcttcgctgattccaatgggaatatgatacctactgacgtcgaacgcctaatcggacgcgtttccaaccgtgtgatcgtgcccttagggtttcatgcccataacaacctatcgttggcactagccaatgcgatagctgccatggaggcgggcgctgaatatatcgatacgtctatctgcggcatgggaaaaggcgccggaaatttacatctagcgatgttgattgcctaccttgaccgtgcgggcatcaagcatcagtacgatctcgtcaaagcaattgaactgtcacttctaacgtcgcaacaagtaccagatagcgatatttcggcgccgttgctggacatcatgatgggcgcgtacaacttttcttacgacgttggaaagcgcctgcaggaaacactttccaatttccagcttgcttcggagttccacgctcttcaggtgatgcaccaacaagatcaagtcgccaggttagctccccgagcggtcggttcgacagcacccatgcctcacgttcagcgttcaatgtga

SEQ ID NO: 208016 - DNA, 1854 bp, Klebsiella oxytoca
atgtttgcgctgttccaacgaaaacgacccgtgcaggccgctaccgtagcgactgccactgcaacaaaaggcaaagggctgacgcggccggaatcggccgcgtctctgttggcgacctctcggcgccagaagttgctggaacacatctggcagcggacatcactctcgcgtcaacagttcgcggcgctataccttgctccactagaacgctacgccgagttggtccagcagttcccggcgtcggaatcgcatcatcatgcctatcccggggggctgctcgatcacgggcttgagatcgtcgcttatgcgctcaagctgcgtcagtcccaccttcttccggcgggaacgacaccagaggaccaggccgcacaagccgaagcctggacggctgcaacggcctatgccgcgctgctccatgacattggcaagatcgccgtcgacctgcatgtcgaagtaagcgatggcagtgtgtggcacccctggcatgggccgttacagcaaccataccgttttcgctatcgcaaggatcgcgaataccgcctgcacagcgccgcgagtggattgctctacaaccgattgctcgatcgcgacatcctcgactggctcagtggctaccgtgaactatgggcggcactgctttacgtgctggccggacagtacgagcacgccggcgtgctgggcgagctggtcacgcaagccgaccgtgcttcagtcgcccaggaactgggcggcgatcccgccaaggcaatggccgcgccgaagcacgctttgcagcgcaaattgctggaggggcttcgctatctgctcaaggaagagctgaagctgaaccagccgcaggcatcggatggctggctgacacaggatgccttgtggctcgtatccaagacggtttcggacaaactgcgcgcacatttgctgtcgcagggcatcgaggggattccggccaacaacacggccgtcttcaacatcctccaagaccacggcatgctgcaggccacacctgacgacaaagccatctggaaagcggtcgtcaccagcgaggcaggctggacgcacacgttcacgctgcttcggctcgcaccggcgctgatatgggaaggcagcgagcgtccgccggcgtttcagggaaccgtggaggtggtccaggaagaggacgcatcggcagcagcatcccccgctacatcgaccaccgcggagccgccttctactgccagcgagacgcccactcccgcgatctccccgcgtgcgcctgcggcacaagcagtcgagaatgatggcgtcgacgccttgctcgatttgctcggaacgccggacattgagccaccgcctatcgcggcaacatcgagcgaaccaaccgcgcccgctcgggctcctgagccgaacgggcccaaacctgcagcgctgcagtcggagatcgaggcggaagatgcccgaacgtctccatccggggagcatttcattgcctggctacggcggcatatcgaagcccgcaagctgatcatcaacgatgccaaagccctggtgcatacggtggccgatacggtgtatctggtcagtcccggcgtattccagcgctacgcacaggagcacccgcagacggcgttcctggccaggcaggaacaaatcgcagactggcagtgggtgcagaagcgcttcgagaaattgcagttgcaccgcaaacaggacagcggcctcaacatctggacctgcgaagttaccgggccgcggaaatcacgccgactgcatggctatctgttggctgatcccacacgccttttcgatgaggtcccacccaacaatccatatttgactttgacaacgaccacatcaccaccggcatcaggcgaatattga

SEQ ID NO: 208017 - DNA, 249 bp, Klebsiella oxytoca
atggatcactcggacagcatcaagaaaaccagcattcatgcgcagcgtgcgtactcgcttatcctgtcgggcgtagccgaatgcgacactgcgctggaccagcgtctgttgctcgactcgctcatctgccagtgcgcggtgttcactcgtattctgggcggtgagcgtgaattttatgatttgctagagaagctgaagcgtatcgatctcgatgtggctggcgatttgatgcctgcaacgcagcactaa

SEQ ID NO: 208018 - DNA, 234 bp, Klebsiella oxytoca
atgcaggtcgcaaaatggggcaacagtctcgccgttcgtctcccggccacgctggtggaagcgctggaactgcgtgaaggcgacgacatcgaaatcattgtggatgatccgcgcaccttcgcggttcgcaagaagcccggtgcggatgccttgttggagcgcctgcgcgctttccgcggcaagctgccgccagatttccgcttcagccgtgacgaagccaacgcccgtggctaa

SEQ ID NO: 208019 - DNA, 411 bp, Klebsiella oxytoca
gtggctaagttcaagcacttcctcgacagcaatgtggtgctttaccttctgtcgagcgataccgacaaggccgacaacgcggaggcgctgctgaaggcttccccggtcatcagcgtgcaggtgctcaacgaagtgacgaacgtgtgcttgcgcaagcttcagatgaggtgggacgagatcgcccagttcttggaactggtgcgcagcttttgccgggtcgttccgctcacggagacgattcacgatcaggcccgatgggtggccgaacagcatcgcctgtcgttctacgacgcctgcatcgtggcggccgcagcagcagccaattgcagcacgctctacagtgaggacatgaaccacgggcagatactggaagacagcttgaccatcagaaatccgttcgtagtgaaatga

SEQ ID NO: 208020 - DNA, 378 bp, Klebsiella oxytoca
atgaatacgacaactcgcagcagtaccgcagaacgtttcgggcacaagctcggccgtacctggcgtgcttatcggcactgcgagcgtagggtcgtcgcgtggctgatttcggttggtgcgccaagtgctgtcgcaaccgctctggtgtgggtcgtcaagctcgccgttctgggcattctcatctacgccgcgttctggctggctttgttgctcctgttcgctgtcgcagccgcgtggatggccgggcatgatgacgccacggaggaaaagatgggggtatttaccacccaggaagatctccgagagacaccggggtacgatccggtgccctacaacgatgctgaccacccagactttcccgatgaaaaggacctttga

SEQ ID NO: 208021 - DNA, 1518 bp, Klebsiella oxytoca
atgacgctctacacgtccgactacctggagtattacctcaccctcgtcgggtggatcgttcacaacggcatctggtcagttctggtcgccagcggcctgttcgcgcttccgtttctcgccatcgtgattcaggaatggctgaaagcacgcgcggaaggggccgacgaaggcaacaagggcgtgctctcctcgatgcgaatagaaaaccgggtgttcgtcgccatcgtcgtgatcatgttcgccggcattcccttcatcgacgtggatctcaacaccatcagcttcgaccagtcccgctccagtcagtgccaggtgaacgttcccgcgcccagcgataccggctggggccagtcattcaccacgctcaacaaccagtccgccaaggtgccggtctggtggttcttcatgcactcgatctccaaggcggtcaccagcgctgccgtcgcggcgatcccgtgcggaaccgacctgcggcagatgaggatggacatcgacaacacccgtatcgacgatcccctgctggctcaggaggtgacggatttcgcgctcaactgctacggcccggcgcgggccaagttgttcatgaaccggccgaacctcagcgaggagcagatggcggacgtcagttggatcggctccaactacttcgtcgacacgccgggatactacgacacctaccgctccagcacgcctcgcgaaccctggccctacgatgacagtcgcgacgccggattgaccgaggtgccgagcggcgccggatacccgaactgccgggaatggtggtcggatggctcaaccggactgcgtgcgcgcttgctggctcaggtcgatcccaatctgctttcgcgcatggcgaactgggctggcttcatctccaggaccgaactggacgattccgtgatccgcgccatcgccgccccgcggcagcagaagctgaaccagggcgcggtctacaccgattacggtggacagatcgacaagtccttgccgaatgtcgttacgcgggctgcaggagacgtgggaatggcggtcggcgccatcgggctttttcctgcgatggatgtcatgcgccaggcgttgcccatgtcgttatcgctgctcaagatggcgctggtgatctgcattccgctcgtgctggtgatcggcacctacgacctgaaaaccctcgtcacagtaagcgtggtgcagtttgcactgttcttcgtcgacttctggttccatctggcgcgctgggtcgattccacgatcctcgacgcgctctatggctggggatggggctacaaccgtccgatgaccaacttcgatccggtgatggggctgaacaatgcgttcggggatctgctgttgaacttcgtcatggcgacgatgttcctggtgttgcctgggttctggctcgccgcgttgacatgggttggcgtacgcgcggctggaatagtctccgccttctcgaacagcaccaaagacgcggcatcggctggagggaaaggacctgccatcatctcaagcaagctcaagtag

SEQ ID NO: 208022 - DNA, 351 bp, Klebsiella oxytoca
atgatcccggcctggcttcgcatgcggtggctgttcaatcgccgtgtcggttacgcactgctctggacggtcctgctgctctttgtggcgatcgccgtcaacgtggtcggcatccgtgtgctgggcagcatcgagagctgggagcgctggatggacgaccataccggatatttcctggcctggcgcctgttgctctacgtgggaattgcctgcggatggcgatggatgcgcaaaagggtcctggcgcgcgaacccgatacggaatcgcatgaacgcctcatccgtgtcgaaatcgccggtgtggcggctctggccgttctcgaaggcagcttgttgctgcaatccatttag

SEQ ID NO: 208023 - DNA, 1407 bp, Klebsiella oxytoca
atgacttcacgttctcctactcctgccattcgcaaacatctgcgccggcgcctgctcgtttgcgccctgacggcggcatgctctggcgccgtcgcccagacgagcgtcaacgaatacggcctgcaacatcgtggcagcgtgattggcgacgatgtgctgtacagcatcggcggcggccgggccgtatcgatgacgggcgcggccaacatgcgctcgatcggcgttggcgttggctggaacagtaacctcatttgcggcgacatgagcctcaccaccacgctgcagaaccagttgaacggcatcaccaacgggttccagaccatcatgtcgaacgtgatccagaacgccaccagcgcggtggcttctctgcccgcgctgatcatccagcgcgccgatcccggtctctataacctgctcaccaacggtgtcctgcaagccaggctcgatttcgaccgctcgaaactcacctgccgggcgatcgcgaacaggatggccgacatggctggcggccagctcggctgggatcagctcgcggaaggcatggcgctcaagaaggccgtcgccagtaccgacgcggtttccgcgatcgaggaggcggagagcagcaagggcaatgagggggtgccatgggtcggaggcgacaatgccggcggttcgggccaggcgcctatccgggtggtcgctgacgtgacgcgcgccggctacaacctcgtcaacggccgcagcgtcgatgacacctcgtccatcgattccggcagttgcggcgaccgactgacgtgccagacctggagttctccgcaggctgctgtcacctgggccactcgtgtcctgggcgagcaggaacagcgcacctgcgaaagctgcaccaagacgcagaccacgcccggcgtcgggctgaccccgctcatccaggaagaatacgagaccaagctggaaagcctgcaggaactgatctcgggcagccagtcgatgagcttcgacaatttgcagaaagcaagcagcacgtccctgccgatcacccgcggcgtgatcgaagcgcttcgggatgagccggatcaggacatcctcgcaaggcgcctcgcttccgaggttgcgctcgccagcgtgctggaaaaagccttgctgcttcagcgcacgttgctgaccggacggatggagccgaatgtggcagcgaacgaaatggcccaggaggcggtcacgcaggagagcgacattctcgaccgcgagatcaacaacctcaagaccgagctcgaactgcgccgtgagttggccaacaactccccgatgcagatcatccagcgccacagcacccgggccgcaggttcgcgcggcgtctaccagggagatcccatccccaatcgcctcgacgagttgcagcgttcgcaaccgggaggaagcaatccatga

SEQ ID NO: 208024 - DNA, 945 bp, Klebsiella oxytoca
atgaagcacgcccgtcggctccgcgccgcaattgcggccctcatgcttggaaccgcatcgtcggccttcgcgctcaacacggccacgatcacggcttcggcactgtctccggactgccttgaataccgggtcgtcgggatctgctactggctcttctgcaccaccttcggctgctcagtgcggacatcggtgaaggtgcgccactacgtgccggacgccgtggtatccagctatgccaatacgggcgagaacccgtggctcgaagtgcgggccatgagcatgccgaacaccacggcgcaggccggcggcgatggcacgacgaaccaggatcacgaaaacaacctgtcgaagttcaagagcgctgacgtgatcggccaccccggcggcgcggtcctgggtcagctcgcgagcgcttcgggctattcctgcgaaggtgccggcacggctttcatgccatacctgctgagcacgctcgacacggtggcctggcgctacaacgtgccggaggccgtctatccggaagcactgatccccggcatgcgcgagatcggagcaaggacctcactgaacctgtggggtgccgtctatccgcggggcggtttcctgcaccagaccgacgattacaagagcggagccgttgtcgcgcagcgcgccggcgatatcgtcacccgccgtggccagatccacgtctaccagcccctgcttgccaccgctcgcgacggctactggcccgcaggcgagcttgtcgaaggcgatgcctccacgggcaagtggcaggaactcacgcccacgatgaccagctcgtgcgccgtcttcccgcattcgaaccagcgcgtccaggcccagcagggtgactatgcctgggcgctctggcggccctacagctgctgccagcgccggggccagaccttccttggcagcgtcgacttcggtggaggctcctga

SEQ ID NO: 208025 - DNA, 450 bp, Klebsiella oxytoca
atgctcaacccgtttcgcacccaatccgggccgatacgctttccatcggtagtcgccagcagcttgtgcgttgcactagctctggccagccaggcggccagcgccgccgaggtgacggtcttcaccgaccggtccgtcacgctgaaatcggcggacaacgccgaggtcgtccgcctcgacgaggcacaggaaatcgaggccggcctcgcggccgatctgcccgctgatccacaccgcgcccaagccatcgtccagcaacgcctcaagcagggcggcgcccggctgcaacgcgaccttgcctccgcctatcagggcgtggccgatgcctggagcctcagcatttccaccgttcccgctgtcgtggtcgaccggcgctacgtcatctacggcgaaccggacgtagccagggcggttgcccgcatcgaggcataccggagggcccagccatga

SEQ ID NO: 208026 - DNA, 630 bp, Klebsiella oxytoca
atgagaattgcctgtatcgacctcgaaggcgtgctgatcccggagctgtggccgcggatcgcgcaggccagtggcatcgaagccttgtccattacgacgcgggaagaaccggactatccggcgctgatgcgctggcggatcgatcatctgcgaaaacatggcctgcgccttcgcgacgtgcaggccatccttgccgagatccagccataccctgaagcccgtgatttcctgcaccagctcgaacaacacggcggctatcaggtacacatcgtttcggattgcttccacgagctggcggggaacctgctcgatgcgctgggctctccggcgacgttctgccattcgctggagacagatccggacaactggatcacaggctgcacgtgggccgatcgcaatggcaaggaagatcatgttgctcgcctgctgaaacagggttcccatgttctggccgcgggtgacgccttcaacgatcttgccatgctgcgcctggctcacgatggtttcctggttcgcccgtcagcggcgacagcggaggccgccgaagacctgactgtggtggaacatctgtccgagatcatcacgaggatcggcctgtcgtcaggcacaggcatgtcatggctcgcatga

SEQ ID NO: 208027 - DNA, 618 bp, Klebsiella oxytoca
atgaatgaactgatcgcagtagccaccatcaccattctggcggtcatcagtcccggtcctgatttcgctatggtcacccgaaacagctatgcgtttgggtcgcgtaccggcctgatttcggcattcggcattgcctgcggcgtgcagatccacgtgatgtacacggtgcttggcattgcggtggtgatcgtcaattcacccctgttgttcctgggcatgaaagtgctgggggcctcttatctgatctatctcggatacaagtccctgaccaacaaaacggtgctgaagctggaggaagcatccggttccgcgccatcgtcgctggcggccttccgcatgggcttcctgaccaatgcgctcaatccgaagaccatgctcttcgttgtcgccacctatacgcaggtcgtccatgccggcagcccgatgagccacaacttcgcttacggcctgttcatgtccgtttcgcactgggtctggttcagcatcgtggcgctcttctttgcggcccccgccatgcgtcgtcgcctgctgaaccatcaactcactgtcgacaggatcatcggggtcgcgctgatcgcgctgggtgcatccctggctttcaccaacgtcagcgcttga

SEQ ID NO: 208028 - DNA, 777 bp, Klebsiella oxytoca
atggagaaatcaacgcctgaagccgaaattgcgcaaacgccactgaagcaggccaccggcagcgaccgcacgagcaatctgtgcgaaatcatcgccaaaaaggattacatcatactgccgtccgcaactgtccggtcgctgctctctgctgaggatgaaagcgcgctggccgactgggcggagttccaggagagctggaatcgcctggagcaggatcagttcatgaaggacggcgggacgtatcggtttcgacgtcatggcgtttacagcgccacgccggcttccggcgttcagcttgagccgtcgcaacctcactaccagagcgtcacgtacaacaccctcaacggcgggattgcccgacatttcgcgcccatcgaaccatcgatcgcgtcgggcaaggtcttgatgtcggcgctggaactgtgccgcgccacgttcagcggcctggcgccgttcaacgattggcatatcgaagttcatcagttccggatcgtcgccaccagcgcagaggcattgcctactcccgaaggcatccaccgggacggtgtgagcttcgtcttcatgatgctggtcaaccgtgtcaacgtcctcaatggcgagaccggcatctacgacagggatcgccaggaccttgcccgctacacactggccgatcctctcgacgcggccatcgtcaacgacgaacgcacgatgcatggggtaacgcccatccttgcggatgacccagcccggcagggctatcgcgacgtcctcgtcatcaccttcaacaagcgctga

SEQ ID NO: 208029 - DNA, 936 bp, Klebsiella oxytoca
gtgctggagaaaaaagcgatttatcttgagggaaatctgtcagatttcatcgtgtatatgaaacttccatcattggcttcattccgctttttcgaggcggcagcgcaaaccggcagcttcgtgaaggcggccgaacaactgcacgtgacgcacggcgcggtcagccgacaggtgcggctgctggaggaggcgctgggtgtcgagctgttcgagcggcgcaaccgggcgatcttcctcaatgcggccgggcgttcgttgcacgccaccacttttgcggtgttcgaacagctcgaaggcgctatataccgcttgcagcagtcggcacgggaagaggtgctggtcttgtcctgcgagccgaccatcgccatgaaatggctgatcccgcggctgccctcgtttcacaagcagaatcccgacatcaacctgcatatggtcgccgccggtgggccgatcgacttcgcacgcgcaggtgtcgacctggcgctacgccgcgacgatttccattgggatcaggacgttcacgccgagaagatctgtgacgagtgggtggggccggtcagcagagcgaagaagagccgcaaggagcaactggatggcgtgcgcctcctgcactcggggactcgaccgaaggcgtggccgacctggcagcggttgtcaggggtgtccacgaagggcagcatcagggttgactacgagcacttctacctgtgcgttcaggctgcggtttcgggcctggggatggccatggtctcgttcctgatggtgcaggacgaactgcagagcggccagttgcacgcgccctacggcttcatccgggatgggtccggttattgcctgctgtcgcctcagccactcgaccaggatgaaaagtgtgcgcgtttcaaggcatggctgatggcggaggcggctgcgagcctttctgcgatcggggtgtga

SEQ ID NO: 208030 - DNA, 1605 bp, Klebsiella oxytoca
gtgccgggacaggacggttggaaacaaaattcgatcaacgcatatgtaacccacgccagcgcacagcaggagttcgaatttcccgatgacgtgacgctgatgtccaccaccgacaccagcagctacgtcacctacgccaatgaggcattcctgcgggtcagcggcttcgcccgcgacgaacttctgggtcagcctcacaatatcgttcgacacccggatatgccgagagaggcattcgctgacatgtgggcgacccccaaggccggggatgcctggacagcactggtaaagaaccgtcgggcgaacggtgagtactactgggttcgggcaaacgtcaccccgattcggcgcgacggcgggatcgtaggctacatgtcggtgcgcacatgccccgatcgggcggaaatcgaggcggcgtcatcgctctacaagcggtttgtcgaaggtgcggcccgcgggctggcgttccacaagggcctgattgttcgcaccggcctgttgggattcacccgttgggggcagatcatgccagtgcgctggcggctcaggctcggcctcgcatgtgtcgtggcgtcgaccgtggtgggtggcctgatggccggcggcatagacagtcttttgacgccggtgctatccactgccgctggcgcatgcctcgcaggcatctggctggaaaagcggatcgcgaaaccactgatagcggcactcgatcaggcgaaggccgctgcagccgggcaacccggtgccaacatgaacatgaaccgcgtcgatgaaatcggaatgatcatgcgtgcggtcaaccaggctggcctgaacctgcgttcactcgtggacgatgtggcggcgcagactggcggcctgcatcaatccagcgagcaggtggccaacggtaatgaggatctcgccaggcgcgttagcgatacacaggcccggctgcatgagactgccgccgccgcagagcagatcacggcggccgtcgagcaaagcgccggcaatgcgcgctcggccagcgagttgtcgaccggcacaaaaaacgccgctgaacaaggcagggaggtcgtcgacaaggttgttcagtcaatgacgggcatcgctgcctcatcggccgaaatcggcgagatcaacagcctgatcaacagcatcgccttccagacgaacatcctggcattgaacgcagccgtcgaggcggcacgcgcgggagaggtgggacgaagcttcgcggtcgtagcgggagaagttcgcagtctggcacaacgctcggcagtcgcggcagcagacatcaaagccctgatcgacaaaagcgtacaacagaccgccgaaggctcaaggctggcggcgcaggccggcacggcaatcggaaatgtcgttttagaggttgagcgcgtcaacacgctgatagcggaaatatcaaccagtgcgcaggagcagagcacgggtgttgcccagatcagccaggcggtggtcgatctggagcgaatcgccatgcagaacgcggaactggtaggagaatcatccaactcagcgcgggatctgttcgctcatacggcgatgcttaccagcaccattcacgttttcgagcagaatcgacaccggcgggcgatatag

SEQ ID NO: 208031 - DNA, 2565 bp, Klebsiella oxytoca
atgaagatggagagcctggttcctgacggcaattccatactgcttcccgcactggagcagtcgattgtggcggcggtacttgttgacgagaacgattgcgtcctttttttcaaccaggccgcggagcaactatggggatatgagcgtcacgaggtcctgggcaagaacatgcagccgctgctgccaaagagtctgcgaggtgctcatggcggctacgtgcgcaagaaccgggtgggcggcgaggccaaggtagccggcatgagccgggaagtgctcatggagcgcaagagcggccagcaggtatgggccatgttctcgctgtcgaagatcgaccttgaggggcgaattcactatctggcgctggtgcgcgatgtatcggacgaagttgcgatgcgggagcagaaccgaatgctgctgatcgccgtcaacaataccgaccgtccggtgctggttctggatgcgcagcggcgcatcgcccacgtcaatcgtgcgttcaccgaactgtggggatacgagatggatgaggtgctggggcgagagccgtcttcgttcctgaccagcccgaacatgcccgttgacgaattcaggcattttcattcccggccatggggtcgggagcgattgcaggatgacgcgctggtcgtctccagggacggcaaggaaacctggattcgggtgtccagcagccccatagccggtcatgatgacgatggtttccaggggtactccgtcgacgtcatcaccgatatcaccgaggagcggcagatccgtgatctggaacgcgacgtcctcacggcgttgaccagtagcttgtcgtttgcggaactgggtgactatttctgccggcgaatcgagtcgattgcgccgggcgtgctggtctcggtctgccgtgtggccgagcgcaagttgaggccctgggcggcccccagcttccatgcgtcctatggtcccgattgggaaggtatcgaaatcggagaaggcgtggccggttgcggaaccgcggcgcatcgcggtgagccggtgatgatctacgacatcgagaccgacccgctatgggagccctacaagcacaagatattgcctcatggctacaaggcttgctggacctatccggtcaagcggcgcgatggcagtgtggctggaacgttcgcgttctacttccgtcagggcggtcagccggatacgcatcttgagcgtatcgccgatgccagcgtccacctttgcgccctggcgatcgagcgtgaggagaaccagcagcgggtcaatcaactggtgcggtacgacatcctcaccggcctgccaaaccgaagcctgctgcgccagcatatcgacgagttgctctcgaccgatcctgagcaggagatcgctttcttttatctgggtctggaccgtttcaaggacatcaacgacacgctcgggcatgcatcgggagacctagtgctggtggaaacgggcaatcgcctgaaatctcacctggacgatggccagttccttgcccgtgtcgagggcgacatgtttgtgctggtcgtgcccgattgcgatgtgcatcgcgccgcactggtggcggcacatcttcagcgtgtcgccggcgcgccaatcgacatttccggtttctcgctggaccccacggtcagcatcggcataagccagtaccccgagagcagtcgcgatcgtgaagatctgttgcgcaacgccaagagcgcgatgggacaggtgcaggcgtcaggcggtggcgagttcctgtttttcagttcagggatgaatgaggtcgcccgcgaccgtcttttgctcgggacggcgctgcggcgggctatcgccgggggctgcctgcgcctggagtaccagccacaggttcgaccggacagcggagagctatatggggtggaagctctggcacgctggcgtgatccggagttcggggttatcccgccaggcaggttcatcagccttgccgaggaaatcggcgagatcgaagccatcggccgatgggcactgcgcgaggcatgccggcagatggccgtgtggcgtgatgagggggtgcaggtgccggtcgtatcggtgaacctgtcgcctctcagtttccgaggttccgatttgccggacttcgttgccggtcttctgcagcaatatgcattgcccggtgaatgcctgaccatcgagattaccgagagcgccgccatggcgctgactgccggcatgctggaggtcatccacggcatccgtgcgctcggcgtcggcctgtcggtggacgatttcggcacgggcttctccagtctctccaatctggcgaacctgcctgtcaccgaggtcaaaatcgaccgcagtttcatcgacaaatgcctgcaggaaagccgccttcaatccctggtgatggcggtgatcggcattgggcagaacctgcatctgaccgtcgtggccgaaggcgtggaaaccgaggcgcagcgtgaactgctcaaggcccatcattgcccggtgatccagggctacctgttctcccgcccgctgcccccggcggacattccgaactggataagaaccgcagccgatgcccaattgcagggctga

SEQ ID NO: 208032 - DNA, 735 bp, Klebsiella oxytoca
atgcctgccgttgtctcggcccccggcgataaagctcgcacggggcgtccctccgtcttctccgaagaagaacgttgcaaacgcatccttgaggcggctgaacgggtgtttacgcgcgtcggctatggggcggcaacgatggaggagatggcgcgcgaggctggcatgtccaagcggacgctttacgccttctacgcagacaagcgcgagttgttcacagcggtgattggcgacgtggaaggcttttcggggaagcgtccgcatgtgccggcggcggccggccgggacgccctgattgtggagttgcacgaccgccttctggaaatggcgcgcttcgtattgtccgaacggcagatcaggatcacgcgcctcatcatttcagaggccgaaaaccatccggagctggccgtcgatttctggtcgcggatcgtggtgcgggtgcaggcgtatctggtcgatggcctgaaggagctacagcgcgccgacgagaccttgagagagtacgacgcgaatcggctggccagcacgatcttcggggcgatcctgagcgatctgcatttgcggaccctgttcggtcagcaggagagcgatgagttcggcagcttggcagatcgtgttgcagacgccctggcattgataggaattgatctgccgtcacggcaaaagcaagcggcaaatggcccgatgcgaaagtcttccggttccggaggcagacggcggcaacggaacacctga

SEQ ID NO: 208033 - DNA, 1227 bp, Klebsiella oxytoca
atgagcaccaagaactaccatgacatcaatgtctatgatgcggccaaggcccgtatccggctgatcttcgagaatttcgagcgcgtatgtgtcgccttttccggcggcaaggacagctccgtcacactgcacctcgcgctcgaggtcgcctgtgaaatgggccgcgggccggtcgatgcgctgttcatcgatctggaagggcaatatcaggcgacgatcgatcacgtcgaggagatgttcagccgcgatgatgtgcgcccctggtgggtttgcctcccgatcaatctgcgcaatgcctccagcctgcaggagccttactggtgcgcctgggaacccgggcgcgaggcggactggatcaggccgatgccaacccatccggccgtcatcaacgatcccggccggtttcccttctaccgccatcgcatggagttcgaggaattcgttcccgagtttgacgagtggcttgctcaggatgttccgaccgcctttctggtcggcatccggtccgatgagtcgctcaatcgctttctggcggtcaaacgccgtgccagggtgaagaagcgcgcctggacgccgcctggttcgcatacgccggtccagtggagcgcaaaggaccagccagacagccgcgccgtcaccttctttcctatctacgactggcggtttgaggatctctggcggtacgtcgccgagcatggccacgcctacaaccggctctacgatcgcatgcatctggcgggcgtttcgttttcgcagatgcgcatctgccagccttatggcgatgatcagcgcaaggggctcgatctgttccacaagctggagcccgagacctggttccgtgtcgtgcagcgtgtcgctggcgcgaactacgccgcgcggtacagccgccagcgcttcctcggctatcgcggcgggatggggttgccgccgacgtttgatacctggcggcaatactgtgaatttctgctgcgcagcatgccggggccgctgcgtcaggtctatcagcgccgtatcggggtcttcatcgactggtgggagaagcacaactatccacttgcttcctggcctgatgccggtattccggaactggaaaaccgcaaggcccagccctcctggcgtcgtgtcgccctgtccctgctcaaacaggacatggcccgctcactgtctttcggtttcgctcgccaggacatcgacacgcttgcgttgattgaggggccaccatcatga

SEQ ID NO: 208034 - DNA, 636 bp, Klebsiella oxytoca
atgccgcaagtaatgcacctgacgaaccgggccgaagccctgttcaccgaactggacagcctgccgctggcgaggcgagtcgaagccatcaaccagatccggctgcggctgcacgagcatagcccgttcgccgatgagccggtggactgcgtgcagtgggtgcgcggcgatcaggtcgaggccaacgactacaacccgaattccgttgccgcgccggaaatgaagctgctggaattgtcgatcgacgcggatggcttcacccagcccatagtcacgcatcgcgcgcaggaagaaagccatgtcgtggtcgatggtttccaccgtcagaagatcggcaagaagcaggggccgatcagaaagcggctgcacggctacctgccggtggtctcgatccgaagcgggcgcgccgcaacagccgaccggattgcagccaccatccgtcacaaccgcgcccgcggggtccattcggtgctgccgatgaccgacatcgtggtcaagctcctgcagacaggatggactgagagcgacgtggcccgcgagttgggcatggacgatgatgaggtgttgcggttcaagcaggtgtccggcctgcctggtctgttcaaggatcatgactattcgaggtcatgggattag

SEQ ID NO: 208035 - DNA, 747 bp, Klebsiella oxytoca
atgcaaccttctcttttctcccgtttttcccttcgccgcacgctgggccccctgatggctctcgctctcaccttgttgcttgtggcgatctggtatttgacgagccaatccggctcacctgctaaaaccagtgcggacaaggccgtctcgcagaattttcaagcgggaccgccatggcgctacggcagggccgacgcgcgctttacgctggtgctgtatgccgatctggaatgcccatactgcaagagctactacccgctgctcaggtcatgggtcgaccggaaccccgagacgaacctgcaatggcaccatctgccgctccccatgcacgagcccgccgcaacacgacaagcccggctggccgaatgcgcgggagaggccgggggccacgctgcgttctggcaggcgatcacctggatctatcaacaaacccacagcggcggagcaggcatacctgagagcagcaaatacccggcgctcacgccggccatgcagacctgcatggacagcccacgcaccgaagcaatcgttcaggcgcaggccaacgagggttcgcgtgaaggcgtcaccgcgacccccacgctgaagttgagcgacaaccagagcggccatacacttgtcctacctggtcccgtcgaaggcgatgcactgttatcagcgctggatttgttatccaccgatggcaacaccgacctgggaaagaacaccggggcacccgacgacggcgttagcagcgtgcccagatag

SEQ ID NO: 208036 - DNA, 2112 bp, Klebsiella oxytoca
atgcttgatggcagctatgacagcctattagtgctgttctcgttggcggttgccatattggcatcctataccacactggttgttgcaggccgtatcgcgacatcttccggtcgtcccgcccgatggtggttggcaggcggtgcctgcactatggggatcggcatctggtccatgcacttcattggcatgttggccttcgatctgccgatcgatctcggctacgacttgctgatcacgctgttgtcactcctgttcgcggtcgcagcgtccgcctttgctctctggatcgtcacgcaggaaacgttgacctatcggctacttacagccggcgcccttgtgatgggtggcggggtggcgggcatgcactacacgggcatggcgtcaatgcggatgatgccaggcatcgtgtatgacacgacgctgctcggattgtctgtactggtggcgattggcgggtcggcggctgcgatttggtgcgctttcgtgctccgccagcgctccgcgaaggtgggccggcttcgtctcggagccgccgttgtcatgggcctgacgatcgccggcatgcactatgtcggcatggccgcagcgggctttccggctggcagcatttgcggtgcagcacaaggcggtgtgcatgcacactggctcgccctaaccatcattctggctgcgctggccgtactgggcatcgcgctgatcgtctctgtgctcgatcagcgcatggagtcccgtacggccttgctggcaaaagagctggctgaagccaatcaggaactgacgcacctcgccctgcacgacaacctcaccaagctgcccaatcgtgtgctccttgaggatcggctgagccaggctatggagcgggcgcgccgcgagaaaatccgcttcgcgctgatgttcatggatctggatggtttcaaggcagtcaacgacgcctacggacatctgatgggcgatatgcttctcgtggccgccgctggccgcattgtcgagaacacgcgcggaagtgacaccgtggcacgcgttggcggtgacgagttcgtggtgctggcccaggtggacgaaccaaccgatgccggagtcctggccagcaagctggtggctgcgattggagagccatacctggtgaacgggcatgagcttcatgtgtccacgagcatcggcatcgccatctatccgggcaatggcgaaagccaggacgaactgctgaccaatgccgatgcggcgatgtatcacgtgaagggtacaggccgcgacgactactgcttcttcgaggcatcgatgaccgccaatgcacacggccaggtgcagctgctgcaggacttgcgtatggcgctcaagcgcaacgagctggttctgcactaccagcccaagttcaccgcgccccatggtccgatcactggcctggaggcgctgctgcgctggaagcatcccgcccatggcatgctcagcccggtgagcttcattccgctggccgagaaaacgggcctgatcgtgtctatcggcgagtgggtgctgaatgaggcgtgccggcagatggctgagtggcgggatgatgggcgggaggactggaccattgcggtcaacctgtcggcggtgcaactcgcgcattcgggcctggtcgaggccgtgcgcggggctctggatcgccacggactggaaccgcatcggctggtgctggaaatcaccgagtcgacggccatgcgtgacgtcgacagcagccaggccatccttcagaagctccatgacatcggtgtccgcatttccatcgatgattttgggacaggctattccagcctgctgtacctcaagcgcttgccggcgacggaactcaagatcgatcgctgcttcgtgcatgacctcgcttgcggcacagaggatgccgccatcgtttcggccatcgtcgcgctggggcagacgcttgaccttcgggtcgtcgccgaaggcgtggagacggcagagcagcaggaattcctgaccagtctcggctgcgatacccttcagggttatctgttggcgtacccgatgcaggcggatgaggtgattgccctgccgaacaacggtgaactggccaatggcaggcccgcggcaccggatgaaatggaacttgtctga

SEQ ID NO: 208037 - DNA, 2883 bp, Klebsiella oxytoca
atggactggccgttcttcaagcgccgtgcttcgtcgcccgataccgatagcggctcctcgccagatgctccaccggacgcatgggagcgctacctcgcgcagctgcaggcgcacggcatccctgaacccggcaagcgggacaccaggcgcagatccgcgacgctggccgacgagcaggcgctgtacgacgtttcgccgtcctttgccgatctgctgccgtgggtagagtatctgccggagtccaggtgcatgctgctggaggacggagcttctgtcgccgcattcttcgagctgatgccgatcggtacggaaggtcgggaagcctcatggctggcacaggtccgtgatgcgctggaaaacgcaatccaggacagcttcgatgaactggacgagtccccctgggtggtccagttgtatgcccaggacgatgccgactggaaccgctatctttccacccttgaaaactaccttcagccccgggccagggaaagcgcgttcacgaatttctatctgcgtttcttcggccaccatctgcgcgccgtctccaggcagggagggctgttcgaggaccgcacggtcacacggctgccctggcgcgggcagacgcgccgtgttcggctggtcgtctaccggcgcgtcggcaatacgccagcccggcgcgggcaatcgcccgagcaggcgctgaatgtcgtctgcgaacgcctggccggcggcctcgccaatgccggcgtgcaggcgcaccgcctcgatgccgctgccatccatgcctggttgctgccctggttcaatcctggaccaagcttgctgggcccgacagacgaagaccgtgagcggttctatcgcctggcttcctatccggaagcgaccggagaagacgaactggaacttgccagcggcaccgatttcgcgcagcggctgtttttcggccagccgagatccgatgtcgacaacggcctctggttcttcgacggcatgccccatcgcaccatcgtgctcgaccgcctgcgcacgccgccggcaaccggccacctgaccggcgaaacccgcaaaggcggtgacgccatcaatgccctgttcgaccagatgcccgaagacacgaccatgtgcctcactctggtgatcacgccccaggacattctcgaagcccatctgaaccatctggcgaagaaagcggtcggtgaaaccctggcatcggaacaggcgctgaaggacgtgcagcaggcgcgcgggctgatcggcagttcgcacaaactctatcgcgcttcgctggcgttctacctgcgcggccgcgatctcgccgatctcgatatgcgtggcctccagctcggcaatgtcctgctcaatgccggcctgcagccggtgcgcgaggaagacgaagttgcaccgctcaacagctacctgcgctggcttccctgcgtctacgaccccggcaaggacaaacggcagtggtacacccagctcatgtttgcacaacacgcggccaatctggcgccagtctggggccgcagccagggaaccggccatcccggcatcaccttcttcaaccgcggcggtggtacggtcacgttcgacccgctgaaccggctcgatcggcagatgaatgctcacctgttcctgttcgggcccacgggctcgggcaagagcgcgaccctgaacaacatcctcaaccaggtcaccgcgatttaccgcccgcggatgttcatcgtggaggccggcaacagcttcggcctgttcggtgatttcgcggcacggctgggccttaccgtgcatcgcgtcaagctctcacccggcgccggcgtgagcctcgcgccgttcgccgatgcctggcgtctggtcgatacgccgagccaggtgcagacgctcgatgccgatgcgctggacgaggacaccggagaagaggaaacgatggaaggcgacgagcagcgtgacgtgctgggcgaactggaaatcaccgcccggctgatgatcactggcggcgaggacaaagaggaagcccgaatgacgcgggccgaccgcagcctgatccgtcaatgcattcttgaggccgcgcagcgctgcgtgtcggagaagcgcaccgtgttgactcgcgacgtgcgcgatgcgctgcgcgaacgcggccgcgatcctaccttgcctgaaacgcgccgcacgcgcctgctggaaatggcggatgcgatggacatgttctgtcagggtattgacggtgaaatgttcgacaggcccggtacaccgtggccggaggcggacatcaccatcgtcgatctggcgaccttcgcgcgggagggctacaacgcgcagctctccatcgcctatatcagcctgatcaacacggtgaacaacatcgccgaacgcgaccagttcctcggccgccccatcatcaatgtgacagatgaaggccacatcatcaccaagaacccgctgctcgcaccctatgttgtaaaaatcacgaaaatgtggaggaagctgggggcctggtactggctcgctacgcaaaacctcgacgacctgccgaaagcggcggaacccatgctcaatatgattgaatggtgggtatgcctcagcatgccgcccgacgaagtggagaagatcgcccgcttccgcgagctcaatccatcgcaaaaagctctaatgctctcggcgaggaaagaggccggcaaattcaccgaaggcgtaatcctgtcgaagtcgatggaactgctgttccgcgccgtcccgccaagcctgtacctggcgcttgccatgaccgagccggaagagaaggccgagcgctaccagctcatgcaacagttcggcatcagcgaactcgatgccgccttcaaggtcgcggaaaagatcgaccgggcgcgcggcatcaactcgttgccgctggacgcactggactga

SEQ ID NO: 208038 - DNA, 435 bp, Klebsiella oxytoca
atgcacaggatctggattaacggcctggcggtgctggtcatcgccgtggcgcttggcggttgctcgaccagcaaggaaaaattgctgcctcacgatgggcagagcatgctggatatctggaacgaggaaaccggtggcaacgcccgcggcggtcagaccgcccggcagctgctcgatgcaagacagtcgctgcgccgcccgctgaccgaagtcgatgtgaaggccgcgccggcggtcaatgccagctacacccgcacagcgcaaaacgagatctaccggcagttccaacgcctgccgaatcccgatctggtgatgtacgtgtttccccatctcgcgggcaccgatccggtgcccatccccggctacaccaccgcctttccgctgtaccagcgcgtgcaatacgccatgccgggcgaacggaccgaggattactga

SEQ ID NO: 208039 - DNA, 1446 bp, Klebsiella oxytoca
atgaaaggtaatggcctgctcaagtggttgatgatcccgatggcgctgctgctggtgttcgtcggcgtgaagctgttttccggtggggggagccagcctggccgggacggcggaacccagctcacaccggaagaagccagggcgcttggcatcgaaggagacacgccacgggatacggtggccaccctggtcggccaggtccggcagctgcgcaccgaactgcagacggcgctgaccgacaacaagacccagaaggcagagaacgaacgcctgcgtcagcgcgagggcgccatcgatcgccgtatccagagcgccctggagaccgagcgcaatcagctgaaaaatgaccgtgaacaggtcgccagcgaacgccagcaaacccagggcctgctgcaggacctgcagcgccagttcgaaaacctgagcggcaagaacggccatgccgatctgccggtcgggcttggccttgaacccggcgatggcgccgggctcggaaccgatggcgtgcgatggatcgagccggaagatgcacgcagcgacggcaagagccgcagccccggcaccaccggaagcttcacattcccgaacagcttcggcccggcacagaagacgttggacaccacccgggagacggtcgcggatgccggagccaaggcggccggcatctccaccgccaggccggtctataccgtaccgaccaacgccacgctgatgggttcgatttcgatgacggcattgatcgggcgcgtcccgatcgacgggaccgtgaacgatccgtaccccttcaaagtcctgatcggcccggacaatctcaccgcgaacggcatcgacattcccgatgtcgccggtgcggtcgtcagcggcacggcgtcgggcgactggacgctctcttgcgtgcgcgggcagatccgctcggtcaccttcgtgttccatgacggcaccatccgcacggtgccggaggacggcgagcgtggcggcaaccgccagcagaacagcaacggcaacggcaatggcagcagtacgcaggatggcctcggctggatcagcgatccctatggcattccctgcgtgagcggtgaacggcgcagcaacgcccagcagtatctgggcacccaggcgctgatcaccgcggccggagcgggtgcggcgtcgctgatcaagtcggacaacggcagcgtggcggtggtcgccaacaacaacggctcgcttggcacggtcggcatttccggcaacgaagcaatgggccgcatcctggccggtggcgtccaggacatgtcgcagtgggtgaacaagctctacggccaggcgttcgcggccgtgtacgtcaagcccggcgccagggtcgcggttcatctcgaacaacccctcaccatcgattacgacccgaaggggcgcaaggtcgatcatcgtctcggaggtgcttctgatgcacaggatctggattaa

SEQ ID NO: 208040 - DNA, 909 bp, Klebsiella oxytoca
atgaaacatgtcctttatgcccttggactgctggtgaccacgagtttgccgaccacggtccaggcgctggaaatcctgcgctgggagcggctgccgctggcggtgtccctgcatgtggaccaggagcgcgtcgtcttcatcgaccgcaatgtccgcgtcggcgttcccgcatcgctggccggccgcctgcgtgtccagagcgccggcggcgcgatctacctgcgggccagcgagccgatcgagcccacccggctgcaattgcaggacgctgacagcggcgccttgatcctgctggacattgccgccgaacctgcaccggccggccaggcgccgctggagccggtgcgcatcgtcgaagccgaaggcgctccgacccgttacggtgacctggcagcggcggctaagagcgacgacaacggcacgcaggaagcggtctcccgcacggctcgcgagacgcccgtgccggtggtgctgacgcgctatgcggcccagaacctttatgcgccgctgcgtaccgtcgagccggtatccggcatcacgcgcgtcaatctgaaacgcaacctgccactggataccttgttgccgaccctgccggtgcgggcgcgcgcgctcgcggcctggcggctcgatggcttgtgggtgacggcggtacggctgaacaacacctcgaagcgctggctctccctcgaccctcgcgacctgcaaggcgacttcatgaccggggtcttccagcacaacacgctgggtccggccggcacgcccgatgacacctcggtcgtctatctggtgacgaaggggcacgggctgggtgaatcgctgctgccgacgatcagcccggtcaatgccgcactgaacctgccggaacccaaaacaccggctcgcaaggatggaggccgtcatgaaaggtaa

SEQ ID NO: 208041 - DNA, 693 bp, Klebsiella oxytoca
gtgagccggttcaagaatgagatcacccacctgcaggcgcacatcaagaccctgcgcctcggcgcgggcgccttgctcctggtggccctggtgatggggatcggctggtggaacgcgccgcgcgatctgaccatccacgtgccgccggacctgcgctcgggcagcacccggaaatggtgggaggtgccgccagagtcggtttattccttctcgttttatatctggcagcaactccagcgctggcccgtcaacggcgatgaagactacgcccgcaacatccatgtgctgtcgccgtacttcacgccatcctgccagagcttcctgcgccacgactacgagtaccgccgcacggccggcgagctgcgtcagcgggtacgcgggatctacgagatccctggccgaggctacggcgaagaccccacgctgcgggtaaaggcggtctcggaccgcgactggatcgtcacgctggatgtcacggcggacgaatattacggctccgaacaggtcaagcgcgccttggtgcgctaccccctcaaggtcgtgcgctcggacgtcgatccggaacgcaacccattcggcctggccatcgactgctacagcggtgcgccgcagcgcatcaccacccccgaccccgtgacaccgaccggtacgacatccggcgggctcggcggcgctttgggagagacgccatga

SEQ ID NO: 208042 - DNA, 402 bp, Klebsiella oxytoca
atgcctgagcatcaggacgtccggcctgacggaacggtagcgttcctgccgcatcgcctcaatcgccatcctgtggtcgtgcgcggcctcacggcggatgagttgtgggtgtgcgcaggcctgtcgggcgcggccggcctgtcagtgggcattccgctggcgatcgtcttctcgatgatcgccatcgcgcccaccgccatcgttctcggcatcgccgccggcgtcttcgccggcggcggcatgctgcgccgccagaaacgcggcaggcccgacacctggctgtaccggcagatccagtggtggatcgcgcggcggcatccgggtctggcgcagttcatcggcggccgcgatctggtgacccgttcgggctactggaccaccagacggaggaccgcctcgtga

SEQ ID NO: 208043 - DNA, 366 bp, Klebsiella oxytoca
atgaacccggttttgcatcccttccgctccactcgcatcgcagccctggcgtccctgccggcgtttgccatgctgagttcactcgcccaggcccagggcctgcccacgcttgaagacccgtcgcgcggcacgggctcgggcatcatggatacgctgcgcaactacggctacgacatcgtgatgctgatcgccttgctggtggtcgcgtcgatgttcgtgggcgtgtgctaccacgcctacggcacgtatgccgaaatccacacaggccgcaaaacgtggggacagttcggcctgaccgttgcggttggcgccgtcctcctggtcgttggcatctggctgctcaccgaagccaccggcgttctgtga

SEQ ID NO: 208044 - DNA, 234 bp, Klebsiella oxytoca
atgaatgccagccagatcaccgccttccaggccaacggcggcttcaccccatccgccgtatccgtcgtgctggtcggcgcggtgttcgcggtcctgctgctgtggggcgtgtgggcgctgcgcactgcctatgtcggctggtcggagcagcggatttcccagcgtcagttcctcggcgtcgcggtgcgttttgtcgcgatgtacgtcgtgctgactttcttcctcctctcgtaa

SEQ ID NO: 208045 - DNA, 357 bp, Klebsiella oxytoca
atggcacggtcctaccgctcggcacttgcaaggcgcagcgcgctcgcggcgctgctgcttgccggcctgtcgacggctctgccggcgaccgcggccgacgacagcaatgagaaggaacatctggcggcagtcgttcgccagttggacctgctcgatcgcctcgcgaagcagtccgccgcgaccgcatcgcaggagcgcgcccgctatcacttcgactacacgcgccttgccgctgacctgcagcgcatgcgggccggcatcaacgactacctgacgccgcagcgcgcccagccgcgcgaccccgcggcgttgcagggcgattaccggcaggactccgaacaggagccgaagaaatga

SEQ ID NO: 208046 - DNA, 540 bp, Klebsiella oxytoca
gtggggatcgaacgcggcttgcacgcttgcgttggaaacaggcacgccgcgcagcgggcaagacatgtggaaagcgcacagaagcgtccctatgagagtgctaatgcgctaatttcgctctgttggaaacggttattgaaagtttgggcgagtgatgcaataatccgtctcatgaagacagataacgacgacaagcgctcccgtgggagcgataaattagatgcgccactgccgttgcccgtcgagcgtgcgatccgcaagctcggcagcgacgtcgcgctggcgcgcaggcgccgccggatttcgcaggcctcgctggccgagcggatgggcgcatccgtgtctaccgtccggcgcatggaaaaaggcgatgtgcgcgtgcctatccatttcttcgcccgcgccctgcatgtctttggcgagatacaggccctggccgggctgctggataccgcgcgcgacgacatcggcctgaccttgatggacgaacaccttcccaaacgcgtgcgcagcaagccgccgacatcgggggcactatga

SEQ ID NO: 208047 - DNA, 1290 bp, Klebsiella oxytoca
atgaaatccgcagtttcgatacgccagcagatccaggtctgcatcggcaaggccggcacgcctgtcggcacccttatctatgtcaagcagggacgccgagaaaacgccacctttgcctacgaccagagctggctggcaaacccggacgggttcaatgtgtccgccgaccttgcgcttcactctggctatcagccgcgccgtgcgccgtcagcgcacgattcggcctttcacttcgccattgccgatacggctccggacgcctgggggcgcagggtcatcgcgcgggaccacgccaagcgccgcaaggacaacgtggccctcgcacccttgaccgagctggattatctgctggcggtcgatgatttcagccgggtgggcgcgttgcgtctgcgtgatcaggatgggcgctattgcaggacggtcgatgaaggccggcgcagtacgccgccgcttctggaactgcagcgcatctaccaggcgagccgcgcggtcgagcagggtcaggaaagcaccgaggatctgcgctacctgcaaggcaagggcacctcgcttggcggcatgcgtcccaagagcacggtggtcgatgaggatggcgcgctggcaatcggaaaattcccgagcgtgggggatacgcgcagcgtgacgcgtggcgaggtactggccctgcgcctggcgcagcgcgccggcatcgatgccgcgcctgctcgcatcgtcgagatcgaggacacgccagtcgcggtcattcgccgcttcgatcgcgatggggtcgatggacgcattccgtaccagtccgctgcatccttgctccaggcctcacgagaagaggaccggagctataccgagatcgccgacgccatccgttccgtgggacattcaccaactgcggacgtgcagcaattgtggcggcggctggtcttcaacctgctgatcaccaatgtggatgaccacctgcagaaccatggttttctgcacgtcgaaaacggactttggcggttggcgccggccttcgacatcaatcccttccccgacaaggatcgggaatcgaagacctggctgtcggagcaggacggaccgatcaccgaccttgagatgctgctggcccgaagcgcctatttttcattgagcaggaacgatgcgctggctgtgctggcggaggtgcatgccgccgtgctggattggcggcaggtcgcgcttggtgcggcggtggggctgcgctcgaacgagctggacgactttgcgccggcgttcgagcatgagcagatgttgcttgcgaaagcgtttctcggctga

SEQ ID NO: 208048 - DNA, 198 bp, Klebsiella oxytoca
atgctcattttgacgcgccgcattggcgagaccatccatatcggcgacgacatcaccgtcaccgttcttggcatcaacggccagcaagttaaattcggaacgagcgcgccgagggaagtggatgttcatcggcaagaaatctacgagcgaattcatcccggcagtgcctcgcatttctccggcaagcacccttactag

SEQ ID NO: 208049 - DNA, 750 bp, Klebsiella oxytoca
atgagcgatccggccgccaccgcacaacgccagcagaaccgccagcaaggtctgattgccagcaccatcacgctgccgtttcgtctgttcggcgttctgtgcggctcgctgctcctttgcatcgtcatcgaatgcgtgggcatgcacctgttctggccggaccagggatggcggcacgcacagggcatgctcgactatgaacttgcccagctctccggtcatttcacccgcagcgctctggtgcaggaaccgggacgcactgcgcattggctggtcgaacaggcctacgaatggatcttcgtcaagacaggcttactggagtggatgcgcaacgccgcgaaccaggccagcgcccccagccatagcggaacacgcgatttccggtactacatcagccaggcatatgtctggatagaaagctacctgatcgccgcggcgttcacgaccctggtgttcatcgtgcgcctgatggtgctggtgctgacattgccgctgttcctgatggccgccttcgtggggctggtcgacggcctggtgcgccgcgacattcgccgtttcggcgccgggcgcgaatccggcttcatctatcatcgcgccaaagcatcgctgatgccgctggccgtactgccctgggtgatctatctggcgcttcctgtgagcatcagccccttgctcatcctgctgccgagcgcggtgctgctgggattggcgacggacatcgcagccggaagtttcaaaaagtatttgtga

SEQ ID NO: 208050 - DNA, 2163 bp, Klebsiella oxytoca
atggcccagcctcatgcggtcgaagtgctgctgcggccagcggtggagctatacaccgttgcggtttgcgccggcgccgcgctggtgtgcatggtggcaccatggtcgctcgcgttaagcccgctgctgggattcggcagcgctctggcattcctcgtgtttggcggcatccgcctgcgcgacgcgatggccatcctgcgataccgccgcaatatccgccgcctgcctcgctatgtcatgaccagtcgccaggtgccggtcagccggcagcgcctgttcatcggccgcggctttcgttgggaccagcgccacacgcaccggctgatgcagacctatcggccggaattccggcgctacgtcgagccgacaccgatctaccgccttgcccggcgcgttgaagagcgcctggagttcgcaccgtttccgctttcgaagctcgcccgggtgattgcatgggacaacccattgaatcccgcgcggccgctgccgccagtgggaggcatgccacgcctgcacggcattgagccgcatgagatcgacgtcaccctgccgctcggcgaacgggtcggccactcgcttgtgctgggcaccacgcgcgtcggcaagacccggctggccgagttgttcatcacgcaggacatccgccgcaagaacgccgccggcgagcatgaggtcgttatcgttttcgaccccaagggtgacgcagaccttttgaagaggatgtacgtcgaggccaaacgcgccgggcgcgagggcgagttctatgtgtttcatctcggatggcccgacatttcggcgcgctacaacgccgtggggcgtttcggccgcatcagtgaagtggcgacccgcatcgcagggcagctttcgggcgaaggcaacagtgcggcattccgcgaattcgcatggcgcttcgtcaacatcatcgcaagggccctggtggaactggggcagcggccggactacctgctgatccagcgtcatgtggtgaacatcgatgccctgttcatcgaatacgcccaacactacttcgccagccatgagccgaaggcgtgggaggtcatcgtccagctcgaaggccgcatcaatgacaagaacacgccccgtcacatgatgggcagggagaagcgcgtggtagcgctggagcaatatctctcccaggtgcgcgtgtacgatcccgttctcgatggcctgcgttcggcagtgcgctatgaccgcacctacttcgacaagatcgtcgcgtcgttgttgccgttgctcgaaaagctcacgaccggcaaaaccgcgcagctgctcgcgccgaactattccgacctgaacgatccgcggccgatcttcgactggatgcagatcatccgcaagagggcggtcgtctacgttggcctggatgcgctgtcggatgcggaggtcgccgcagcggtcggcaactcgatgttcagcgatttggtatccgtggccgggcacatctacaaattcgggatcgatgacgggcttcccggtgcggcctccggcgtgaaattgccgatcaacgtccatgccgacgaattcaatgaactcatgggcgatgaattcatccctatggtcaacaagggcggcggcgccggcctgcaagtcacggcctacacccagaccctcagtgatatcgaagcgaggatcggcaaccgtgccaaagccggccaggtggtcggcaacttcaataatctcttcatgttgcgcgtgcgcgaaacagccacggcagagttgctgaccaagcagcttccaaaggtcgaggtctacaccacgtcgctgatgagcggggccaccgacagttccgacattcgcgggcagaccgatttcaccagcaacacccaggacaggatcacgactaccagcgtgccgttgatcgagccggcgcacgtggtggcactaccgaaaggacaggccttcgcattgctggagggtggaaacctctggaaggtgcgcatgccgttgccggcgccggaccccgacgaggcgatgcccagggatctgcaacagctggcgggctacatgcgtcagcattacgtcgaggctggcgactggtgggaaaaccaggggcttcccggactgcaggatgaaccgctgccggacgacctgctggacgacttccggcacatcaccgcggccgatggcgaggcggttgtatga

SEQ ID NO: 208051 - DNA, 552 bp, Klebsiella oxytoca
atgaagcctgccttcgtaggcgccgtgaggccgattctttgcgctctgttgtgcgccgctggtctgccagccctggcggcgggccagccgcctctcgtcgtggtcgaggaccatggaggcacgtccgctctgccttactaccaggcgctggacctgccgccacgcagggatcaaccgggtccgccacggatctccgtaccgccgtccggaggcaagaccttcagcgaagccgacatactgcccgtgcgctcggagcggttgtcgcccggcgatgagcctcgccgggtgatccaggctccgggcctgacgccagtcttcctcatcggcgatgacgaacgctcacgcgcctggctgcttgagcgcaaggcggcgttgaccgaaatcagcgccatcggtctcgtggtcaatgtcggatcggcagaggcactggcgggactgcgcaagctggcgcccgagctcaccttgtcccccgtatcgggtgacgacctcgctcagcggctcggactgcgacactacccggtcctgatcaccgccagcggcatcgagcagtga

SEQ ID NO: 208052 - DNA, 573 bp, Klebsiella oxytoca
gtgaaccgctacgcgcgcctgctcgcgctgctggccagcttgatggccggaaccgcccaggctaaggcccaggagattccgccaccagcctaccagctcgcagcgcagcgcgccgatattccgtccccggttctgtatgcagtggccttacaggaaagcggcctgcagcgtggcggccggctgattccctggccctggactctgaacgtggctggcgcggcccgccgcttcagcagccacgccgaggcctgcgaagggctgcgcaaggcgctgcgcgaagttccaccaacacgtatcgatgctggcctggctcaaatcaacctgggctaccagaagcaccgctacagccgcccctgcgatctgctcgacccataccgcaacctcgccatcgcggccgaaatcctgcgtgaacaacacacgcccggcgaggactggttggtcgccatcggccgttatcaccgcccagccggcggcgcacccgctgcgcgctaccggcgcagcgtcagccagcacctggcgcgcgtggtcggtccttcccgtgctgacgcttccacaaggaggaatacaccatga

SEQ ID NO: 208053 - DNA, 741 bp, Klebsiella oxytoca
atgaaccgcaggatcattttgcttgcgttggcgaccagccttgccgtcggtgccatctccgcagcaacggcgcagaacgcacgaacagccacttctccggttgttcccagccaggaacagccggcaatcacgtccaacagcgatgaacagaacgcacgcgactggggacttcgcccggaggaatggacgcgctaccgggaggtgatgcgggggcctctgggcatcttctcgcccaatctcgacccgttgacagcacttggtatcgaggcgcgttcggacgacgaacgtcgccgctacgcagaattgcaggtgcaggtcgaagcacgtcgcgtcgagaaaacactggcgtaccagcgcgcctacgacgccgcctggcaacgcctgcatcccggcatgcagcgcgtcaatctgccgggagccaacatcgcttccggtgcgagtgccacatcaagcgatgcgcgccgtatggccgtattcgtcaaggacgaatgcgccccgtgcggtcagctcgtccagcaattgcaagcttcgggaaccgaattcgatctctacatggtcggaagccgccaggatgatgcccgcatccgcgattgggcgaagcgggcgcggatcgacccctcccgtgttcgcaatggctccatcaccctcaaccatgacgcaggccgctggttgtcactgggtctgcagggagatctgccagccgtcgtgcggcagatcggcgatcaatggcaacggcagtga

SEQ ID NO: 208054 - DNA, 648 bp, Klebsiella oxytoca
atgaccatcatccccggctccggccgccgctcgcgcgtaccgctgctgcgcgtggccaccatcacctggggcctgctgatcagcgcgggagctgtcgtgaaccatgtggcgctgtccaaccttgccacacaggccggcggcagcacacaaagcacgcaagtcgctgccctggagacccggctggcagaactggggcagcagctcgaagcgcagcgtcaacagcccgacacgttgacgaccgcgcagtttgaaaccgagcgccaggccatcgagcaacgggtttccaggatcgagcaggcgcttggtgaacggctgacggccgaaagcctctctccattgcatagccgcatcgagcagttggaggcccgtctgtcgaaagccgcccagatcgctcccaccccaacccggacgcggaagaaccaggccgccaagcccaaggcggcggtgcctccattcaaggtcatcggcctcgaaatgcgcggcggcgaacgctttttgtcgatcctgcctacgggagccgctgccacacccctgacaggcgttctacggcccggcgaaacggaggctggctggcgactggaaaccatcgaagaccacaccgctgtgttccagaacaacggccaggttcttcgcgtggtcgcgccatag

SEQ ID NO: 208055 - DNA, 585 bp, Klebsiella oxytoca
atgcaaccattcagccacttccatcgccatctggcgggctgcggcctgctgatcgcagccgcactgatggccggctgcgccacgacgacacctccgccgaaggccgcacccatcgcgaagccggcgatcgtaccggcaaaacaggagccggaattcgttcctgtcgttcgctatggccgttacaccctggtcgaactggctccggcatcggcacagcaagacctgctgttgcaggtggtcgatgtcgccatacccgacacgcgcaccgcgaccgtgggagacgcgttgcggcacgtcctgctgcgctccggctatcagctctgcgctgtcggtgaaatcaccgcactcaattcactgccgctgccggcatcccactatcggttggggccgatgcttctgcgtgatgccctgctgacgctggccggtcctgcgtgggatctgaaagtcgacgatggcgcccgccgcatctgcttcacccgcgctccccagccagcatctgccctgagccaaccggccgcacactctgcctcgaagccggccggtcatgttgaaaaacgcccgctcaccacggaggtccggccatga

SEQ ID NO: 208056 - DNA, 507 bp, Klebsiella oxytoca
gtgttggcattgccctccagcagcatgctgctgttgctcctgattttgctggtcggcattgacctgacacagatcaagctggatgctcgctggttttctcgatcggtattgatcgtacccgtgtccgtggtaatcggctccatgctcggtggtgccatcgccgcttggatgacaggtgagagcatgaaagtttccttggctctctccagcggcttcggctggttcacgatctccagtgtcatgatcggtggcgcgctagggcagacatacggaacgatggcgctcatgacggatctgcttcgcgagttgctcgccatcgtggtgctctacaccttgggtcggcaccagccccaggtcagcattggcagcgcgggcgcgactgcactggatttgactctgccgatcatcaagcaggcgtgttcgcctgatgcggtgccgttggcgctggtgagcggcttcctgctgacgctgctggcaccggttttcatctctgctatcctgacttag

SEQ ID NO: 208057 - DNA, 1068 bp, Klebsiella oxytoca
atgaaggtgctgatcatcgggttgggctacgcaggaagacgataccagcgtgctttctctcatctggccggcatgaacaaggtggatttgacgctagcttatgttggccggaggtcacgtacggatcttaagccgtactacacccaggtcgcaacggccctggccgagttccggccagacattgttgtggtcagcgtcaacgatcacagccatgtggcagtccttcgggaattggctagtttcgaaggcttcattatttgtgaaaaaccgctcgcggtgcccggcgatgactggtctgtagtttgtgctggactttctcgcgtcaagggattcgctctggatttggtcgaacgctattcggaaacaaccaagcggctgaaaggaatcgtatctcagcgtcaatggtcgttggtccggtccagcttctattggggcaaagatcgcctgaacgactatagaccaacgtgtggcgtgaccagcgaaatcatccacgccctcgacctcgtggaatggatatgcgcctctcaaggatcgttgcaactgcagcaggcgataggaatcggctcggacttttccatttccggaaattccgtgccggatacggttctcctcacggccaccttgggggatgccccggttgctgggtatagcagcttcgtcaatatacagcgtcaaaggacagtggactttacgtttgcagatcctgacggtcgcatttttcacgcccgcatcgtgttcgacacaccgaattgggatcacgaccacctgcgcatctggagtcgtgatgtcagcggtctagaggtgctggaggacgagcattgggccacgccgcagcaagccggcctggagactgtctacaaactgtccttgctgtgtgacgacgctctacgagcaacgataggcgatccaccacagcaacctttcgcagacgtggaagtgtcaatgcacttgcagcgcttgctcgatgccatcggtcagcagatcaccgtgctgccaatcgctcgctacgttcgaggtcccgaacgcatcctcatcccggaaaacgcagacctcgaaagcctgggctag

SEQ ID NO: 208058 - DNA, 501 bp, Klebsiella oxytoca
atgccaattacgcaattgaaaatacgcggcgctgcacaagccgatatcgacgtactcatatcgttacgtgcgtaccttctggatggcaacgaagggacggggtacgcaagccgcaatgccgatgaaagtcgtcgctggaaagctgcctacaaggtctggttgtcgcaagttcttgaagctgatgatcgcacgcacattatcgtcgccgataacgatggcgaggtggtgggatgtgccacaggcatcatcgatcgccgagctccagcaccagattgcatcagtggttggtgcggctgggtgcagtccatggtggtttcgccatcgtggcggcgcatgggcatcgccgaaagcctgatgcatgagttgctgcaatggttctccctgttgggagtcacgaaagtggtgctggaaagcacccaggttgctgaagcgatgtatcagaagctcggattttcgcccaattcagaacgcttgctcagtttttctggaggtcggccatga

SEQ ID NO: 208059 - DNA, 2274 bp, Klebsiella oxytoca
atgtccctcgatcttgaaaccatgcccgattccgccacgcagggcgacctgctcgaaacggaatcctcgccgctgaccatcagtctcaacgacttcgtttccgaattcggcgacgagctgttggacagcctcaaccgcgccaaccctccggtctacaccgggcaagcgcgcccacaccggcaacaggttctgtcgcgtctcaagcggctaccgttcccggcgcaggccgaagtcatccacgctgtcagtgagttgctgattgaccgcggcgagcgcgccgcgatcatcaacgcggaaatgggaacgggcaagacgctgatggcaattgccgtcgcggccgtgctcaatgccgaaggctaccgccgcacgctggtcctgtccccgccgcaccttgtctacaagtggcgccgggaaatcctcgaaaccatacccggcgcaaaggtgtgggtcctgaacggccccgacacgctggtcaagctgctgaagctgcgcgagcaactcggcgtaccggccactggccaggagttcttcgtactcggcagggtcaggatgcgcatgggcttccactggaaacccgtgttcacccgtcgccgtactcccggtggattcgtcggagcatgcccgcattgcggtcacgtcatcaccgatctcgatggcgagcccatcaacacggtcgagctcgaagccgaagagtcgcggcgcaagtgcagccagtgcgcatctgcgctatggaccctgctacgtcctcgttcgctttcggcaaccgaccagtcctcggcggtgatcaaggcgctcaagcgtattcccaccatcggcgaagccacggcccagcggctgatgaaaaagttcggcgagtcgttcctggtatctcttctgggcgacaaccttttcgagttcatcaacctgatggacgagaacggcgatcttgtcttcagcgaccggcaggctcagcgcatggaacgtgcaatggcctccatggaatttggctttggtgaaggcggctatcaagccagtgaattcatcaaacgctatcttccacagggctttttcgatctcctcgtgtgtgacgaaggccatgagtacaaagggtcgggttcagcacagggacaggcgatgggcgtgcttgcctctaaggctcgcagaaccctgttgctgaccggaacgctaatgggcggctacgcggacgatttgttcgcgctgctgttccggacgctgaccgggcgaatgatcgaagacggctaccggccctccaggaccggcagcatgacgtcggccgcgatggccttcatgcgcgaacacggcgtgttgaaggacatctattccgagagcaccggaaccgcgcacaagacggccaggggcaccaagatcacggtgcgcaccgtcaaagcgccaggcttcgggccgaaaggcatcctgcgctgcgtgctgccgttcaccgtgttcctgaaactcagggacattggcggcaacgtgcttcctccctacgaagaggagtttcgtgaggttgcgatggaggccgatcaggccagggcctatcgtgatctggccgggcgtctcaccgcggctctcaaggaagccctgcgcaagcgggatacgacgcttcttggtgtggtcctcaacgtgcttctggcctggccggacacgtgcttccgtcccgagacggtgacgcatccccgcacgcgggaactgctggcgttcacaccgtcgcagttcaacgagctggaaatcacgccgaaagagcgtgagctgatcgacatctgcaaggcagagaaagccgaaggccgtaaggtcctggcctataccgtctacaccgggacgcgggacaccacgtcgaggttgaaggttctgctggagcaggaaggtctgaaggtcgcggtgctgcgcgcaagcgtggacacctcacggcgggaagactggatcgccgagcagctcgaccggggcatcgatgtgctgctgaccaaccccgaattggtcaagacgggcctggatcttctggagttcccaacgatcgtgttcatgcagtccggatggaacgtatatacgcttcagcaggctgcgcgacggtcttggcggatcggccagaagctcgccgtgaaggtcatctatctcggctacgcagccacgtcgcagatgacgtgcctgtcgctgatggcgaagaaaatcctcgtatcgcagagcacatctggagatgtgccggagtccgggttggacgcactcaacacggacggcgattcggtagaagtggcgatggcaaggcaacttgtcgccgcctga

SEQ ID NO: 208060 - DNA, 312 bp, Klebsiella oxytoca
atggcacatgaagcgcttttcctcagcgttgttccgcaaccgcgattcctgaccgggcaactggtcatgacctccggcgtcgatgaactggtccaacagggcctgctcaatcccggccgatatctcgcgcgccatctcagcgccgattggggcgatctctccgatagcgactggcagtccaatgacaccgccttgcgcaccggagaggatcgcctgttttcgtcctaccaggtcgagcctgacctgaaactctggatcatcaccgaatgggatcgcagcgtcaccacgctgctgcttcccagcgaatactaa

SEQ ID NO: 208061 - DNA, 306 bp, Klebsiella oxytoca
atgacctccgacgcgaaacctcgtgatcaccgccgtttgctgttcccgatcggcgcattgattttcagcgaaggcgtagaccgcctgatgcgggaaggcaggctcgatccgatgccttacttccagcgccacatacgcggcgactggggcgatgtgacggacgacaagtggcaggaaaacaatgccgcattgaaatccaacgcgcgtctcgactcgctttatgcggtcacccgcgaactgaacattcgcatcttcaccgaggcagatcgcagcgcgacgcatgtcctgctgccagccgaattctga

SEQ ID NO: 208062 - DNA, 327 bp, Klebsiella oxytoca
atgtccttcaaactgttcccacgccagcgcaccacgccggcttccatccctctgttctccagcggtgccctgacgctcagcgccagggtgcaatggctggacagcaaggggctggttgatccccatcgtttcctgcatcgccacctgcgtggtgactggggcgatctggatcacaccgaacgtcgcgcgaacgatgccgctcttcaatcagaaggagctctgacctcgcgctaccaggtgacaccgcgtctgtccttgttggtgatcaccagcaaggatcacagccagaccgtgatccaactgcccgaggagaacgagccgcactga

SEQ ID NO: 208063 - DNA, 1107 bp, Klebsiella oxytoca
atggctctcatgttccctcggcttgcccgcaatttttcgaaaaacgggtactacccaaccgacgaacccacgctggagcgggcgctcaacgcgctggcgccggccgccggtcaagtcaccatcatcgacccctgcgcaggcgaaggcgttgccatcgctgaagccgcacatgcgctcggccgtgatctggtgtcagcttatgccgtcgaattcgacgaagaacgcgccaggcatgcccgaggtcttgtcgaccattgcctgcacagcgacctgatggacacgctgatcagccggcaaagctttggactgatgtggctcaatcctccctatggggatctgtccagggatgccgatggcaacatcggctaccagggacagggccgcgccaggctggagaagctgttctatcagcgcgtcttgccgctgctgcagtacggtggcgtgctggtcttcatcattccgagctacacgctggatgccgagctggtgggctggctgacacgccatttcaccggactgcgcatctaccgtgcggtcgaacagcagttcaggcaggtggtgatcttcggcacccgctcacgccagcgcgatctggcgggcgatgccaaagccatccgcaaccgactgctgcagatcggcacaggtgatatcgaagcggaagaactgccggtcgaatggccgttccttccgtattctgtcccagccacacaggccgagccggagcagttctaccgggtcaccatggagccggagcaattcgcggccgaagttcatcgccttcaagggttgtggccttccctcgatacgcatctcggcgcttcgcagcagtcgctgcggccgccggcccgtgccttgtctcactggcatctcgccctggcactcgccgccggtgcgatttcaggtgtcgtccgttccaaaaccggcaaggtgatggtcgtcaaaggcgatacccacaaagagaagtccgccgcagtcgaatacagcgaacgcgacgatggctcgatcgccgaaacgcgcatcctcaccgacaagttcgtgccggttattcgcgcatgggacatgacgcccggctctcccactcggggagaagtgctgaccatccgctga

SEQ ID NO: 208064 - DNA, 651 bp, Klebsiella oxytoca
atgcccgatacaacatcttcacaaccgcttctttgcattgctgaatgccccgacctgatggccgacggctacatcggcgacgaaagcggcaacctgatcttcctgtccgtctgggcacgagatacggccattcaacagtttctggcccggctcacactgggtcgtgacgacgatggcctggatcagttccacctcatcaccgacgaaggcggctccattccggttttcatcggaaacgtcgacaggctggagaagcgctccacgcgccttttccgccgcaccctgttcggttcgttgatcaacctgtggctcttcgaccagcgctgcgtcaagcccgacaaggccaacgccagcgcgctgacgctgttgcccagggactcagaccatcggcttgatcgtttgtggacgctggtacaggacacgtgcccgttgccactcctcgatcactggcgcgacatcgtgctggacctgctgatggagcaatccatgctggcgcgccttcccatggcttacgggctactggaagggcaccgtcttgcgctggatgttcctgtgctgacaaaggcactcggcgatctgatccgcaacggcgccctcagcgccacggcgcatgaactggcttccggcatgcctctacggcacgtcgcctga

SEQ ID NO: 208065 - DNA, 828 bp, Klebsiella oxytoca
atgcaactcgcatctcgtttcgcatcacgttccccgattctgcgtgcagatcatcccctgtcggatgaccagatccgcgcagtcgctccttccatctttgcggatacaccgcacgaaagccgctccgaacggtatagctacataccgacctccgccattctggcgaaactacgcaatgaggggttcgagcccttcatggtgtgccagacccgcgtacgtcatgaagaccgtcgcgagttcacgaaacacatgctccgccttcgccatgaaagccagatcaatggcaaagaggcgaatgagatcatcctgctcaattcgcatgatggcaccagcagctaccagatgctggccggcatgttccgtttcgtgtgccagaacggtctggtgtgcggcgatatcgtcggtgacgtccgcgtgccccacaagggcaatgtcacggaccatgtaatcgaaggcgcctatgaagtcctgagcggcttcgaccaggtgcaggattcccgcgaagccatgcgagccatcacgctcgatgatggcgaggcggaagtctttgcgcgctcggccctgacgctcaagtatgacagcgacaccaaggtgctgccgataactgaaagccaggttctggctacgcgccggttcgatgacaaccggccggatctgtggtcggtgttcaaccgggtgcaggaaaacctcgttaaaggaggtctgtccggtcggactgccaatggccgccatcaacgcacgcgccctgtgcaaggcatcgatcagaacgtccgtctcaatcgggcgctgtggctgctggccgaaggcctgcggcaactcaaaaactga

SEQ ID NO: 208066 - DNA, 342 bp, Klebsiella oxytoca
atgagtcggcactacttcgacacgtcccacaagggatttcccatcatcgtcgtgctcggctgggaccggccgatgcaatattttttcctgaccatcgaaaagcctgccgagctgatcgacgacgccatgcaggtcgaggacgaccacttcctgtacagcaatctgcacgagaccgatccattcggtcatgacctggactactaccgcgaggtcttgcggcattttcagatcatcgtgcccgatagcctgttcatggaggcgaaatccgacgccgaaaggaatgtcggcaaccgcctcaccaggcatcaggccgatggttcattcaccgaactggggctctga

SEQ ID NO: 208067 - DNA, 612 bp, Klebsiella oxytoca
atgatcacccttccgggccagttggccatcaagacaatccacggcaggaatggcgacttcaatgtcggccgcctttcgaccagcattggtgagttcgtcatcaagaatgccgagctggaccagtacgacgaaggcaaatacgacggtgatttcgtcatcgccgaaatccgaccctccacctacaacaccagtgggcggatggtcatcgaaatccgcgcccacctgggcgggatggccctctcgaacagcgatcgcctgagcaaggacgaagcccagcggctgagcccgcaggagatcgatcccattgatgaggaagcgcaggctccagcggcagccgccaggcctccggccaggaccaaggcccgcagtgcgcgtgatccactgatcgacaccacgccattcggcagcgaaccagcggcagcatcgccctccgacgcctcggctgaagatgacgatgcggcactgttcggcatgctctggccgttgagcgaaatcgtgaaactcgacgcaaccgtcgaccgccgcgtcctgcgtcagcagcgcgaccgtctcgatgcgatgggctatcggtttgaacctctgtcccaggactggcacctcgccagcgcctga

SEQ ID NO: 208068 - DNA, 549 bp, Klebsiella oxytoca
atgaccacttccaccgaaaagtcctttttcgacttgcacatcagcggcttaggctacctcaatcgcatccgcgaagtgaagccgaagaaaggtgagccgtttttggcctgcgatatcgcagcgctcaatggtccgagcaacgatgtctcgtacgtgcgtttcgatacgcgcgtttcgggcaccgatgcccagcacctcattcgtcgctgcatcgaggccgtcgaggccgagaagaaagtgatgatcgggttccgcctgggcgacctgtggaccgacaccttcacctattccaaggggaagcgcgccggcgaacagggtgtcagcctgaaagcccgcctgctgttcgtcagttggatcaaggtcgatggcgtcctgaagtacaaggccgagcccaagccggccgagtctgaacaggatgctgcggagcaatccgctgcgcctgctcctgcgccgcaggaagtgccggttccggaagcctccgagccggtcaacgaacctgccgacgaagccgccgatgcgcaagcaccggcactggccgagtcgttctga

SEQ ID NO: 208069 - DNA, 342 bp, Klebsiella oxytoca
atgtcagaaatcacttgcagcacattctcacggcccatcggggagacccattccgcgttcgatgaaaccgcgtggcgggccgtctgcgagaagttcgccgtgcaagccaacaacggctgcggactgtctcacgactactacgtcgaacgcttcagttcacagatcgaaaaacacattgatcgactgcctgaatgccagcgtgcgcgggctctgcagatagcacaggaatgggactacgcaacacctgtcgagaggcaggagactcggaactggaacgcaaatcatggctactgcacacacggaatcgagctgggttgctgcccggccggttgcggttcatag

SEQ ID NO: 208070 - DNA, 363 bp, Klebsiella oxytoca
atgtcattacgattcaatggtgcagacctgcgtccagtgctgaccgaagccgcggcgaacaaatgccgcgtggtcctggtgaaggatcacggggtctattttctgtcagagcgcggtgagcgaacgcccgaagggcgccaaaagctgctggcatatgccatcggctgcaatcctgacgtcgatccgttcgacaattggtgggagctgtcgcgaaccgagttgggaggggatgatttcgcagaatacttcgctcttcagggcgcgttcgcacacatcctgaacagcaaggacgatctcgaactatcagccacaccgacacaattgtccctacaagccgtgccgccccaacagggcaaggactag

SEQ ID NO: 208071 - DNA, 225 bp, Klebsiella oxytoca
atgtccacggcaagcggctcctgggtggtttattcacccaacgagtcggccgtcagcgacagcgccggcttctggtccaacgagttcggctgggtcttgttcgaccaagcgacgcgcttctcgaaggaagaggcccgggagcttacagcttccgctctcgactggccgttatgcgcgcttcgttccatggcaggaagcccagcggtattacggctgaatccgtag

SEQ ID NO: 208072 - DNA, 813 bp, Klebsiella oxytoca
atggaccgttccctcatcaaatccctgatgccttcgcttgtcgcagcccatgtgccgcgcaatgcgcgaggtttcaagtaccgcgtatttgacgatcagccacaagtatcggcattcggcttctcgatcgaccccgatgccttcgacggcaaagtggtcgcgaccaccggcgatgccatcatcgtcagggtcaaacccaccgagttcgcggtgctcgatcccaacctggtgacttccgtccccgaagaaggagccaaggtacatgtccaaccctacgcgcggcgtcggttcgacggcctgcgtgcggacaccccggaagagcgtacggagatgacgtctgacggcatcccctacaccgtcaaaacacatgtccttggttccgcaccggccaagctgcccattcccaagccacagtgcctggaactgggccagctcatccagcagttggaggaaatgccggcgcccgatggcttccggcgtatcacccatatgctggtcgatgcaggcgctcgtgacttcacctgggtcgatcccaagccgtcccggatcatcgcaacgcctccggcgatcagcttcacggtttcgaccgggaagttcgagggccgggtgacgatcctctatgaccgcgcgggcgacacctacgtggtggagctgcatcgcgatggcgaactggtcgatcggcacgacgaggtgtatttcgacatgctcggcgaagtgctggagcatctgatcgatgacgggcgctggcgcctgatcgacgtgagcgtgatcgacgccaaggcttcacggcgacgccaggcggtgtcggcgtga

SEQ ID NO: 208073 - DNA, 1020 bp, Klebsiella oxytoca
atgccatcggataccgaagttgcccctgtacagaaacccgatgctgcttctgccaagctgaagcaagctgtcagaaacatcgtggctgcaaaggacgcattggatgcagcgcttagattacctgcttcgacattcctcgtgccccctgaactgcccaatgcagccggttccgctgtcgacgtttccgccttcaccagggccgtagtgccttttctggattttcggcaatcggtcggcagcgcgcgcgctcatgttccgctcgataggttgctgggcgaatcctggcggtggagggaggcaccctccgccaccgggcttgccgactatttgctgcaagatgaacgctcggcaccgggagaccgcgaccaggccatcgtgtttgagatcgctccgctgggattgtggttcgcccacgaaggcaagaaccgcgtccacttcctgcgctccggtggtgcaatcgaaatgcctgcgatggtgaccaccattgattacccggccgccagccggctggcgctctaccgtctggcagtcgctggcagggaggagatgtggtgtgtgttggacggacgccaggcaaagcgtttactgctgccaaagctgacccacacgctcttgacagcctatggcgtcacccccgcgagcacatggccaaagaacctgccttcgcctcgcacgattaccgacgcacttcagcagcaggagcgccatgcagggaacggcccggatatcgacctggacgtgctccgcggacgcattgcggaaaaagcctccgaggaaacgttcaccgaagtcagtctgctggatgccctggcaggcggcctgctcagaacccggtggcggtggatcgcatccgccagcgcgattcttctcggcgtcctggcgttgagcatggcgttgccgcagccttgggggagcgagatccgatttctggccaccggcgtcattggcgggtttgtcgcaagtttgatgttcccctggatgcaggttcgtcgcaagcacctgcgacgcgacgatctgtga

SEQ ID NO: 208074 - DNA, 714 bp, Klebsiella oxytoca
atgtcccagactctcaatcccttcatccgcggctatcagcacttgcatttcgtccgcacgctttgcatcacccacgcagacgacagcccgccagtctggcggccgctgcatcccagccaggcgcatctgcctgacgaacagatcgcgcagtttccctgcattctgtgcaacgactttgcgttgatcaccgaaggccaggaaatcctgaaggaactggaaagccaatgccagaccgatggagttgtgcgcacggtagtctatgccattaccggcgatgacttcgatcagcctgttcatatcgcagacacctactccggaaaatctgcggaggaagtgatccaccgactgagcttcgagaccggattttacagccggtgctgggaaatcagtacggcgcacattaccgaagaggcttctcgctacctggccgagttggctgatatcgccaccccgactgccttccagttcatcgcattccgcattccctatagcccggcgattggcgtaaaactgatcgccacgccatggacagatgagaacctgttgcagatcgagggcataaccgctgcacaactgcgacagcaacatctggacaagggcatgccggaatccctggttgctactctccatctggcggctttggccgacatccgcatcctgatcttcgatgccgatgccccgatcctggatggactgccacaatatgaagaataa

SEQ ID NO: 208075 - DNA, 675 bp, Klebsiella oxytoca
atggcgaataattattacgaagctaccggcgttctgatgctggaacacgttacgcctgttatctcagcactgttcggcgccttcaatctcgacgccaactatccagggaacgggcgggcattcatcgcaacgatcgccgaaaccaacgatccgcaatggagtgacgtgctggagggcctgacgaccctatccactcagctcaacatttcacctggtgaagaacccgagacgacaatcgatgtggttcttgaagcactcgccaggcatttccacgccgatcaggacgaagatctcgaaaaccttatcgaacatcatccgtttgatggtgacgcagacctggaagccttgttcctgatcgcctcttgcttcaacgatggccataaccttgtcgctattcagttcgagggttgctggtactgcaacaaaccaaggctgttcgagttcggtggtcacgcctgcttcatcagtcgggagatcaggctgttcgggaactccgctcaggcgctggaactcgcaactgatctgcatagggcgctgcgggagggcgatctgactgtagcagccgcccgcataacacttgaaacggcaagactgcttgccggggttcaagatcacaatagccgccgggaactgcggcaacgcatagccgagggtctgctccaaaatcaggactga

SEQ ID NO: 208076 - DNA, 399 bp, Klebsiella oxytoca
atgaacctgaaaatttctctcccccaagaggtcgtcgatcagatcgcgcttgaagaagcgcatttcgcattggcgccatccgccttcttccgtgcctggaagcgcggcgtggagatcgccggtgtcgagtggtttggcgacggcacccgcgaaggatttctgaatgcggccagcaaatgggatctgcggcccaacttgcttctgctcaacgatgccctcggcgtcctgagtggcggacagcggctcttcctttcggcaatggtcagcttctacaacaaccgcgagggcgcagcgatgctcaagcgtatcggcttcgaaggtctcgccgatctcggcggcctcgacctggaacgcaggaaagtgatcgcgcagttggtgctcaactacagcggctggtga

SEQ ID NO: 208077 - DNA, 225 bp, Klebsiella oxytoca
atgtccattgcttcacatccccaaccccggatcggccatctggccttgttctgggtcggcaaacacctgcccctgcgagtgctgagaagcgcagcaggctactacatcggcacgaccgatgaagaagggccggtttcgcgcgagtccatcgaatatttccccagtagcgaagctgcagcgaccgctctcgaaaacggtgagtggcagcagcgttcgcatccctga

SEQ ID NO: 208078 - DNA, 1422 bp, Klebsiella oxytoca
atgccgccagtaggcgtcagagtctcgttgaataccgaaatgcagaaatttctccaagagaagactgtgactccgagtcccggacagaatccgaggatgacggctgacagcgcaaaggtatcgacggcatctgtgacgtggacgaacgcggagccggacacgctgatggcgcgggtgcttgcaccggccaacctcagatgtgcgtatcagcgcgtggtcagcaacaagggcgcgccgggtgccgatggcatgacggtcgacgacttggcggactacgtgaatcagtattggccgatcctccagaggaggttgctggccggcgaataccacccgcaaggtgtacgcgccgtcgacatccccaaacccaaaggcggcacccgacaactgggcattccctgcgtcgtggatcgcctgatccaacaggcactgctgcaacagctcacgccgatcttcgacccgctgttttcggattacagctacggcttccgtccgggcagaagcgcccaccaagccatcgagacagcccgcgcccatgtggcggcagggcatcgctggtgcgtggaactcgatcttgagaaattctttgaccgggtcaaccacgatctcctgatggcgtacgtggcgcgccaaatcgtagataaacgcgtgctcagactgatccggcggtacctccaagccggtgagatgtcgggtgggatcgccagccgacggcaggaagggacgccgcaaggcggcccgctctcgccgttgctgtcgaacatcctgctcaacgaactcgaccgcgagctggaacggcggggtcatcgcttcgtgcgttatgccgacgatgcgaacatctatgtgcgcagccctcgtgctggcgaacgagtgatggccagtgttgagcgcttcctgaatcagcgcctgaaactaacgctgaatcgggataagagccgagtagccgggtcttggatgtgtgattacttgggttacgggatgagctggcatcagcaaccgagactgagagtggcgacgatgagcctgggtcgcttgcgcgaccggctcagagagctgctacgtaaagcgcggggccacaaggtggcgactgtcatcgagcggataaaccccgtgctgcgcggatgggcgggctacttcaagctgagccagagcagacggccacttgaggaattggacggctgggtgcgtcacaagcttcgctgtatcgtctggcgtcaatggaagcggccctctacgagggcgcgcaacttgatacgcttgggacttaatgcggcgcgggcgtggaaatcggcagtcaatggccgaggcccatggtggaactcgggagcgccccatatgaatcaggcgttgccgaagaagctgtgggaccgcctcgggctggtctcgatactggatacgataaaccgacttaaccgtataacctga

SEQ ID NO: 208079 - DNA, 558 bp, Klebsiella oxytoca
atgagcattcatcaacagcgcgtcagcctgaaaaacctcaaggttgccgatttcgccagcgaggaaacgctttgcttcaccgccaccgttttgttcgacggcgaacccatcgccgactccaataatgacggccacggtggcatgaccttcgtccgcgcacgcgagggtaaacgctcgaagctcgctgaagcggaggagttcgcagcaagcctgccaccggatgtcaccgagtacgacgatccccaggatcgttcgcgcaagttgaccatcgagatcacgctggactacctggtcgaccatctcgccaacacgatgcacgcggacaagaaaatccgtgccgccttcaatcgtgacatcggcaacaaggtgctcttcgtcaaggacggcaaattgctgttcctcaagggcgtcaagctcaagaccatcaccgacaggcccgcctacttcgccaggctacgcgccgcgcaaaagcagccaattgtcatcctcgccgagctcacccccgatgaggccttcgccctctggaaacagcacactggcaacgacgacgcatcctga

SEQ ID NO: 208080 - DNA, 1566 bp, Klebsiella oxytoca
atgggcactatccgtctcaagaccaatcagcaccgtctgatttccaacctgcgacatgccttcaatccgcagtccatgctcggcgaactgctgcagaatgcacggcgagccggtgcaaaccagatccacatcacggtgggcgacgcctcgatcaccgtcagcgacgacggcgccggcatcgccgacatgcaatccctgattcatatcgccgaatccggctgggacccggagctgcaggcgcgcgagaacgccttcggcatgggcgtgctttcgaccttgtatttttccacgcacctgtcggtgcattcgggtgcgcaggcgttcagtgccagcaccgcgaccatcatccgcggcgatggcattgacgtccatgctgaagaagcacgtatcggcacggagattcgtctcgatggcgtgcaatctccaaccgccggcgtcaatctgccgacctgggtggcacagcaactcaagaggctatgcgaggcctttccggtgcctgtcttcctcaatggcaaggaactggttcgaccgttggccaatcctgccttgcaatggcgcgaaacgcctgtcggccggattctgctcaacctggaggcttcatgcgttcagtggcagtgcttcctgcaggggcttcccatcggccttccgcccagagcatcgaattatcacgtggtcgtgctgcgcgatgacatgatcgcccggcttcccgatcggcagcatctgctcaatgaggctgacgaatacgtccgtatccaggctgcgatcaatcaagcctaccgtcaggccttgatcgaatccaggcagcagttgccgggcagcgagttcgtggagcactacgccgaaaggtgccttacctcatccaatgcagacctgctcaacgatatcccctttgttccgctggcatggttccgcgactggcacgacactcccccaggacattgccgcttctgggaacgctatcaccgcaccggaatatcggccagtgaggctctgaaggaggtcggcgtctggtgcatcgacagcgaggacgatgatcagtcgactgccgaggtctaccttagcgctcgcaaagggtttctgctagaggaaacacggctggattcggagcattggttgatgtccatggtccgaacgatcaggcccgagcaggttgtcgtccagcatgccgccaggctgtatgaagacaatcacccaagcctggcggacggcgcactctcgctggttctggtcgaaggcctacgcgtcagcctggaaggcgagcccggcgagtatccggtacatgccgtgcgcagggtcgacaccctctacctcaccgtagacgtgggctccgtcacccggctgatttcggactacatgttcgatgaccgttacgacgaagccagcgaggccgaggacgagcggaccatcgataccttcatcgccatcggctcctcgcaggacccggttcgcgtcatcagcgccttgctgccggacatgctgcgctatacgcctcagcccaaactggcaggcgcgacggtgcggctggtcttcgatgatcaaggcaagctacatacgatcaccaattga

SEQ ID NO: 208081 - DNA, 279 bp, Klebsiella oxytoca
atgggtacttcagcaacgaaaaccgcgcgcttcgggctgcgcgcaacgcagcagcaggaagccgtgttgcgacgggcggccgacgtcgctcacaagtcgatgacggacttcatccttgacagcgcctatcaggcggctgaacagacactgcttgaccagcgtctgttcgtggtctcgggcagccagtcgcatgcgcttctggatctgctggatcggccggcacaggacaatgccgggctgaaggatctgttctcgcgtcccgcaccgtggagtagctga

SEQ ID NO: 208082 - DNA, 528 bp, Klebsiella oxytoca
atggcattgacggagccgtcagcgctcaccgcaggtcatgtgctcgacgaattcgattgcggcaaaggcagtttgaacgactggctggtccggcatgcccggcaatcacagtccagcggctcagccaaaacctatgtcgtggccgaagaacagcgggtcgttgggtatttcagcctgacagtgggccagatcgataccctcgaagcgcctgatcgtgtgcgaaagggaatgggtggatatcccgtccccgttgtcatcctggcgcggttggctgtcgaccaacgtatgcacgggcgcggtattggcgtggggctactgcaggaagcaatccggcgcacggtcatcatctccgagcaagctggcgtgcgggccatgctgacgcatccgatcgatgatgaggctgcacgcttctaccagcgctttggtttcgaggcctcacccgtacgggagcagcagctactgctgttgctgaaggatgcacgcaagctcctgttgccccagagcgcgcaaacccgatcgatttcatag

SEQ ID NO: 208083 - DNA, 1776 bp, Klebsiella oxytoca
atgaaccatcccaaccttcaatacggcagcgtctgcagcggcatcgaggccgtgagcctggcctggaaaccgctcggctggcatccggcctggttttcggaaatcgatccgttcccgaatgccgtactcgcccaccattaccccaacgtccccaacctcggcgacatgacggggatcgccgatcagattctcgctggcacagctccggcccccgacattctggtcgggggcacgccatgtcaggcgtttagcgtggccggcgcacgcggtggcctgtccgacccgcgtggcgccctgaccctcaaatacacggagcttgcaaatgccatcgaccaaacccgtcagcaacagcatcaacagccctcggtcatcgtctgggaaaacgtccccggcgtcctctccgacaaatccaacgcctttggatgccttctgggagcactggccggcgaaagccgcgaactgcaaccagcaggggccaaatggacgaacgcgggttgtgtgtctggaccccgccgcagcatcgcgtggagggtactcgacgcccaacatttcggtgtcgcccaacgccgcaagcgtgtgtttcttgtggcaagtggtcgtgacggattcgatcccgcagcggtactttttgagcccgattgcctgcacggggattcttcgccgggcgagcaaacgtggcaaatcgctgccggaccttttgcaggcagccctgatggcgcaggcagctttcccggatctctggccggagcctaccaacgggtatccgtcaccgtctgcttcggcggcggaaaccggcaagggccgatcgacaaagcggcctgcctgaccgcacgcgggcacaaatgcgatttcgaggtcgaaacctttgcggctcagtcggtcaccggacagcaaacccatgccctgaacaccgccaacggcggcaaaggcagtagtgaggacggaaccggccgcggtgtacccatcgtcacccagctcacgccctggtccgcaatgcccgtggctttcgcccagaacagccgcaacgaggttcgccttgaagccggtgatggacagatcgttggtgcgctgtcggtgggcggcggcaagccaggccagggactgcctgcaatcgcctatgttcctgcccggaacgccgcatcggatgaccagggcgatgagaagacgccgatgctgggattcaccgcccagggcagcggcgcggatgttctcgaaaaccttgctccaacccttcgtgccggcgggcacgccgacagccatgccaatgcaggcgtcgtgccggcgatcgccttcaaaacgcttcgggccaccttcaactacgacatctccggcacgctgatcagccactacagcaagaggcaggagaatgcggacacgatcctcgggccggatctgatcgcacgctccgtcgcggtgcgtgggcgggagggcggcgcaacggccgagctgggcggtgcggtcgctgacgctctgcgcgcaagcgggggcggcagcgacaaggcccatgtcctgctgccctcattcgaggcatatttccgtggcgaattgctcgcgccggacgaaagcggctggtcgcaatgggcttgctggcgcgtcaggcggttgatgcctgtcgagtgcgagcgtcttcagggaatgcccgacaactacaccctggtgccgtatcgcggcaagcctgccgccgacgcgccgcgctacaaagcgatcggtaattcgatggccgtcccctgcgtggcctggcttggccagaggctttccaggttcatgaacgcatag

SEQ ID NO: 208084 - DNA, 630 bp, Klebsiella oxytoca
atgcctccagcgactgacaaggaaaccacctgtgggctgtcgcagggacctggccgtcgtcatgagcctgtcgctgtgtcagcggtcgcacccgacccgtttcgtggctggggtcggcatcgttcggcgcacatccgcgcacaaaaggaacccgttgtttcaccggcgggcaccggaatcgaacaccgtcgtccccgaagggtctcctggcgcctcgcatgcaaggtgccaggagacccttcggatcggacgcagaaatcgctgatcaacaggctgcgtttacgcaaccgggcaggaaaacaccttcatccctcccggcgacacgaaccgctggaggggaacatgcctttgcagaaggcggagacatgctcgggataccccgccgttggcggggcaatgcctgacaaccgctggaaatcgcggtatgggcaggacgtgtctgacgtcaggaagtcttgcgggacgcgcgccgcttgcgggcggccggacgcttgccaccggacgattcgatcgccacggtgcccttgcagtcggggtaacggctacacgaccagaaggcgccggtcttgccggtgcgctgccgggtcgcggcgccgcacacagggcacgccggcccctcgggaaccttga

SEQ ID NO: 208085 - DNA, 2025 bp, Klebsiella oxytoca
atgcgactgtatctgtgcgagaagccttcgcaaggaaaggacatcgcccgagtgctgggcgccaggcagcgtggtaacggctgctacaacggacccggtatcgtcgtgacctggtgcatcggccatctggtcgaagcggcgccaccggaagcgtacggggagcagtacaagcgctggtccatcgaacagcttccgattcttccagagcgctggcgcaacgaggtcaagtcctcgaccgccacgcaattcaaagcggtcaaacagctgatcggacaagccaccgaactggtgattgcaaccgacgcggaccgtgagggcgagatgatcgcccgcgagatcatcgacctgtgcggctaccgtggctccattcagcggctctggttgtcggcgctcaacgatgcgtccatccgtaaggcgctggacgccctgaaaccgtcgagcgagacattgccgatgtactactcggcgctcgcccgttcgcgtgcggactggctgatcggcatgaacctcagccgcctgttcaccgtgctcggccggcaggccggctatcagggcgtgctgtcggtcggccgtgtgcagaccccgacgctgaagctggttgtcgaccgcgatcgcgagattgcgcgttttgtttccgtgccgttctgggctgtcgaagtgcagttgtcccattcgggtcattcattctccgccagttgggtgccacccgaaggtgccagcgatgaagctggaagatgcctgcaacaatccgtggcattgcatgcggcagatcagatacgcgatggccgcgaggcgctggtgcaatcggtggaaaccgagcgcgtgcgcgaagcaccgccactgccgttcgatctcggcacgctgcaggaaacatgctccaggcagttcggcctcgatgtccaggaaacgctggacattgcccaggccttgtacgagacgcataaggcgacgacctatccgcgcagcgactccggctatctgccggaaagcatgtttgctgaagtgccggcagtgctcgacgcaattgtcgccaccgatcccagcctgcgcccgttgatcgaccggctcgatagaaatcagcgttcacgcgcctggaacgacgcgaaagtgacggcgcaccacggcatcatcccgacgctggagcccagcaatctttcggccatgtcggagaaggaacgggcggtctatggactgatccgcgcgcacttcattgcgcagttcatgccccaccacgagttcgatcggacggtcgcgcgattgtcggcgaacggccaatcgctgcaggcgaacggcaaacaggtgatcgttccgggctggcggctcgcgctgatcaacagcgaacccgagacacaagacggcaaggacgacgaacccgctcagcggagccagatcctgccgcctctgagcaacggcacccgctgcggtgtcgagcaggtcgagttgaaggcgctgaaaacgatgccgcccaagccctatacccagggcgaattgatcaaggccatgaaaggcgtcgccaaactggtgaccgacccgcggttgaagcagaaactcaaggagacgacgggcatcggcaccgaggccacgcgcgccagcatcatcaacggcttgctcggccggagctatctggtcaagaaaggccgttccattcgcgcttcggatgccgcgttcacgctcattgacgctgtgccgtccgccattgccgatccgggtaccaccgccgtctgggaacaggccctggacatgattgaagctggccagctgacgctggacacgttcatcgaaaaacaatccatctggatcacgcagttggtccggcaatacggaagtaccagcttgtccatcaaggttcccgaggggccggcgtgccctgtgtgcggcgccgcgacccggcagcgcaccggcaagaccggcgccttctggtcgtgtagccgttaccccgactgcaagggcaccgtggcgatcgaatcgtccggtggcaagcgtccggccgcccgcaagcggcgcgcgtcccgcaagacttcctga

SEQ ID NO: 208086 - DNA, 444 bp, Klebsiella oxytoca
atgagcacgcactactacggcgaaggcaacatcggttctgcgccggactatcgggagtttccgaacgggaacgacgaaccgcgcaggctgctgcgcctgaatgtctacttcgataacccggtgcccaccaaggatggtttcgaggatcgcggcggcttctgggcccctgtggaaatctggcaccgcgacgccgagcactggaagggcctgtaccagaagggcatgcgcgttctggtcgaaggacgcgccgttcgcgaagagtgggaggatgcggacgaaaacgagcgcgtcaccttcaagatcgaggcccggcggatcggcatccttccctatcgggtcgaggccgtgacgctcggcgcgaagccacaggagatcgagggcgaagcggagacgaagccgaaggagaccaggggacagaaggaaccgaagcagggtaaggcgtaa

SEQ ID NO: 208087 - DNA, 960 bp, Klebsiella oxytoca
atgagcaggcctgtcaatgatgcgggtcgctggctcgatcgcacccatgccggcgattgccgccagttgttgaaacggatgtaccaggacggcgtacgggtgcagatgtgcgtgaccagtcctccgtacttcggccttcgcagctacctgcccgcaggacatccggacaagcgcctggagatcggacggcagatcaccgttcggaaatacatccgcgatctggtagacgtgttccgcgcggttcgccaggtgctcgccgatgacggcacgttgtgggtcgtcatcggggatacctacgccgcaacccggacatggcaggcgccgagcacccgcggaggccccaaacacgctgctgcccaacaggccgccggcggcatgcgaaccggggatgggctcaaacccaaggacatgatgggcattccctgggcgcttgctttcgccttgcgcagggatggctggtatctgcgccaggacattgtgtgggccaagcccaatccgatgcctgaaagcgtggcagaccgttgcacccgctcgcatgaatatctgttcctgctcgccaagaatcgccactactacttcgatcaggacgcgatccgcgaaccctctaccgatcctcgcggacccggaaacatccgccctgtcagcgcaccgcctggcgaacgcgcttccagcggcaacgccaatctgcgcggtagcctgcacaagatcggcgcgcgcagcacccgcaacaggcgcgatgtctggaccatcgcgagcaagccattccgcgggggccatttcgctgtgttccccgacaccctcgtgacgccgtgcattctcgccggctctcgcgctggcgacaccgtactcgatccattcatgggcagcggcacgaccgccgtggcagcactacgcctgcaacggcatttcatcggctgcgaattgaaccggtcgttcatcgacctgcagcgcctgcactga

SEQ ID NO: 208088 - DNA, 531 bp, Klebsiella oxytoca
atgaacgcgccaagccgcttcgaggcgctggaacaggctgacttccagaagctggaacacgcagcctacctaaaaggccttttaagaccctttaaaggtaatggggagcttgcgacctgggccagccagtgcgaagcgctgcgggacgacctgattggactggcgcagcgcaaggtgctggcgcaggcccgcagccatccctttaacctgttgcccgttcaactggcgcaacagaccactggcgcagggacaacctttcttcgctggcgcaacctcgatcgttccagcatgggcgtggcgctgtgggaaggactgattgccagccccgccacaccgatcggcctggttaacgacctccttgcgctggaacagcagcgcatcgtgctgaacatgcagatcagcctgtgccacaccattgcccggcagggggtggaatgcgccagcaagttggtatcggcgcaggcggctcaccaacgccgcgccgccggcgggaccggaactggtccatcgaatggcgggtcatcgtcatga

SEQ ID NO: 208089 - DNA, 822 bp, Klebsiella oxytoca
atggccaacgaaacagaatctctgcaattgaacctggggtccctgcgcagcgcgatgtcgctgacgctgcacacccatcatgcctcgcgcatctggcacgggcgtacaccatccgaaggcaagcccggcatcatcggcctcaacggctttgtcgccatcatgaacaagctgaagcgcggcgccgagcaggacgatccctattcggactggtggatgctgcgcatcgaagacaagctcagcacgaccaaggagcagcttcagaccctgcgcgagcaggtggaccaggcgctcgccgacatcccgcaggcgctcagccttggcgaaaacctcaatgtccagccggtcaagttgccgctatttgtttcctcgcagctcggcttcatggccgtgtacctcctggccgactatgacgatcttgcccggcgtttgattctggcgcatcacacggccctgatcgaccgcagcacgctcgaacgctggctgggcgaaggcgcgcattccctgcgcagtctgttcagcctggcgcagcagtatcgctactccggcacgaagcgcgacgacttcgcagccaacaacgccgcagcacgtgcggccgtggagaagtatggcgagctgccgcaggacgtgctcgaaggcgaacgccgctcccgcttcgcgccgccgcttatccggcgttcgccactggcctcggcgaccagccggtccggaacatcggctgtcgtgccggccagtgacgccgaccagactgcgccagccgattccgatgacgaagccgagggtgaagcatccgcgtcttcggacgaagaggatgcatcagcatga

SEQ ID NO: 208090 - DNA, 1122 bp, Klebsiella oxytoca
atgcaggttcaccaaccgcagcccgcaccggcccaaccagccccatctcgccagactgacggtttcattttcagcggcaaccgccatgactccgtgcctcgcgccttgcttacggacaatcgcctgacgccgctcgaacgcaacgcctggcaagtgttccggttgttgctcaacgacgatggcatcacggctctcccgacctacgaccagcttgctccctggctggcctcgatgccatgcgccacccgagcctcgcatgaaacggtcgcgcgcgcgctgaccctgctacgcctcacacgctggatcagtctggtgaggcgccggcgcgaccccaggaccgggcgcattcagggcaacctctatgtgctgcacgacgaacctctcacaccgtacgaagccatccagctcgatgccgattatctggggctggtcagccagtcgctggaccatgccagcaaatccatccagcgcgtcggcgtccacacgctcaaggaaatgatcgacgaccctctgctcagcggaagggaactgccgagccggttgaaaatcctgtcacagcgtctcgcagttcaagggtggacgactgacgaaagttatccacaggttgtaaacaatcacgattccgaagaagggatagagagccttcttcggaatcgtgacgcaccttcttcggaatccgaagtgggcgaaaaaccccggaaaaccggctcacttcggaatccgaagaccgatagtacagtacgtaaagaaaaagaaataaaagaagtacgtacagtaccgcgcgggttgggcatgcttcgccttcccgagcgcttcatgtcgctcaaggcagaacagcaatcgggcgcattggccgcgttgcagccggttgatcccgacctgcatcaggctgttctcgatgagtgggatgcccgctgccgcgccagcgccgtgcgcaatccggccggttacctgtttggcattatccagaaagccatgcgcggtgagttccgtgcctgggctggacagaggacgccacccgataaaacggccataccgcctcaggaaccacggcaacctgtagatcctgaagtcgctcaggctcatatcgcccggctgcgctcgatgcttcgcttgtcgtag

SEQ ID NO: 208091 - DNA, 561 bp, Klebsiella oxytoca
atgtcgaatcctcatcctctcaatcaggcagtaatcgcgcaggcgctccacgatttgcgcaacggtcagttgcgccgcgccaagtccatgggatttgacgacgcggatctcgatgcacttaaacatcccgcattggccagcgtgctggccaatgccctggtctcctggtgctgcgtaacggtcaatcgcgatgtcgtgcaacgcctgctgcatcaggccgaggacgtgagccaggaggtggtcaggatcgacaggttgctgcgcctgggcgccagtacggaactcatcagcaagttcttcggcctgacccaccaggagatcgccttgcgccgcagtatcattggcctgccgaaacgcaaggggcgtcaccctgtcctgacagaagagcaggattgcgatctatggaaccgctggtcggaaaccgtcaaagagcgcggtgtggcgctgaccaacgaaacggcgatgctcgacattgccgcagaccttgccgaaagcatgaatctgcccatctcagtcatctggagcgccatcggcaggtggatcgatgaagggctggtttga

SEQ ID NO: 208092 - DNA, 1710 bp, Klebsiella oxytoca
atggctgatatctccgaacaggaaatggctgcgaagttgatgagcgatggcttcggccgtaccggcccggtggccggcgcattgaccgatccggtcgcggataccccgatggtcgtaacacttgatgagttgcgtccgtacgaacttgatccgcgccttacccgcaacccgctctatgacgaaatcaaggcctcgatccgcgaacgcggcctggacgcaccaccgccgatcacccggaggcctggctcagcccactacatcattcgcaatggaggcaacacccggctggccatactgcgtgagttgtggaccgagaccaaggatgaacgcttcttccgtatcggttgcctgttccgcccctggcctgagcgcggcgagattgttgccctgaccggccacctcgcagagaacgaattgcatggcagtctttcgttcatcgagcgcgcgcttggcgtcgaaaaagttcgtgaactctacgagcaggaagatggcaagtcactgtcgcaatcggagcttgcccggcgtctcaaggccgacggctatcctgttccacagccccatatcagccgcatgcaggaagccatccaatacctgttgccggcgattccgaacgtcctctacggaggtctgggccgccatcaggtcgagcaactgaccggcttgcgccgggccggcgccaggatctgggaggcacgcgccgcgaccaaacaggtggatgttgatttcgccacactgttccaggacgttcttgccgtcttcgatgggacgcccggcaacttcaacatccagcgcgttcaggacgaactgatcggccagatggccgacctgctcggtgtggtatatgacacgctcgctctcgaaatcgtcgactccgagaagcgctggcaagttctgaccagtgaacccgccgaggcaccgccggccgtggcgacatcgccgcaggccgcgcagctttccccgcccacacccgcggcgccaccgccgcgtgaggcaccaggcgcggcaccagagcccagcctgcagacgaagccatccccggtgcagccgcccgcatctgacgatcagccggacgatgaaagcgagcggtctgcgctgcttcaggagcacattgtctcgcctgctccaacgaccgatcgcctccaatcgatccagcgcctgattgccgaccacactggagaggcgcacaacgacttcgaaagcaacgtccttcaggctatccccgtgcaggtcggcggcctttatccgatctcggatgtatggcacatcgatcccggtctggacgaacccgaccgtttgcgtacgcatattgcgcagttcgcactggaaattgccagtgaagctggcgtgggagaacatatcgccccgtccgatgacggcatcggcttctcatgcgcggcccatatcgagcgcaccgacactgccggcgcaatggcgctccccggtgcaaccctgacgctgctgcacgttttgagcgcgccttatctgtcggccagtgcctcccctgcgcgtatcgacacttcgcaattggcaggagatttggccgtcctgctgctggggatggcacagcgggctaccccctctcggggccagtcccatgtcctgaccgacaacggcctggtgaaactctttcggctggtgcggctctcgcgtcgactgctggagattgaggcaggcaccatggatggcgatagcgccatgcctgggtcatga

SEQ ID NO: 208093 - DNA, 258 bp, Klebsiella oxytoca
atgtcgaacgcccatgagcttgcgcgaggccacaagcaactcctgcctcttattgaatttgcattgagcgaaggctgggccgtttcgcgcacgtccggcgggcacctcaaattcataaagccgggattgccgccgatattcacgagctcgacagccagcgatcaccgcgccgggcgcaacgcccgcgcaatgttgcgccgcgcgaaccgccagagcgccgaagcccgtcctgatggaaaggagaccggccatggctga

SEQ ID NO: 208094 - DNA, 864 bp, Klebsiella oxytoca
atgcaggtgatttccgtcatctctaccaaaggcggcgttggcaagacgacgatcgccgcaaacctcggtggcttcatcgccgacgcggggctgcgggtgctgcttctcgatctcgacatacagcccacgctctcgtcgtactacgaattggctgaccgcgcgcccggcggcgtctatgagttgctggccttcaatgagcgcgacattgcgcagctggcttcgcgcacggcggtcgagcgcctggacatagttctgtccaacgaccagcaccggcaattgaatacgctgctgttgcatgcccctgatggccggttgaggctgcgaaacctcttgccggcgttcgagccgcactacgacctggttttgatcgacacccagggttcccgcagcgtgcttctcgaaatggcggtactggcatccgggtccgcggtttcgccggtcacgcccgaaatccttgccgctcgcgaaatgcgtcgtggcaccgtgcaactcatccaggatatcggcccgtatcgccatctcggcattgagccaccgcccttgcagttgctgatcaaccgggtgcccgccgtgtcatccaatgcccgcctgatccggcagacattgcggatgatcttccgtgagcaaacaggcgtccaggttcttgagaccgaagtccccgcgatagaagcatttccgcgtgcggcaacgcagagcctgccagctcaccgtgtcgaacatcggcgcccgacaggcaggctcgcccctgcggcactcgacatcatccgctctctggccaccgagttatgcccgcaatggcgtgagcgtttcaacctggtcaccggcaagatcgggaggaggcattctcatgtcgaacgcccatga

SEQ ID NO: 208095 - DNA, 213 bp, Klebsiella oxytoca
atgtttcaacagaaccccgctccggcaccggagcggcgcatactgcgccgtgcagaagttgaggcaaagacgggcttcaaacgcgcccacatctacagcctcatgaaagagggcaagtttcccaaggccatgcgacttggcgttcgcgccgttggctgggactcggccgagatcgaccaatggatcaccgaccgccttaaagagcgcgtctga

SEQ ID NO: 208096 - DNA, 900 bp, Klebsiella oxytoca
atgaggatacgacacctgcactattttctgatcgtcgcagaggagcagagctttgctcgcgctgcggcaagggtccacatcgaaccctcgccgctgtcgcgcgccatcaaagaactggagacccagctcggcgtcaggcttctcgaccgcgccaaagggcggatacgactgacctggcctggcgaggttttccgtgaagaagcgcgccgcatgctcgctttcatggacaacgcccagacacgcgtcaactcagcctcacagggctaccgcggcagactgcgaataggcctggccgatagcctcgcccaaccgcgtctcacacaattgctcgcccgctgccgtgaggaagagcctcgtaccgaggtccggatcgccgagatgacggtcaacgaaatgctccaggctcttcgtcatgatcaaattgacgtcggcttcacggtagatggcgaggccgccaatggatgcgtgaaggagatggtctgggccgagcgtcccgcaattgccattcctacccaccatccgttgctttccttcgataaggtccccgttggcgaagccctccgctatcccttgattctttgccatccggaacgctgcgcaggtggacataatgtcattcgtcgctggtttaatgatggcgcattgccctcaccatctattgcagagtatgtttcagggcacgaaccaatgatcatgctcgtcgcggcgggatacggcattgggataggactggagtcgcagattgcgctttacagccacccggatgtcatcatcagaccggttgcggacgaggttcccaatacagcgacgttcattgtggtgccggagaagcctgcttccaaggagctggagcgcttcataaagcgagcacaagaaattggcagaagcggtatcagttga

SEQ ID NO: 208097 - DNA, 294 bp, Klebsiella oxytoca
atgatctctgacaaaaccctaaagcaagcgatatcaaatattactatttggcgcaaaggcgaacagcgtgcgccacataagccattattgctgctgcacgtcctctcacactatcggcagggtcatgatcgcctgtttagctatggttctgaaatctacgagcctctgttggatctcctggaacgttatgggccgcagcgccgtgatcagcgcccggacatgccgttctggcgtctgaagggcgatggcttctgggaaccccagttaagcaaggactgcgaatcaaagttgtga

SEQ ID NO: 208098 - DNA, 1038 bp, Klebsiella oxytoca
gtggaactgaatgatttaaaaaaacgacttcaacagcatctgggtgatggcctagttctaatcgttggttcagggttatcttgcgcagaaggcgttcctgggatgggaaaactcggggaccatctgatcgcccatgtcgcagacaatctttcccctgatgacctgaaactctgggatgagatccaccccgcgatcggaactgatggtttagaagcggcattgctcaaacgagcccctacaccagcccttgaagcaatcattgtcaaatctaccggggaatatatagcagcagccgaagcagctattatctctgaggtgtttaaaaacgagaaaacacttcggcttacaatgttacttcctcatttattaaaaccagataaaggcatacccattgttacaactaactatgaccgcttagttgagcttgcctgtgaagaagctggattaggagttgatacgatgttcagcgggcattttgctgctcggctagtgcctcttgatagccattggggcttttgccgtggagccaaacttgttggtaagcatgtgcgatacaagttcacaccaaaagtgaacgttttcaaaccgcatggcagcttggactggtatcaccgtaaagggaacccggtgcgatatacaggagatctttctcttcctcgtctaattattacacctggcttgaataaattcaggagcggctacgacagtccctttgacaaacacagggaaaaagctaatgacgcaatcgataaagcccgtcgtttctttatcatcggttatggctttaatgatgatcatttggaaacacatctcactcctcgtattcggtcaggagtcagaactgtcattttgacccatacactttctgcaaaagctaaagaaatagctaagttaaataagaatgtaattgcagcggagtttcatagcgatgcaggaactaccggtgcgcgctttatcgtcgatggtaatgagatatttttccctagtgttgattactgggatcttaaaggattcgtagaaggagtcttatccgcatga

SEQ ID NO: 208099 - DNA, 1749 bp, Klebsiella oxytoca
atgaccagtcctgctcttaaatttacagaaaacgaacaaataggccgtgtggctggagtcgataccagccgtgtggctattgatgtcaccaactcagaaatgctgacacgtgttggaattggacagcttatagcaataaaaggagcaacacaggccgaattcctgattggaatgacagatcgcgttactcgctcactacgagaagaactacctgacccagaagaggatgagtcagggatgttaaccgtatcaccttcagaccatatgcaggctttcgtcattggcacttatagaactgttgatggagataaaacggatattttcaaacgaggtgccgatagttttcctcagatcgatcgcgaatgctttgtgatagaaagtgttaatcttcagcgttttatggggatactcggtgccggtttacccagcgaagaacgtcttaaactaggtactttcgtggcggatcggagtgctgaggctattgctagtggggatagatttttccagaggcatgcagccatcctgggaagtactggttcaggtaagagttgggctgtagccctaatactagagcgagcagctaagcttaaatatccgaatatcgttgtgttcgatatgcatggtgagtacgccacacttgctgacaaaaccaaaggaggttacgcacaacgattccgtatcgctggaccaggagaccttactgcacctaaagatgatgcactatttctgccgtattggttactgaatcgagatgaaatgttgtcgatgattcttgaccgtagcgatcagaatgccccaaaccaggcctctcgtttcactcttcatgttcgggatctcaaaggcgcaactctggactcatctggtaagccgaaagtcaaagagacattcactgtagactcaccaataccttacgctatttctgatttagttgctcttttaaccaaggataatataacgaagggtgtcgggaaaaacggagctgctgtaaagggggactgggaagacaagctgacacgttttctttctaggctggaagcaaaacttgatgatcgacgatatggttttatgttttccccacctcctgaagctctcgattatggatggcttgccaaacagattataaaactacttcgagctgattctggtaatggtattaaaattatcgatttctctgaagttcctgctgatgtcctgccagtagtgacagggacgttagcccgcctactctatgatattcagttctggatgaacgcaaattctcgtacgccaatcactttactttgcgatgaagcacatctttatcttcctgtaaaagatgacgccgattcagttcaaagacaggcgctatggtcctttgaacgcattgcaaaagaggggcgtaaatatggtttctcattattagtcgtaagtcagaggccatcagatgtaagccgaacaatcctttcccaatgtaacaacttccttgctctgaggctaacaaatgacagcgatcaaaatgttatcaagagacttatgcctgattccctcgtaggtctaacagctatgcttccacttttagatacaggtgaggctttgttgcttggggatgcggttcttctaccaacacgcattaaacttgaccaaccgctggtaaaacccgacagcgccacccgagatttctggaaagaatggggttctcttaaccctgatctaggtttattagaggcggccgttgaatgtttaagaagccagtcaagaattaataaataa

SEQ ID NO: 208100 - DNA, 870 bp, Klebsiella oxytoca
atggcgcaagccctattcaagagctggtttgtagatttcgaaccggtaaaagccaaaattacggtactagaagctggtggttcacaggaagaagcgacgcttgctgccatgacagcaatttctggtaaagacgctgattctttggctatttttgagcgagaacatcctgaaaaatatgctgaacttagggctacagtggagttgttcccgtctacgatgcaagaaaacgaacaaggtaaaatccccgcaggatgggaatcatcttctttggctaaaaaaatccaaataattggaggaggaacgccaaaacgttccgaatctagttactgggaaggagatatttgttggtactcagtgaaggatgccccatgtgatggtgatgtatttgttattgacacgttagagaaaatcaccttaaagggtttgaataatagctctacaaaattattacctattggaacgacaattatatcggcaagggggaccgttgggaaattagctttaactggtgtagaaacggcaatgaatcagtcatgttacgggatctctggactgcatttttcaggtccatttcttacatatctaaaagtcaaacagtgtgttgatgttttgaaaagaaatactcatggcgcagtatttgatacaataacaacaaatacatttgagactgtaaatataacttccgccccaaagattattaatgaaaaatttgaacgaattgtaacgcctttatttgatgaaattaaaaataatttaataaaaaacaattacttatgtcaattccgcaatactctgctccccaaactcctctcaggtgaaatcaccctatcggaaaccaaggaaatagccaaggaagctgactatgtttaa

SEQ ID NO: 208101 - DNA, 207 bp, Klebsiella oxytoca
atggacgttaaagcctaccatcgcgccgcttgcgccctcatcgacgtcaatcttttcgacgtccagcgcgtggacggtaaagatatagcgatgggtctcgccctttggcggtgccgcgccgccgtacccggcctggccaaaatcggtgcgggtctgtatcgattcttagggcagttccgcctgcccggagcccgctccctgcggtag

SEQ ID NO: 208102 - DNA, 1959 bp, Klebsiella oxytoca
atgtcagaatttgagataaagattgatttaaatgtgcttaatcatcttggaatgagtctttattcgaacaccccagcagtattgacggaaataatctctaacgcttgggatgctgatgctaaaaatgttgatattaccttagacgttgataaaggagaggttattatcaaggatgatggccatggtatgtcaaaagatgaaataattaataggtttctcaaggtgggttatgcccgtagggaacatggccgcgctaaaagtgataacttgaaacgtcaggttatgggtaggaaaggaattggaaaattagcgatgttttcacttgctaataagattcaagtctactcttataagaagggagaagagcctcaagcattcgaggttgatgttaaagaacttcaggaatgtataaaaggcacgagaaattatattgctaattccattccaatcccagaaggcttaccgtatggtacaacaattaaattatttgagcttaaaaaagcgatcgatagaacacaaagttatttaaggaaaaggatagctcggcggttcagtatcattgggccaaatcataactttactgttaaaattaacggcacagacattaacccttccgatagagactttctatctgatctagagttcttatgggaatttggaccatcagatcctgagcgagttaaatcatgtgttaacttaactcagaaaaacacacttccaaatgttattaattttgaaggtgttgaggttcaggtaagtggttacatcggtagtgttggtcgtccatctcagcttaaaaaagaccctgaaatctctaataacacaataactgtaatatcaaatggccgtgtgtttgaagaggatattcttcttgaatttggaagtgctaaagtatttacgaattatctcgtcggtgaaatcgtagcagattttttagatgataatgaaaaaccggatatggctacatcttctcgacagaagctacaacagaatgatccaagatatccagtattgaagtcttttttggaacgctcacttcaacaaatcgataaggattgggataagtggagacgagaaaagggtattgatgaagtaaaacaaaatacaccagctgtaagtgattggttgaactcgctaaaaaaacatgagagagacagcgctgaaaaattattggggaaagtaaatacgtttcgtttctctggggatgaggatgaacaaaaaagtgcaagaaaaacagttttgaaaaatactgtcctagcatttgaacgtttaagaattcaagataatcttgatgcactggacaaaataagtaatcttcaatctgaaaactttaaggatgtctttgcatctgttaatgatattgaagcaagtatgttttatgaaattacctctcagagattaaaagtcattgagaaatttcagaagattacagacgataatgaacttgaaagagctgttcagatgtatctttacgatcacctttggttgctggatccatcatgggaacgagtaaccgggtcttcagtaatggagcaaactttaactaaggaactgaagcaggttaatcctgatgcaacaagtggagcgcgaatcgatattgcatttaaaactgtatctggaaaacatgtgattatcgagatgaaacggcctaaagttcagcctgatataatggcgcttgttgctcaaggaaataagtatgtacaagcaacaacccaatggtttaataataatcccaaaagctgtcctggcggaaatatccctcatattgaggttatctttttgttgggcacaggatatcatgcagcaaatcaacattttgtaaatatgcaattattatcaattaacggtaaggtattgacatacagtgatttaatcactcaatcaaagcaagcatatgctgaatatcaagataagaaaaatgatgcagctagaataatgaaaattgtggaaggtatctaa

SEQ ID NO: 208103 - DNA, 1050 bp, Klebsiella oxytoca
ttgattaaggttgttgatttgttttgtggagcgggcggcctcactcatggccttcagaagtctggattgaatgtagttgcaggctatgatatagacgcggcttgtcgattcgcctatgaaaaaaataacaaatctctctttgtccagaaaagtgtgacggacattgaagatggtgagctacaaaaatatttcgatggagcgaaggttaaggtcttggctggctgtgctccatgccaacctttttcaagttatacaaatagcgctaagctaggtgttgtacgttctaaagataaaagatggtctttactttacagttttgctaaacagattaagatggtaaagccagatattataacgatggagaatgttccaagagtggtaaatcataaagtctttaaggattttataaaatcacttaagaaagatggatattttgtctggtatgatgttgttttctgtcctgactatggaatggctcagagtcgatcaagattagtattgttagcctcaaggtttggtgaaataaaattaattccgccaacccatgagaaggaaaattataaaactgttaaagatattataggcggtttgcctgagattgaggctggttctggtcatgttgaagataaattgcatcgttctgcatcattatctgaaataaatttcaacaggataatggcttcaaaacctggtggtacatggcatgattggcctgaaaatcttagggcgaaatgccatactaaagaaagtggctctacatatactgcggtatatggacggatgagttggaataaacttgggccaacaattacaacccaatgtataggtttcggaaatggacgttttggccatccggagcagaaccgggcactaagtttaagagaggctgcacttctacaatcatttcctgaaaaatatgagttttggcctgaagatgtcaaaatggaaatgagaaccgttgcacgtttaatcggtaacgcggtacctgttaggctcggcgagattgttggaaaaaccattctggaacacatctcgaagcttgacgtttaa

SEQ ID NO: 208104 - DNA, 246 bp, Klebsiella oxytoca
atgaaaaagcttaaacgtaaacgtatcacacgtgctaaaaacactggtcgttctagctccaggacgatagtaaatgattttctgttttcagataatcaattgaaaaatatagctttaatagcttctttactatcaatttataggtccgcaaaagagttaggttggttacatagcctgccagtgttatgggagaagctcagcacggtgcttaatttgttgtatgaattcattgttaatagtttataa

SEQ ID NO: 208105 - DNA, 2160 bp, Klebsiella oxytoca
gtgactccgattccgacagtgattcagattctgacagcgattcggattctgacagcgactcggactccgacagtgattcggactctgacagtgattcggactctgacagcgactctgactctgacagcgattcggactccgacagtgactccgattccgacagcgactccgattctgacagtgattccgactctgacagcgattcggactctgacagcgactcggatagcgacagtgactccgattccgacagtgattcagattctgacagcgattcggattctgacagcgactcggactccgacagtgattcggactctgacagtgattcggactctgacagcgactccgattccgacagtgattctgattcggacagcgactcggatagcgacagcgactccgattctgacagcgactcggactccgacagcgattctgactctgacagcgattccgattctgacagtgactccgattccgacagtgattctgactctgacagcgattcggactccgacagtgactccgattctgacagcgactctgactcggacagcgattccgactctgacagcgactcggattcggacagcgattccgactccgacagtgattcggattcagacagtgactcggattctgacagcgactcggattccgatagtgactcggattccgatagtgactcggactctgacagcgactcggatgctgacagcgattccgattctgacagtgattctgactctgacagcgattccgattctgacagcgattcggactctgacagtgactcggactccgacagcgactcggactctgacagcgactcggactctgacagtgattccgattctgacagcgattcagactccgacagcgactccgattcggacagtgattcagattccgacagcgactccgattccgacagcgactcggatagcgacagcgactccgactcggacagtgactcggatagcgacagcgattccgattctgacagcgactctgactcggacagcgactcggatagcgacagcgactccgattcggacagcgactcagattccgacagcgattcggattccgatagtgattcggactcggacagcgactcggattctgacagcgactccgattctgacagtgactcggattccgacagtgattccgactctgacagcgattctgatagcgacagcgactccgactctgacagcgattccgattccgacagtgactccgattccgacagtgattcagattctgacagcgattcggattcagacagtgactcggactctgacagtgattcggactccgacagcgactctgacagcgattccgattctgacagcgactccgactctgacagcgattcggattctgacagcgactcggattccgacagcgactcggattccgacagcgactcggattccgacagcgactcggattccgacagtgactccgattccgactctgacagcgactccgattctgacagtgactcggattccgacagtgattccgactctgacagcgattcggactctgacagtgactcggactctgacagcgactcggatagcgacagcgattcggattctgacagcgactcggactccgacagtgattcggactctgacagtgattcggactctgacagtgactccgattccgacagcgactccgattctgacagcgactctgactcggacagcgattccgactccgacagtgattcggattcagacagtgactcggattctgacagcgactcggattccgatagtgactcggattccgatagtgactcggactctgacagtgactcggattcggacagcgacagcgactctgactccgacagtgattctgactccgacagtgattctgactccgacagcgattccgactccgacagtgactctgattccgacagtgactccgattctgacagcgactccgattctgacagtgactcggattccgacagcgattccgattccgacagtgattctgactctgacagcgattcggactctgacagtgactcggactccgacagcgactcggattccgatagcgactcggactctgacagcgactcggatattccgcaggccaacgcggataccaataccgcactga

SEQ ID NO: 208106 - DNA, 621 bp, Klebsiella oxytoca
atgtcatcaacgccgcgtcctcacgatttaatctggttgaataataccgccgcgctggaggcgattgaggagccctgggtcgcacaacactggcgtattagtctgccggtggtggtacgacgcgacgttgatgccgacgcccgcgttccggtgggcgtacggggcgtgaaacgcgaacagcgggccgcgggctgggtacggagagaaaatatcgtccgtatcgtcagcccggaagccctcgccgatcgccaacggcttctgcgctcgccgtttgtctctcagccgccgcttcaggcggcgatatcactgaccttgcacccctggtcgtggcgctggggcattaccggcggtaccggctacgcgctggccaccgaaattcccgtgctgcacgcggccagcgatctcgatcttctgatccgcgcgccgctgccgcttccccgcgaggcgctgctcgcctggcagtcccgcgtcgcgcagctgccgtgccgggcggatacccaggtcgaaacgcccgccggggcatttgcgctaaacgagtggctgcgcgatggtcgcgtcctgctgaaaacgtcccgcggcgcgcgcctgaccgcggcaccctggaacagggaggaagcatga

SEQ ID NO: 208107 - DNA, 1173 bp, Klebsiella oxytoca
ttgaacgcagaagccccccccaagaaaaaaggtggaagatttaacaccaaatccgaagtaaaacagatggtatgggtaaggatggcaggacactgcgagctttgtggaacagacctgacgcatgattttcgcgtgggcacatccatgcagtggggtgaggtcgcacatatacttccggctagccccaaaggacccagagggcgagaagagcatagtgatgaacaggctcaaaatcttactaatgacttctcaaatctgatgctgttgtgcccaaattgtcacgaaaaaatagatcgcgatgatgacggttatcctgaagatgatttgagtggcctgcatgaaagctgtcttgctcgtatacgccttgcagcctctcagcctgctgaaggacgggctataccgctaattgttcagagtcagcattttgcatctaccaataatatcccggcaggggaattgctgacagcgatgtcgtccgagggactgactgcgtttggtcacacaattaacatcactttcagagagcctggcccccgcggaagggatgacttgtactggcaattaattaaggacgatatcgagcagaagatttcaggggaattagccaaacgtggaggcagcttcggcgatatgcctgctttagccctcgtgggtctcgcagacatccctgcattgattatgctcggacaagccatcggagaccgctctaaccggtatttattttccagaagtcgcacacatggtcttcgctggccatcgaaatccgcttctcctcctgattatatattctctccagcacctcaaggtaatgggccactggccttagtcctttcgatatcggcgactattcctgaacgggatattgaagcagtgctgccgggcgtgcgaatcgcgtcgttcactattccagagccctcatatgcgatggtttcaaaccggaatgttatcaacacattccgggatgaacttcaaaagcatttgagtcaacttgaagcagaatcggagcaacctatcagcgtctttgctgcgatccctgcagcgcttgcaattgaatttggtgctttgctgacgacgcagcatcagcacccttatgtaattttcgatagagagagtaattcaaaccagttccggtcaatgctgactatcggccaccctcaggagtcacagaaatga

SEQ ID NO: 208108 - DNA, 1248 bp, Klebsiella oxytoca
atgaataatgaacagactaaacacagcagctgggaatttttccttcttcgagcagcaagagcgatttctctgaccggtccgcagtatgaaaaaattaatggccgctacgcacaactgcagacaatcctctcagcttccgatgatcctattctgcaggatgcacatatttttccgcagggatctatgcgccttaaaactaccatcaaccccgtgtctgatgcgccggcagacctgggcacaattgatgcagatgcaattgtctggctcccgaattccagaggagtatcagcggacactgtgctcgaaacgatagaaaaacggtttcaggaaggcagtcgcgttcatgaggacataaagcctctgcgaagaggggtacgtgttgtttatgcagatcagaacccaggttttcatattgacgtgaccccagcacgaccccgcagctggaatgatgaaactcacggccatggcatgcttgaagtaccagatagagaaactgggtggaaagcgagcagccctatcccctatgcagactggctccatgatgcttcggagagtcaaatcatgcttgaaaattatgttgctctcaataaaagtcgggctgctgcagattccgcgaccatagccccactacccgaatatgaagaatatcagaccgaggatccacttagagccagtatcaagcttctgaaacgccatcgcgatgaatgggctattcgcactaaaaatgaaagatcgcgcccaatttcagctgtcatcacaacactcgccgctcacgcctggctgaatgtagcaatgcaatcgcggcaaaggccatttacgccacttgaagccattcttgagatcgtcagaactatgccaaacttcattcgaagcaatggacaggaatacatggtctgtaatccagaggatagcggcgaaaactttgcagaaaaatggaatcgcccaggagaaggctctgcttaccaaagggcgttctatgaatggcatgaaagtgcctgcgaggcattcagccttggacttgaaagctattcatccgtggaatcatttgccaaggcagtaaacgaaagcttcggaatcgggcgttcatttgtagatgaagtaaatactagtatccccgctaactggacaatgccgggtcggccttcaggtatgaaccgaaactctgtttcaatgggagcgctgtttggaggtgtggctggcagcgatcaatctcaggctgatacgaaaccggtaggtcgacttggttaa

SEQ ID NO: 208109 - DNA, 1779 bp, Klebsiella oxytoca
ttggttaatattccagatgatgcggttgcacagggaattgccacacttgaggcactcctaaacacaggtaatgccgcaggtctactgcagcacaccaaagcgcgctcagatgaaaccgtagcataccgtttcccgcttccaacagattatctgggcatagaaaggacattgcacataggatttcccaagggattcccatccgctggtctcaatctgtatgtggatccctcaccttggcttgtttggccacacgcaacaaaagcaggtctatgtcttcacgggtttaaagaagagccagttacggggtcacctgacacagtagttcgcgacagcattaatcggctgaagaaaatattgtctttatccatccagggcgcaaacgcagataaacgtaatctcgaatttcagaatgagattacgtcttactggataagacagcacggtaggtctgtacggaatgtattgctcattgggcggccagaatatgcttctgaactattcgcactcagtgattctcgatacatcgttccctcaggctatgagtcagtctggttatcatcagatataaaagctcttggtagccatgcccgccggattatgggaaggcaagtcacgatgcgctctccacatgcaggcggtttttttgtaaaactcaaaagttttcctggactcgtgtttccagcaccggcagagctgttgtcgtggatcctccctcatgtatctgaggcggatgcgacaaaactttttacgtggtttagtaccagtagctcacttatttcccgatggctgattctggagttacctggcaaagccggcgcgcctttatacacactgaatgtttttgcaaaggtagatactcgtcgccgtagcccattcttcggatcgcgctccgcacgtcggaaacctttggcgataaccgggcaacatcctgcaattatttattcctccagattaaacgtcattgaccgtacagatttctatgcgcgagatttaagcggcagcatcagagggctggaagcagcacacgttgtgttcatcggggtaggatcgctgggtggggctgttgcatcacaacttgcaaggtcggggcttaaacatcttactcttatcgacccagatacttttgagtccgccaatatgggaaggcatgtgcttggcatggatgatttaggtaaattcaaagtcgatgcacttaaaaccaggctcatgcgggatcatccaacttctgaggtcaaagcttttaatacgtatgtgcaatttgccttggaagacaagcctgaccttcttcagactgctgatttagtcatcatcacaacagctgactgggagtctgaagctagtttgtggaaactaaaagcaaaaggtcaatcatgggcatttattcagggatggagtgaacctcatacgcttgtgggacatgcattagcgtcacctcgaggtgactatgatggcaggcacttattcagtgacaacggcgactttagtcacaaatatacagagtggccggaaggaggggttgttccgctacctgcctgcggggaaagtttcattcccgggaacgcagcgggtatgaataccatcgccacaatgataacgcaggcatcgattcagtatctgaacggtattaaaaaggaatcgctctggttaacaagcataaaccgccctgctgatgcccaggtgcagggcgggacgtatatcggccctgacttaccgacaggaaccattcaaactgttctggagcgggcttggcccgaatctacacatgaggctggaaaataa

SEQ ID NO: 208110 - DNA, 489 bp, Klebsiella oxytoca
atggaggttatctggagttggaaatggcccggtgttgaggacgtcttactggtatcccactccgcggctgatatttttcactgtaatcggcaaataagtggggaacatgagcgagggggtcagctttttgtcgaccccaatcatccagacggtatcattttgtctcttgcaacagcaccacacaaagccgacaacgcagggcgaacatggcttgagttagaccctgaacgctgtaagaaggagattcagaaggcaaatgctcttgggttacgattaataggatactggcatacgcatcctcaggtaataccgcagatatcgagtgcagatatttcgagcttttcccgctttgcgcaacgttactctcaggtacttccgcatcctgtagccattatcgtcggcacctctccagatacttcaggaattaaagcttggttatttagagagggggggtattttgaagctgtcagaatggactgtcccttttag

SEQ ID NO: 208111 - DNA, 546 bp, Klebsiella oxytoca
atgcgcaattccgagatatatgtgtcagttgatattgaaacgtcaggtcctgttcccggaatttacagcctcctatcaattggggcttgtctggtgagtgatcctgagaacgcactgtaccttgaacttcaaccagagggcgagaagcatgatgctgaatctcttgctgtgactgggcttgatattaaccgtctactgagcgagggacttgctccagaacaggctatgttaaagctaaaagactggcttgcttctttgatttctcaacatcggaaacccatttttgtcggtctgaatgccccatttgactggtcattcatcaattactactttcacaagtatattggcagcaacccctttggtttcacagccatagacattaaagcctgctacatgggggctatggggtgcgagtggtcagacacaaaatcatcacatatgtctgcagtccttgcccctctaacccaacccacgcataatgcgcttgatgatgcccgttttcaggctgaacttttttctttattactcgcgcgatcaggccgttag

SEQ ID NO: 208112 - DNA, 387 bp, Klebsiella oxytoca
atgtcgttctcaccggatagcagactgactatcaaagcgctggaaatggcgtgggaaattcgcggcaagcctgccggggtgatgttccacagcgatcaaagctgccactttacaagcaggcagttccggcaatgtctgtggcgatatcggatcagacaaggtatgagtcggcgtggaaattgctgggataatagcccaatggaactcttcttcagaagcctgaagaatgagtgggtgccagcgactggctatataagcttcagcgatactgcccatgcgataacttactatattgttgggtattacagcgaactcaggccacacgaatataacggcgcgttaccaccaaacgaatcggaaaaacgatactggaaaaactcaaagtag

SEQ ID NO: 208113 - DNA, 771 bp, Klebsiella oxytoca
atgttactgattaaaacaaattcaaagtctgctttcgccggaagcgatatccccgtttttcaggtcagtaaagcggaggaggatttattcaacctgggtgtatcctcctgggtagagaccgggcagcgattcatcagggttgatgggacaggtaaggtcacggggctgatggatcgcgctactggtgacgtattgacccctgtcgccaccgcgccgaccattatcgacgccggtatcccggtcctccgtttcgccgcatcgccgatgttggggaatgttgacgtgttcagccctgataacatccagacggtgatcactgtcaatcgcgcacagctcggtaacacacgcaccctgattgggagtcaggccgtatcaaacccgctgctggtttatgttgatacgccagataccgccggtattcgctatatccatagcttgaataatggcgaaactaactctaataaagcggtgaagggcatcggttggttctcggggatttgttcctatgacctcgccggggcaaaatctgaaatttatgttaacggtgagaaagtaaccgtttcttcgtcagtgacgggagctatctccacttcgcagggcgctaaaaagctggcaattggtggcgcaggtgtcaatggcgcaacctatcccggtaatcatgattttgcactttgcattgtgctgcctggtattgctgcgcataaggacgcttcggttatggcgaaaatccaagcattcctggcggagttcatggcaaaactcactgcatga

SEQ ID NO: 208114 - DNA, 2397 bp, Klebsiella oxytoca
atgacaatcaccgaaacgcaaaaaactgctcaattagcagcagatgccgccgttagcgccgcagaagccaaacaatacatgctggaagccgagcaaggatatcaggatactagtgctgctgcccagcaagcccaggatgcagctggctcagctcttttatccaagcaaagcgcggctacatcggaagaaaattcactgcaatatgcaacagaggcgggagttgcaagagatgaggctgtaacagcagcatctaatgcctcggagtatggtgagaataaattcactttctacaaaacttcaagcgatcctgatgggacgatcgcaggactagcagccacaattaccgggcaatcttttcgtgttgctcaagggcctgaaggaacaacggcattcaagacctacgagaatcaggacggtatagctgtattacaggcctctcaaccaggtaccgccgcggtaacaggaactattcgcgagttccctaccctggcggcggcacaggctgatgcagatgctggtaatataccgaccggatcaaccgcttattaccgcagcgctgatgatagcgctcttgctattgaggtcgtcaataccgcaggcacattagaactaaccggtaggaaagcaccttctcaacatgaaattgataaattaaatgaaatagttaaaaatcaatctctatcgccaggtttctttaacgatcagtcaataacatctgccgcagttgacattgatggtaactgtatcttcattactgttgatagtggtgatgtttatgttgctacagccagtgggatggtttcggtttcagctctagcaattaattcaaaaaacacactttgctatggtttctacaacggaaatcctgttctccaagtaaatacagataagcaaggtgcaattttatcattaacaaccaaaataggaacatctattaacagtggtgcaggcatggtagatgttgttcctaatgttgatataggtggtcaaaaaaacacactttcttatggttttattgacggtaaaccagtaataagtttaacagtagatatatctactggtgaagtttcagaagttattgtgtctgatggtaatatttatggcttcttaaatggcgcccttcaaaaattgacaaatatcactacagcagattcatctaactcacataactttatttattcaggttcgcaagtgacatattttggtagggatatgtcattttacacaccagaccccagcattatttatatatttcttgatatgggacaatcaaattcatgggggcaaaactcaggcggagtaccgacaatagcaggcgtcccagtttacccggacaacgcgctgatgcttaacacgggtgtaagggccacacggacggaggcaacctctcttgtcccactagttgaaactaacgccggtatcacctctgaaacatcaggatcaagttgggtgaatcatacaatcagggacatggaagtgctcaccggtgttaggccaacaatcctgatgctgaacgccagtcagggtggtatgcgctattaccagctgacacggggtcagaccgcctataagcaattccagacggcgttgaaatcagcagtcagtctcatcagggccagggggaaaaagccggttatagcagcggtgcgctggatgcagggagagcaggagaccgcgtttgttccgagtaataaatccatcgtgcaggcacagttgcgccagttgcagcggtttgttgctgatgatgcaagccaaataacaggcacgccgcaggacccgctattgtttgtaaatcagatcgccccggtaagcaaatacaccgagggcatctggcgccagccggtaaaagaagcgcagctcttgcgcgacggcaagattattcccgtcggtccggttttccagtatccgatggctgatggcgtgcatatgaatagttgggggcgaaactatctgggccagtgcctggcgatggcgacggtaactgaggtatttggctcatcctacgcgccgcagctgccgggagaatatgcctggattgatgatgtgacgctacggataaatctcgatgctgccttcgggacgttaaccctggacacatccggaaccgtatcgatgactggcctggaaaattacggatttaattttgacgattattcggcaaccccgcctgtcattacggcggtaacgctcaatgaacgcagtgttgacattaccctggataaatctccgcgccggtcatggagacttgcgtacgcaatgaaacccacgggtgataacgcaggcccggtaacgggggcgcgtggctgcctgcgagacagtgcaggccatcagaatttatatgatgccagcgtggtcacgcataactggtatccgtcattcattattcattcccgataa

SEQ ID NO: 208115 - DNA, 276 bp, Klebsiella oxytoca
atggttaatttgtatcgtcgctgttcggtatttatctcagcttgctgggcaattatcaacaccatttcgtttgacgttaatccgcttgagcgcgtactgaccacgctacggcgagtagttgaatgtgcatttaaagcagcgactggtcatacgctaccgcaaaaagcggagtggaaaatcgtagagcgaatgtgcagtgaaagcgcacgcgagaaaattaacattttcggccatcgtcctcgcaataccggagcgctgtgcagcccattgctatag

SEQ ID NO: 208116 - DNA, 489 bp, Klebsiella oxytoca
atgaccgccgaagccattctgacgttagtgaaaaagctctggcttccggctctcatcattgtgctgattggtgcgctggctatcgcggccagtcactacaaaggcaaagccatcgagttcaaaaggcagcgcgataaagcgactgagcagctcaacctggctaacaccaccatcaccgacatgcagggccgccagcgtgatgttgctgcgcttgatgcgaaatacacgaaggagttagccgatgcaaaagctgaaaatgatgctctgcagcgcaagcttgataatggtggtcgggtgctcgtcaaaggcaagtgtccagtgtcagccactacccaaaccgccggctccgccagcatgggcgatgatgtcaccgtcgaactctcttcagttgctggacgaaacgttctcggtatccggtcaggaatcctcagtgaccaaacagccctgagggcgctgcaggaatacatcaccacgcagtgcctgaagtaa

SEQ ID NO: 208117 - DNA, 393 bp, Klebsiella oxytoca
atgaccagcgaattaaccagagagcagatgctcgaacgcgctcgtgaaaacgtcaaagcgttgaaaatggcatcacgccagcatgcattcgaaagcgcgcgcgaagaaatattggctgacctgcagattgctgagtatgcgctagcgtgcctggagggggtggacagcgagccggtggcgttcatcgataaacagtggactttggtctattacattccaccgatgaatatggggctaaagattggcgacaagctctatcgccacgcgcagcagccggtagtgccggaggaacgggataaaaccattgatgctgacgaccatccattgctgtggagctttaacgaaggctggaacgcctgccgcgccgccatgctcaacggaggtaagtcatga

SEQ ID NO: 208118 - DNA, 237 bp, Klebsiella oxytoca
atggcgaaattaaccgattatcagctcaatactcttcgtgctattagcgaaggtcaagtgatgctccgtggtcgattcgatcgctactggtgggaatccaccgacacattatgctcggcggtcgcaaggcgtttgaagtcaaaaggtcttatcaagaccgtttacctcaaccctgttcgggaccgtgtagagctaaccgctgctggattccagaccattgaaggagccaaccaatga

SEQ ID NO: 208119 - DNA, 498 bp, Klebsiella oxytoca
atgaaaactgatatcaccgaactggcgcagagcctgaaagcggcggcgaaaaagctgaaggaagtcgggattatccataactattcgaagtctgtggctgcacaaatcgacttcgaaaagtctgccaccccagacaacgtcaccgcgctggtagaggcgctggagaaggcgcaggccaaaatcatcgtattgcagcaaaaatatgaaattgaccctcgcactcacgagattatcgatttggaagaacgagtcgcagagctggagagcgaagtcgaaaagtggaagcaagaggccgaagcgtgggagcaggtggcagagaatcaacttgccacagccatcgctcttgagtcacgaactgtaaaacttccgaagttcaaaatgcttgaagactatctctcagaagttgctgttgaagagcggaaagcgattttgcttggtgtgaagatggagtttcatcgtgcgctgaatgctgagggtattaggtgggaggctgagtga

SEQ ID NO: 208120 - DNA, 210 bp, Klebsiella oxytoca
atgagcaagcctaccgatgaagaaattatccaggtgctgagcgatcgcggtaactgcatgacctatttcgttaccaacgttctccgccataaatactggcctttaagcacggcatatgtattgcgccgcatgaagaagctggagtcagccggcaaggttcggcgcgttaaaagcacttacataactcaaatttgctgggggttggcatga

SEQ ID NO: 208121 - DNA, 675 bp, Klebsiella oxytoca
atgtcacagctgagttttgccgatgtgttcaatatggccagagaaaccgctaataacagccctgttattcaggcagggcagcagatcgcggaaacggtgcccacggttcagcgtatgatgagcgagcagtacagccgaagccggtttatcagcgtatttaaagacacggggcgccatatggggcgctgggaagtgttcagtgattttctgtcactcgccgccagtgagctggatatggcccggataagaacgccggagagcatggagcactgccggaaaatctgcgcccggtacgaggccaccgacatcgcgaacatgcaggaaatgttttgcctgatggtgtgtgcgctggaagcgaaatttcatgatttcctcggcgcgatttttatggagcttgatctgggcgataactttcgcgggcagtattttacgccgtattcggtgcagtgtctgatggcacgaatgctgatgcgaggcgtcagagacactatccgccgggaaggcattgccaccgtcagcgatccggcgtgtggggccgccgggatgctgatcgcctatgcagagtgcctgcttgaagctgatattaacccctccatgacatgttcggcagctgcattgacatcgatccggtggcggcagatatggcattcatccagctgtcactgctggggatag

SEQ ID NO: 208122 - DNA, 567 bp, Klebsiella oxytoca
atgaccatcactactgtcggtattgatcttgctaaaaatgtgttcgctgttcactgcgttgaccaaaatggcaaaacagttctggttaaatccagagtaacccgcgcagctcttcccgagctgattgctggtttgccgcccagtgttatcgggatggaggcatgctccggggctcattactgggcaagactgtttcggcggtatggtcatgagccgcgtctgatggctgctaagtttgtatcgccttaccgcatggcgggtaaatcagggaaaaatgatgctgctgatgctcaggctatctgtgaagctgttcgtcgtccgcatatgcggttcgtgccagtgaaagacgaaagccagcaggccatgcagtgtttacatcgtacccggcaaggttttatcgaagagaaaacagcaacatataatcgcctgcgagggttgatctctgaattcggcgtcatcgccccacaaagtactgatgcactgcgccatatggtttctgagcagaagagttctttaccacttcaggttcagcgatgtaggggtcggttccggctgagggcgaaatga

SEQ ID NO: 208123 - DNA, 315 bp, Klebsiella oxytoca
atgggtaaaccaacatttagatcattttacgatgtggtccgggagcttgaggatgtatatggccataaagagctatggctgtattcaggaacggcatacgcaacgccaacagaaatgattaacgccagacatacctggaaatcgccaaaaatcctgaaacgtaacggaaggatggttgcagaacgaatggataactcggacttatggcaactggttggtgactacaaaaaaccgctgctccaacattgtgcttcgccctggcaatcctgtcagatagatgactattttaaaggctattacattatcgccccctga

SEQ ID NO: 208124 - DNA, 276 bp, Klebsiella oxytoca
atggaagtttactggacgcttaaagctcaggatgacctggagcgtatctaccgttttgcccttcagtacagccgccagcacgccgataacgttttggatcgcctgatgactggctgtgctggtctttcagcacatccggcaattggcgtacagcagactcggtatgaacctcgggaagtccgaaaagtgttattcgctgactatgaggttcactacgaactccgtgacaacgacatctatatcgtggatctctggcatacaaaagaagaacgatga

SEQ ID NO: 208125 - DNA, 249 bp, Klebsiella oxytoca
atggtttcttctgctaaacagaccatcagtgctcagattccagttgagttggctcttgccgttgagaatctggctatagagctggatcgttcaaaaagctggatcataaaggaagcattactctctatgttggctgaaagggaacggcgtcaccagagcatccaggccggtcttgccgatgtggatgccgggcgcgtggtgaaccactcggacatggtggattttgttaatcatttaaagaaatcctga

SEQ ID NO: 208126 - DNA, 396 bp, Klebsiella oxytoca
atgacgataaaagcacgcattcagtcacgactgaaacgctcaaaacgttatgtattcattcgtgacgatttcaaagatattgcaggttacgatcaggtcggcagggcattgcgtgatctcatcaaagaagggcaactgctgaaggtgggctatggcgtatacaccaaagcacgccagagcagcattacaggtaaggtcatgcccgctgcgccggggggatctgcggcagtgatcgttgaggcgctggatcgcctgaaggtacgttatcgctttgccggagcaacgcaggcgtataacagaggcgaatccacgcaaatcccggcgtcactggagatcaaaacatctccgcgatttaagcgagtattagccgtggggaacagtaaattaaatgggtga

SEQ ID NO: 208127 - DNA, 1077 bp, Klebsiella oxytoca
atgtcaaagggatcttttcaaaactaccagcattatctcccagcaacttatatcaggcgctttaaaataacatctgaagacccaaaggctgggaaagatactgtttatggttttgtaaaaacagatgctaccaaaaaacaaatcaaagaaagaattacttatcttaatgtcacaaagatctgtggtcaagaacaaaggcatactcttaacattgatggggttagagataactttattgaggacagctttaaaatactagaggactgttacccaggctttgtagacgcaatgtggcaattttataaagtgaaggaacattttaaaaatgtttcaggcagtcattattttgtgcgtagacactgcctgcttggtgacctttcgctagagaaattaacacgttcaatagtatgtagtggtttgcatgagattgattttaatgatttaaaaaatatggcgattttcatggcccgttttttatgttatagaaacaaaggtatggatgattttttcgataagagttccatgccaaaactaaaaaatataaattccataatcaaggaagtgctgaataccaataaggatctcattccttatggtgcgagtataattccgcgttctgagtggaaatctttgttatctatattaaaggagggagggaggtgtctagttaatgcggatggagggaagcgaagggaaatgtttaatatacttagaaagatgcatagatttatggctttacctttttcatcgattgccgatgaaagtggttgtagggcatatttgtactcagcacctaagggatttgctattgtttcaagcgactttccttttatttttttcaaaaatgatttttcatttagtaatggatgtgtttttacaatatcacctggattagcattgataatcaagagcactaaaattacactaagtaagccagagaaactatctaacttaattagcaggcgaaatgtaacccaagctagtcagtatgttttctcagtcgaaaaagaaagactagatatatttaccaaggatattactccgattttaacccagtcctatggcaaaagaaaataa

SEQ ID NO: 208128 - DNA, 714 bp, Klebsiella oxytoca
ttggacaacaaggaatatctgcggaattttggagtaataactgatgaatcacaaaaaccttccgataaacatttgagagcgtttacacaggtagctgacatcaggaaatttgaaattgagatgtattggaaaagggctacgtatttctggactatcatcgccattacttttactggttatttcgcattagcatccgtaaatagttttccattcaaaaatgcattttctcttttactttccagtatgggatctgtttttactctttcatggtttttggttaacagaggtagcaaatactggcaggaaaactgggaaaatcatttagacctaatggaaaatggcataactgggccgctctataaaactgtactctcacgaccgtcagtcgaagcaaaaaaaaacacccatcaacttgcgagtactgataaagacttcatcgacgaatatattaccggccccaaaaaaatatcagcatccaagattaaccagttagtggcattttacttgcttggcatatggttaatattagtgataataacactcaccaatatctctcaactatcattctggagtgagcctacaatggagttagtgctgagcatcgggattttaatttggtcggcaatagccactagtttaatgctctataagtcagcaacttacacaggaatacagacttcagaagcaagagaacgctcgtcgaatttattataa

SEQ ID NO: 208129 - DNA, 696 bp, Klebsiella oxytoca
atgcgcggccttaacataaccccgctgtgcgcggaaactagccaggcaaaggggcgcgtgaaacgagctcacctgacacttcaggaccggctggttagggagctcaggcttaaaggaatcagtacgatagaagccgcgaatgcatttgctgaagaatacatggcagattataacctgcgctttgccaaagctcccttgtatgaatttaacgcgcatcggccgctggcattagacgatgacctggatgcggaatttacctggcgagagccacggcgggtgtcaaaaaacctgacggtacagtatgacaaaatgctctatctgattgaggacagcgaatacagtagaagggccatcggcaagtatattgatgtctggcactatcctgacggacataaggaactgagattgaatggcgtgctactgccctactccacttacgaccgattgtctgaagtcgatcctgtcacgattgttgataacaaaagactgggccatgtcttggacgttgcccgcgaggtgcagaaaaaacgggataataatcgctcacaatcgttaccttcctctggtgatgagccttcccgcagacggcatgcccccagtattaacaaatcgcagcgttttctgaatgaggatgacctgctcaaagccatgataaagcttcagggcagctctgaggctatttttggtaaaagatga

SEQ ID NO: 208130 - DNA, 135 bp, Klebsiella oxytoca
atgtattccgaagcgacccgtggctatatcgagaaatacggtaagctcatgatcctctacagcgataaagccagtgtcttccgggtcaataataaacatgccactaccggtcccggtgaaacgcagtttgcctga

SEQ ID NO: 208131 - DNA, 477 bp, Klebsiella oxytoca
atgaagatcagacttgctgtgcctgtggaggcagaagaatgctggaacattcgaaatcaggctatacgttacggatgtaagaacagttacgatgatgcggttattgcggcatggaccccggaaaaaatgcctgaaagctacaggaacgtcattgtagtgaatccttttttcgttgttgctgcccctgatggcaggctggtcgctacaggctttcttgatctgtcttcaggcagtgttgaggctgtatttacgttacctcaatatacaggtaaagggttaggtagtcagattattgaagccatcaaaagtgaagctcgtgaacggggattttggcaattgactttgtcctcaacacctaatgcccagactttttatgaaaagcatggtttcaaacttttgcaggaaagcatgtatccctctgccctgacgcaggctgaactgcgctgcatggaaatgtctataaatctccagggatag

SEQ ID NO: 208132 - DNA, 1572 bp, Klebsiella oxytoca
atgaataactacaaaattcgtcttcgtactctcattacagccctttctacaggcgctgtagtgcttaccggaaccatgctgttatgcataatgattgtgtttcagagagacagcatagaagaaagtacggttcagaataacatcgcatacgctcgtaagctggccgatactacagatcggtacctgacgattgcgcaaagtgagttgaggtggagttctgggcagatccacgatctttcagcttccgacgaactagtacgtgaggcggatcgtttgaggctacagtctggcttttttaattcagttgtcattgttaacagcgagagggttgtaagagcaacctcgcctgaaagtctgggtttagttggaaagatactgacttcagatgccagtatcagagctgtaaaaaatcaggtagcttccatttctgagccgtttatttcggcttccggaaattatgttgtttttctttcacaacctattttttctgaacatggggtttatcttgggtatatgggcgggacaatttatttaaaaaaacatagtatattaagtgatattttaagtcagcatttttatcccccagagactgacataaaaatagttgatggcaatggtatggtggtgtttagtcatgatcctgatacagtgggtactgttgaaaatatttcccctgaaattcattatcaacttaactcctcgcaaagtggtaagctcagtttagctaataataatagggattatgtcgctgggtttgcacgactaagacaaactgactggagtatctggatttccggaagtgaaaaggaggtcgatgcgttagtcaaccattcggtaaaaaagatcgttggattcattaccctcgtcgtattttttgtcgctattttaatgatatatcttggtacactagtcgctacccccctggagcggctggcaaatgctgtaaaggctggtagtagccagcggagcgatccttctgtactacaaaatatcaagggttggtactatgaagctcaggaactcaaagaggcggtaaaacaaaatttaatatcaacacagacgaaactcaaagccttcagcgagcaggcgataaaagatccacttacagggctctacaacagacgcggttttgagaaaatgtatgagtccatttcctcaggaaagcaagtaaacattattgcaattgatatagatcactttaaacaagtaaatgaccgattcgggcatgatgctggagataaggtgctgcaagagcttgcgactcttttgaaggaaatatgccgggaaaacgactttatctgtcgatttggcggtgaagagtttgtaatcgttatacctgaaaaaaaatctgatgaagtaattgatattgcagagcgtatccgaaagcaaactgaaaccactatttttccctttgtgggacatttgacattatcagcaggagtggcgtcttcccaatatttcggtgaagatattaatgagttactcagacgcgcagatgaatttctctacgtagcaaagcggtcaggccgcaatgcagtagtctctgtacaaaacaagtatcaatttaactga

SEQ ID NO: 208133 - DNA, 297 bp, Klebsiella oxytoca
atgaaacaggtcaggatttatacactcaaagatacacagtcagcagaaatttattttcacagacactggccccggcacatggtctcccttcccgctttcaatatatatgtaaatcatgtctatctggggaatgaatgtcaggttattgcaacagtgacttatcagaaagacgctgatatacaggctataaatcagaagtacatgaacagcgatgcgttcatgtctgacatggaaggtttcgacatgtcttctatcctccgtgtggatgaaatcagcattaaagaagcacttttctga

SEQ ID NO: 208134 - DNA, 231 bp, Klebsiella oxytoca
atgaacgcgagtttaaggcatgttctgcgatatacaggagtcccggttgacgccgctgagcctgtgcgccggaagttcggtagccgcctgatattgatcgtgacggttgctcttcttcctttgctgattgttgatatatctcagtgtatatttgtgctttcacagcttatgtggggtatcggtatgtatgttggtatttctgtggcgagtgacaaacctgagcgtcggtaa

SEQ ID NO: 208135 - DNA, 903 bp, Klebsiella oxytoca
ttgattaatgtatttggtcaccttaatcctgacagcgacgctgtctgcaccgctaccgtgacggcgggctggctcaaccggtgtaaccgtcctgcccgagcctggcggcctggtgaagtgaaccctgagacacactatatttttgaagctgccacgctaaccctaccgcccttgcttgatatctcactgaaagatgaacctgtatggctggtcgattttaccgaaccggctcaggggcctgctgacctttttcagagcaatatcatcggaattatcgatcatcaccggctgggcggtctgatcacccaattgccgccagaggtctggataaaaccggcaggcagcagcgcgacagtactctggctactgatggatacagaaatgcgccgtacgatgcccccggcccacgctatcctgcttcttggcgcgttgctcagcgacaccgttaatctgtgctctcccaccacaacacaagacgatatccgttccgccactgaactctgcgtcctttcaggggtaaaacgcacggcttttgcccgagggctcctgacagctaaaaccgatatcaccggaatgtctgcagagcagcttctgcataaagaccttaaagccttttcgctcgccggtatgaatgttcgtatagcgcaactggaggtcagttcacctgaccaggtcacccctctgctggatgaattgcaaagtgcgatggtgcagttggcagtcatgacggaagccgggcttatcgtgctgatggtcactgatattcatacatgctgttcttcactctattttgccgggccggagggtatcagcgcggctccatgtttcgtaacgggtatggtaagccggaagaaacagcttctgccctggctcgaacaccatctcagtcaaagccggagatag

SEQ ID NO: 208136 - DNA, 426 bp, Klebsiella oxytoca
atgaaaatctacacacatgcacttgttcttgttcaggggaaagaggatggcgtccctcttctcgcactggcgacaacactgtccagtatgctgcaaatcaaaatcaccattgctcatatctgtaacgactaccgggagatgaactacatatcggacagtctgatgaacgatgccgtatcgaaggaggttgtcctggcgaaggcgctgctcagcgagctgacatcgtctgtagctgagcaggttaatgcgagagaactggtcaccatgcggcgattcgaagatgtacagaaatgtatcaacgataccggcgcggacctggtgatagctggccaccggaaccgttttatgggagcactgacgtcccgttcggctgaatacgttaaccacctgaacgtagacgttttgattaaacatattcatgactga

SEQ ID NO: 208137 - DNA, 171 bp, Klebsiella oxytoca
atgatcgaaatcatcatggcatctgaggtgcgtatgccggctgaatccggcatacatcctgcttcagaatttatattcaccttgtatggggagattctcgttgagtcagttattggcaattatgattggtggcgccactggttgtgtcatccgctggtttttggggattaa

SEQ ID NO: 208138 - DNA, 264 bp, Klebsiella oxytoca
atggttaacctgatgggggcttttatcatcggtgccgcaatggcatattttatgcgccacccccaacttgatcctgcatggaaactgttcatcgtcactgggttgtgtggcgggctgaccaccttttcaacattctctgtggaagtcttctcattactgcagacgggaaattatttatcggcgctcacatctgtattggttcacgtcgtgggatcactgcttatgacagcggcgggattttatctgataatgttactcatatga

SEQ ID NO: 208139 - DNA, 1836 bp, Klebsiella oxytoca
atggcactctcagatatggccgcccggaacgctaaggcaaccggcaaggcttacaccgtcagcgatatcgacggcctctccctcgcggtctctccgaccggaggcaagacctggcactaccgctactactgggccggcaagcagaaacgcatgtcgctgggcacatatccagaggttggccttcgggaagcgcgcgctcttcgcgatgcggcccgcgcgttgctggccaagggcatcaatccccgagcggatcgcaagcagaagcgccaagccgtcaggctggccgacgagcacaccttccaggccgtgttcgacaaatgggtcgagcaccgcaggcttgtcctcaaggaggggcggcagagtacgctgacgcagatccttcgcatcttcaaaaaagacattctgccgacgctcggaaaacgtcctatctacgaaattcagcgtcccgaccttctggaggtcgttgccaagattgaacggcggaaggcgctcagcgtggcagagaaggtgcgtacctggttcaggcagatgttccgctacgcgctgatcatcgtgcccggcctgccacagaacccggcattcgatctggatgtcgtcgcgctgccgatgcctcccgttcgtcacaacccgttcctgcgaatggatgagttgccggcgatgttgtcacggctgcgcaagtaccacggccgacttcagacccagctcgggctgaggctgttgttcctgacaggggtgcgtaccggggagttgcgcctggcgacacccgatcagttccatcttgaccaaggcctatggatcatccccccggaggtcgtgaaacagttgcagcttgagatgcgcaaggagggcaagcgacctggtgatatccctccgtatatcgtgcctctctcggcgcaggccatggagatcgtccagcacatgctggagcagttcaagccggcacagcgctacctcttctcccatggttgggacctgaagaagcgcatcagcgagaacaccctgaaccaggccctgaagcgtatgggctacaccgaccaattgacgggacacggtatccgggcgacgatttcgaccgcactgaatgaaatcggatatccgaaagtctgggtcgacgcgcagctttcgcattcagatcccgacaaggtgagcgccgcctacaaccacgccgaatacgtggagcaacgccgacgcatgatgcaggattgggctgatcggctcgatcttttcgagcagcatcaggtcgaggcggcgagcatgcacctgaccgtccatctcgaaggtgtcccggaggtgcctgatgaagtgccagagggtgctgaagcagcaattccgcctgccccaatcgtgttggtctcgaagcctggagcgggtatgccgacgctgccggactccgtgcatcgactgtccgctatcacgggaccacgcacgccgccggtcttgtctgaaagccagcgcgagcaactggagcggctggacatcttcaattcgccacaccttctttccgcagccgattttgcgaagatggctggcaagtcgcggcgatggatcagctacgaaatcagcgggcgcaagatgttggcactcagcctcggaaatctggggcagcgcgttccggactggcatttcacgccgctgaaacacaagctgatccaggcggtgctcaagttcgcacgcgaggcggacccatgggaaatctaccgtgcgctctcccaaccgcacgatgacttcaagggccttgcgccggtcgacgcggtgaccgcggagaacctgcatgaagtcgctatggcagcgtgtttttcgttgaaggacagtcagccgatgcttcggctggcgtag

SEQ ID NO: 208140 - DNA, 789 bp, Klebsiella oxytoca
atggttgtcaacaacactagaaggtttgacgggaaagtggccctggtcactggagggtcgcgggggatcggaaaagccatcgtagaacgactagcagccgagggcgcggcatttatcggcgtccaatatggctcccaatcgtctgctgctgaccaagtggtaagcgaagtagaaaagctaggtacgcgtgcaactgcacttcatgctgatttcagcaaggatagctatggagctgcgtggaaactttggaaagcattttcagaagcggccagagagcataccggtggagaatcctttgacatcttggtcaattgcgccgggatagcaccacttgccacattggaagcgaccaccgaatctctcttcaacgagatcctatcgatcaacttggcttcgaccgtctttctgacccaagcggccgcgcctcaccttcgcgaaggcggacggatcatcaacttgtcatcggcgctaacgcgtatcgctgcccctgacaggccgatttacgctgcgtcgaaaggggcaatcaacgcattgaccttggctctatctgcggagtttggcccacgtaatatcactgtcaatgccgttgcgcccggcgttatcgacacagacatgaacagtggttggctgaacgaaccggaggcgcgtcgtcaggccgaagccctttcagtgttctccagggtcggtcgcgccgatgatgtcgcaggtcttgttgcattccttgcatcacatgacggtcgatggaccaccggtcaagtcattgatgtttccgggggctcactgctctaa

SEQ ID NO: 208141 - DNA, 1167 bp, Klebsiella oxytoca
atgccactggccgtttatatattgggattgacgatcttttcggtaaccacgtcggaattcatgatcgccggaatgatgctgtcgttaacaaaggcattcgacgtttccgtcacggaaatcggctacctgatctcgctctacgcgggcggcatggtgattggcggcccgctgctaacgatattcctactgaaattgcgcgtgcccaacaagcaagccctgctttggctggtatttgcatatgccgtcgctcaggccatcgctgcgtccgccacaagctacgagatcatggcagtggcaagggttgcaactggcgtcgccggatctgcttgctttggggtagcgctggcaatctgcgccgaaatagtcggcccgagcgcccgaggtagagctgcttctgtcgttataggcggactgatgctggcgaccgtgttgggcgttcccatggcaaccattgtcgatcagcatatgggctggcgctccacgttctggcttgtctttgccctagtcgtgatctgcggcctcatcgtttcggttctgattccgcgatccacgcgccaggagacggtcagcctcggtgatgaactagctgagttcaaaaaccctcatctatgggccgcctacactacgagcgcactcatcattggcgcaacgtttgcagcattcgcctatttcgcaccaattctgaccgaggtggctggcttcacgcctgccgcaattccgtggctgctcggtatttacgggctggcaaatgtgatcggcaatactatcgtcggccgttacgctgaccgctacacaatgcctatcatgctgctggggctaatttctctgagcgccacgttgatcctcttggcgctgctggctcagtatgccgcgctcgcagtaattctcatcgtcatcatcgggctcgtcggcgtccccatgaatcccgcaatgattacgcgcgtaatgaaaactgcctcccatcctggtcccttggtgaatacggtccatacttccgtcatcaatattggtcttgccgttggctcttgggtcggaggctttggcatcagtgccggatacggcttgcgttcaccgctttgggttggtgttggcctcgcaatcctcggtctcctcagccttcttccgtatatgcgtggcagccggaaagcactgtcgaccagcgaataa

SEQ ID NO: 208142 - DNA, 597 bp, Klebsiella oxytoca
atggcgacaaacagcgtcacgggtagacctcgggagtttgacagggattcggtcatcgaagccgcgatgcaggttttctggtccaatggctacgatgggacgtctacacaggcactttgtgaaaatatcggtctcggcaagggcagtctctataacgccttcggcagcaagcagcagctttatgagctcgccctgcagcattaccaggatctagctctcacatcgcagaagaagattctgaacgggccggggacgccacgcgaaaggcttcgggcattcctgcaatggggggtagacgaagatctcaatggcaccgagcaccgaacctgcatggccctgtttgcaggtttggagcgcgcaccaaaagtcccctcggtgcaaacgatggttcgtagtcattttacacgtctggagactgcgctatgcgaggttttcactgccgggcagcaagttggggacatcgcatccgataggtccccactttcaaaggcacgagccttcctcagtcaatacttcggccttcgtattctcggtcagtcgatgccagaccgggaagttctgcaagacgctctggagggcgcactttcacgcctatag

SEQ ID NO: 208143 - DNA, 624 bp, Klebsiella oxytoca
atgaaatctaattctactcgagcacaaagtcccaaacgtgcccccggcagaccgagggaatttgatgtcaatactgccttggacaaggctgctgacatatttagcgagcgtggctatgccgcaacttcaatcgaggagcttgccaaggcgatgggactggtaacaggcagcttgtaccgcgcattcaaggataaacgggccgtattcatcagtgcgttagaaaggtatctttatgtccgaagcctcccgatcgacgagatcgtcacttcagcgaagacaggaaagggaaagcttgtagatctcgttggcctatatagccgcgtatcttacgggtctgcggggcgccgaggttgtctggtcgtgtccggcgcagttggactcgcggccgaagatgatgaaatctgtagcgctttgcgcacgtccttcgacgtgacagaggagacattgagctgtctcattgatgaagggaaacgtgatggctcgatacgatctgatttagcgacgcaaccgaccgcacgcgccatcctttgttttcttcagggggttcgcgtcgtagggaaagttgaaacggaacgtgatcgtgttgaggatgcgtcgcgggccatactcactctccttaactag

SEQ ID NO: 208144 - DNA, 585 bp, Klebsiella oxytoca
atgatcgatggtgactatatgaagatgagtattttaaatgcgaagccgaatgatatcgacgatattctcgatctacaagaagatagtcttcttgaaaatatgagtgccgaagaagccaacacacacgggtttctacggacccgtctaccacgccaaagtatcgagtatttaatcgaaaataactggatactggtcggaaaaatcaatgacaaagctgtctcttatatcataggcggggattggtcattttttctccaatgggagatatttaaggttatgtcctcacgatttatagggaaggaagtcggaggcgtcaccctttccatggtgaacacctatcaatacggaccagtttgcatttcgcgaaaacaccaaggaagaggaatatttcgacaattactaattgccatgtttcagaaattctccgacgactaccgcatggccattacattcattaacgaagacaatgtgcgctcgttagctgcgcacaaacgagaagggctggaagttattgacacgttccaacttgatggcgcgacattccatacgcttgccttcgacaacagaaagattcctctacagtaa

SEQ ID NO: 208145 - DNA, 1125 bp, Klebsiella oxytoca
atgaagaaatttcaaatagcggtcgtcggatgcggccttggtggcgctgccattgccgcgttgctgcgcaggcatgggtttgatgtagctatctacgaacaggctgaacgatttcaccagatcggcgcgggaatccatctaacgccaaacatgctgatggccctcaatggtctcgatatcgaaagcactctggtgaagcacggataccgacctagagcttatgtaagtcgggacgccagcacggcagaaaggctgttcaatctgccattactcgatgccgaagctacctatggcgacaaatatctgacaatcccgagatacgactttcaccaagttctggtctctagactgggcagtgaccagatcaattatggtatgaaactcacttccattgagcagaatcttgatcgcgtcatccttaatttcgacggtgatgcttctgctgaatgtgaccttctgatcggcgccgatggcctatcttcagtggtccggcgatccattcgcggcgacgcagcgcctgcattttctggccatgttgcctatcggtccgtcatcccatcttcgcttctgccgaggctacccgaggacgattacgctaaatggtgggggccagacgacaaattcgtggtggcgtactacatgacgccgcagcgcgaccagttctactttgtcgccggcttcaaagcagaggcatggcccgccaatacgtcatacataccagggtcacgcgaggaactcctttctcaatttgccagctttcacccggatatccgcgacattctttctgcaagccaagatttcagcaaatggcccctgttcgagcgaaccccgggtccgacctggcattccgggcggatcgttatgctgggtgatgcctgccatccgatgaaaccacacatggcacagggagcggcgatggcaatcgaagacggcgtgatcctcgtccgctgtttactgaatatgcgaggtcaggactgggagggcgctctcgcaatgtacgagcgtaatcgagttgaacgtgtctctctggttcagtcgacgtcgaacaatggtgaatggtttaagcaaccgactgacccaagttggctcttctcttacgatgcatggaagcaccaaatcaaatga

SEQ ID NO: 208146 - DNA, 252 bp, Klebsiella oxytoca
atgacgaatcggaagaagcgtacctggtccttcaaggagttggactactcagccttaccgccttgcggctacgtctttagtgtccaaggcgtttcctatgtcggatatcccaccaattcgaagtgtaccggaggccaggaccttcgggatctcatcaaagccgctagtcgcatctcgcagcgtgagaagttcgacggagatatacaggataccggcggttcatccgcggaggaaatcggaggaggatcatga

SEQ ID NO: 208147 - DNA, 519 bp, Klebsiella oxytoca
atgaacaaggaactgccctatattcatcaggatacattgcccgccaagtttatcggcgcgattgatggaaaatcttcgtggctacacggcgacacctacacgctgaaactaagtcacgcggatacccatggtcgtttctccctgatcgaagcgaccgtaccgccaggtggcggcccgccgatgcacatccacaagaacgaagatgaaatcttctacgttctgcaaggtgaactggatgtaattgcgggaagcgagcagtacaaggcgaggtccggcgacttggtattgataccgaagaatgtaccgcactgctttcgcaataacggattgcatgcggtcaaacaacttctgattttcacacccgctggattcgaagagtttttcgaagaagcgggaacaccagcatcgccaggagttgcccctcccgcctttgaccctgacaacaatcagcgagtcattgacgtggggatcaagtaccacgccgaacagttgcctaacccggacctgctacgcacctga

SEQ ID NO: 208148 - DNA, 777 bp, Klebsiella oxytoca
atgggatacgttgggaaatcactgcgactgaagaggctgttctatagcgggcgggatgttggcgtcatcgtgccaatcgaccacggtcttacggctggcccgttgcctggtctacgtacgatgcccgaaatcacgaagtggattggctgcgagtcaatcagcgccatcattgttcataaagggatactggagcgtctcgttgcggctggctatccggccgcatccacaggcgtcatcctccacctcaacggaatgccgttacttggggctgatgccgatactaaacatctcgtcacgaacatcgagacagcagtgcgcatgggggccgacgccgtttcagtgcaggtcaattttactgaaggaaactatgagcacaatcttcgccttcttggaaaagtcactgatgccgctaacgcggcaggtcttcccgtcctgaccatgctctatgacaagggtcatcaggccaatgatgacgaagccaccgatcggatgcacaaactcatccgtctagtcactgaagtgggctcggatctggtgaagatcagtttccccaagagcgcgtctgccctttccgagatcgtgaccacgcacgggcagaatatccgaatcctcgtcgcgggtggtgagcagaccaatgacgaggatttttgcaagttttctgaggccgtgatgaacacaggggcgcgggggttatgcgcagggcgaaacgtcttccagagcccttcacccgcggcgcttctccggaggctcgaggccatatgcaaggcgcaagcctaa

SEQ ID NO: 208149 - DNA, 1029 bp, Klebsiella oxytoca
atgccggcaattccggagcgaatgttggttatcttgaagttgaactctcacaaggaactcaaagcgtttcgcgagaatgccatcttttccaagttcaaaagcggcggcaaacgacttgtagtggcattcaacgacgccggggaactggcgaaactacagagcgataaaatccaagtttgctacgaaacatatgttgacgacaacaacaagctattggactcaatttcaacgggtttatcctttaattacctatggatacttttccgggacccaacaaatatcccgttggagcttgtgattgcatccttgcagtcgaccagtaccgtcctgctgaaggaaatccgtgaccccgaggccgttgacgacgccatagtgacgtacggcgtcatggaatacggtgccgaaggggtcattttctcaccgcggaaacaggacgatttgagccgattcctggaaaagcttgaacaaaagagtcatccgccgatcgacctccgcgtcggcaccatccggaaatgcgagcctgttggcatgggttatagagcgtgcattgatacagcaaccttgttcgacgatgacgaagggatgctcgttggcagcagttcccaagggggaatcctatgctgcccggaagtttacttcctgccatatatggaacttcgccccttccgggtgaatgccggggccgttcattcctatgtattcaatgtgcatgaccggaccgattacatgagcgaactcaaaagcggctcgcccataatgatcgttaactcgaaagggcgcgttcgtacagcgcctgttgggcgcatgaagatcgaacagcgccccctgcgcctcatcgaagttgcattctcggaaaccgaagtcgtcagcatcctcatgcaagacgactggcacgttcgtattttctccgacaaggccaagccactgaacatttccgagctgaagcccggcgacaaagtgctgggctatgtgactgagagcggtcgccacgtcggcatcaagatcaacgagagcatcatcgagaaatga

SEQ ID NO: 208150 - DNA, 537 bp, Klebsiella oxytoca
atgcaggtgcttgatacaaaaattgccgatgtcaaaatcattcaacctaaaatttttggtgatgctagaggtttttttctggagacttttgaaaagaaaagatatcaggaaatgctcgatattgattttgattttgttcaagataatcattctcgctcatcaaagggggttttacgtggtttgcattttcaaatacaaaaccctcaaggcaagctagtaagagtcgttcgcggtgaggtttttgatgttgccgttgatattcgccctggttctccaacatttggaaaatgggagggtgtcatactatcagaagaaaataaaactcaattttggataccaccaggtttagctcatggttttgttgtcttgtctgagattgctgattttgaatataaatgtacagattattataattcaaaatgtgaaggctgcttacaatgggatgatccagatgttgctattgaatggcctataaaaaatcctttgctctctgataaagaccggcaaggaaaacgcctcaaggagattttattatga

SEQ ID NO: 208151 - DNA, 861 bp, Klebsiella oxytoca
atggaaaataatcaaccactggttacagtttatatatctacatgtaatagacttcaaaaactgaaaagagcgataaattctgttctgctgcaggactatcgcaactgggagttgatagtatgcgatgatgcatccactgatggaacatcagagttcatgaaagatacctgtcggaatgattcacgcatcagttatttgcgtaatgaagttaacaagggtgcatgcgagacaagaaatcttggcatttttaaggctaaaggaatttttattactggattggatgatgatgatgaattcactagtgatcgaatttccttcttcgtaaataattggaatgataaatattcattcatatgctgtaactttatcgataggtacttagatgaaaaagacgtaactcattataaaactaaagcacaaaattacttacgactttcgtataaagatatgctttttgataatactgcatcaaatcagatttttactttgacacacaggcttcaagaaataggtggttttgataagaaaattaaaagacttcaagattgggacacttggttaaggctatcttttaaatttggtgatttcataagatttaataaaagtacctatattatgcatcacgaccatgcagtaggtgaattacgagtctctcaaaatgaaaaaatcacacaatcattgttggatttggtatccagaaataaaaatatatactcgccagatgacgcattatacatgaatttcatagttaatcttaaaaaaaatgaaacaacgattcgtgatgggttatattggtcctataaaaagagaaatcctaaacattttgtgaaatgtatattaggaacttttaaaccaaattaa

SEQ ID NO: 208152 - DNA, 894 bp, Klebsiella oxytoca
atgcccatggaaaatatatacgccatcgtaataacttataatccagaaataaataatgtaacgagattaattacatctcttaaagagcaaaatgttacacctttaatcgttgataatggaactttagaaggatatgatctttctttacttagatctctagcgcatgttatcactcttgaaaataacgaaggtatcgcaaaagcacagaatattggtattcgttttgccaaagacaatgaagcagatgctttgatttttttcgatcaggatagtgacataaaagacaattttgttaaatcgttggttggtgattataattcagtaaaagcgcatgataaaactattggtattataggtccaacatttatagattctcgctataaattctattataaacagatctctcttaataattttggaattagaaagaaaataagtcctgaacaatactctacacctttcaaggcgactctgattatttcctctggttcatttatacctatgtctatattggacaccgtaggatatatggacgaacgattttttatcgattatgttgataccgaatggtgtctaagagctgtttcgaaggggtattctgtttatgtatcaacctcagctattatggagcatgcaataggtgataaaatgattaactttttgggattacatatacctgttcattcaccagttagacgttactacaggattcgcaatgcgatattgttctcaaagtatccccatattcctctgatgttgaaatttagagataattttatgaattttattcatcaagctataattacaatcagccaaaaagataagcttaaaaatgttcaagtagcatttaaagccataaaagatggtctttacggaaagtccgggaaagtataa

SEQ ID NO: 208153 - DNA, 237 bp, Klebsiella oxytoca
atgtcagtttactgtgtctcttatgacctgaatcaagcaggtcaaaactacaatgcactatatgatgagttaaaaaaatcgccggggtggtgccaccctttagattccacatggctaatatcaaccggagaaacagcgcaacagctgtcggatcgtttgcgtaagcatctggacaataatgacaccttgcttgtgattggtgtaaccaaagaatatgacctgctccccgttgattag

SEQ ID NO: 208154 - DNA, 1245 bp, Klebsiella oxytoca
atgagcatgttggcggtgtcatccgcgaaagacgacataaacttggctaacgtggtttcagtgagtgatgtgcggatactgaaatctgctctgatatttggggctaacgctagcgggaagtctaatctcatgaaaacaatttctttaatgaaagatattgttttgcattccgtgcaagctattgaaagtagcattacaaagaacgtaataccgtttttgcttgatgaggatggaccaaataaaccatctgaaatggaaatgacttttatttctgatggggtgaaatataggtatgggctgtctatttttcagggaaaaataaaagaagaatggttgtactatacaccaaaatcaagagaaaccattctctttgaaagagatggtctttctattgaggtaaataaggcggcttttagcgagtcaaacctttttatcaaagaagggattattcaaaaaacaagggaggatgttccatttgtttcggttgttgctggttttaatggtgagcattcaaaacgagtagttaattggtttaacaatatcgtattcctttctggttctaatgaagggatgtttacagcaattaccatgaagttaataaatgagtctgaggattttaaggcttggcttaaaaaaatacttccagtattccagattaatgatatttacctcgatgaggtcgctcctgattttccatttgggaatataaaaacagatgatgataatttaaaaaatttatttagttcaatacaaaactttgcaaagaaccagaaagttttttctcttagagtagtgaaaaaaacagctagcggtgagatttcagtacctattgattttgagtctgagggtactaaaaagatagtttatcttcttggtccaatctacaatgccatgataaacggtaacttattgttagttgatgagtttgattctaagtttcacacccttttgtctaagtttttgtttagaatatttcatgcgcaaagtgaggggcttagccaaataatagctgctgttcaggatgttaacctaatgaacactgattgttttagacgtgaccagatttggtttgttgataaagatataaaatcaggaagtagtcatctctattctttggttgagtataaagagaagcagcgaactttaaaatcatcgtatgggcatgattatttatctggtgcatttgatgctatcccattgtttgataatctagacgaatttgaaaaacttatgcctgagggatga

SEQ ID NO: 208155 - DNA, 201 bp, Klebsiella oxytoca
atgagcttaatcagaaaaatgacattacacacacacccgaggggaatcgaattagaaacagggagaaaaagggtaataagccaccgcgacgaaaataataaaagatggattattgaaatgacactaagagatccagaggaggagttaaaaaacaaaaaagaggaagaatataacgctaaacatataaaaaacaacagataa

SEQ ID NO: 208156 - DNA, 1479 bp, Klebsiella oxytoca
atgtcttatgggaataataaggcatacgcggcaaatgtcaacctgcccaaggtgccatttttgccagagtatgccaataaaaatggtgatcggttaaacgaaagaaaaggtaaaagtttaagacttgcaaagctctactatctgcaagcggaacgcttggaaggtgccaaagcggaagcaatgaagaaacgcgctgggcgtgttttcgggtgttccagccatatggagatggctattggctctggcggttatggttacaatttatacagccaccgttgcaaagatcggtcgtgcaccacttgccagagaatccgttgttttatactacaaagcaaaattagagaaattacaccgcaattaatagcacaaacaaacgcaaaagacggtttaatttttggcacgttaactataaaaaaccccctaataactgagcttaaagattatttaaaaataatgagtaaagcttttgctcgcttaatgcgccgcaaagaatttaataaaatagccgttggaggttttaggtgttttgaagtaacacgcggcgaatcaggcgcggatttttgccatccccacattcattttttattacaagttaaagcgtcatattttgcgcgtaattccactttatatattaatagcgacaaatgggcggaagcctggacagattgcttaaaattagaagtggaaaaaacagggcgcgtttttaatatttcagactatccaaatggtaaggcttttgtaaagattctacgcgtccaagcccctgattacacaagagaaaatcgaaaatacgcgaccgttgaaatgctacaaaatcaagatcagattgtgaattatgtcttgaaatatacagccaaagaggatgagggttcaaaaaaggcacttgttcaaaatgatgcttttttcttcgagtatgataaacaaataaaaaatatccgcgcaattgctttcttcggcgtctataaaaaattaatatcagaactaccgccaagagaatataacgaaaaggaaataagaaaggatttaaataataatcaggctaaattttatagcgtcatatgggatgacgatcataaatacattgctattgaaacgaccgaagaagaagctttaaacaagaaaagaacaaacacaataaatagcataaaaacaacgctaacagcacaacttgaaagcaaaaattatattttagatataatgatcgcggcaatgaagaaaggagattttttaacagtcaatgaagaaataaaaaatcataatatccttgccgaccgcacatataaaacatttaaaagaatggaaaaggcgggtgaattagtggaaagaaaaagcggattttatcagcctttccatgattacacttttaaatctgtaatttatgaaaaaatggaaagtattttgagtgcggaagaattggaaaatattaaaaaagaaattgaattaaatattgaggtaatagaagacaacccaccattttaa

SEQ ID NO: 208157 - DNA, 543 bp, Klebsiella oxytoca
atggataaattaaccctgttggatatgttcaaacacggaaccgctacatggtcagcggtttcgtctttcgtcgttgttttgttttggtgtgttggctgttggctgtcatttttggcgattgttaattataaaaacgccgcagatggcaaaagcggaatcgcaaagccaatcattcaaacagtgatcgccgctttgatggtggcaatttctcgatttatccccattctttcggacactttaaacaataaagcggcggaattttcacctcaaagccttttaagtgatattccgcaggatgggcttggtttaaatttagcatttacaagcgttttattatttgtgcaaatgttgggcacaattgccgtttttcgtggctttttgatgctgtgggaggcaacgaacaagggcgcaggtagtgggcttataggcaagagctggacgcacattataggtggcgttttagctgtaaacatacagcttacaatctcgacggtagccgctacgttttacccaggcgttgatctgtcgtttttgggtctttga

SEQ ID NO: 208158 - DNA, 297 bp, Klebsiella oxytoca
atgagcttacaacaacaaaaagagagattaaaaagagaactcgcggcattagagaaaaaagaaaaacacttaaaagatcaggcgaacgctaaaaacatgaaagcaattgcggcagaaattttaaaatatgatcttgaaggatacgacaattttaaaaaagtcgtcggtttgttagcatattttgattatcaagacgacgattttaaaaacggcttgatgaaatgggcggaaaacgaacttgaagaaagaaaagctaaaaaagtagcacgtacatttaaaaaaaaaccgcaaaaataa

SEQ ID NO: 208159 - DNA, 564 bp, Klebsiella oxytoca
atgaattacaacactttcaaaaataaatattataatgaaaatagcgattgtagcgcttattttcgcggagaatttaataaattcaataaatttaattatttgaatgagcaaaaaaatgaagaagataaattaaaaattaacactaatccaaatgttgactatttagctgattacttccacaaaacatatataaatagtttaattaacgagcgtctttttgcaaagcagagcaattttaaagagttagtttttgattattacgaagtaaacgcatttaaaaagcactttaaaaaatactttaaaacaataaaacaatataaaaaaaccaaggatatattaagtgacgctttcacttttagagcgccagatttgatgggttattcacacacgttttatttttgcgtggacaaaaaagaatttgataaaaatggaaatgattatttggaagatttgcagctatttttgagtgaagaaatagaaaagcaggtcgaaaaaatagaaaaagaaaaaaaggaagaagataaagaatttgaaagattaaagttaaaacttggtaaggcttaa

SEQ ID NO: 208160 - DNA, 1398 bp, Klebsiella oxytoca
atggctatacatgacgccgggatgtttaccgtgaaagaaatcaatcgcctcaaaatacttcaggatgtcattgaacgtaacctgcgtcctggccaagctgccgagatgctcggcatcacgccacgtcattgcagccgtctgctgaaacgttatcgtcagtccgggccgcttggtatgaataaccagagtcgcggtcgcactggcaaccgcctgttgcctgcgtcactaactgacgaggcactgagtatcatacgagaacgctaccgcgattttggccccacgctggcacgggaaaaactagaggaagttcacggtctgatcttgggcaaggaaaccatccggcgtctcatgataaaagccgggctctggattccccgtagacaacgtgcaccgaaaattcatcagccccgttaccggcggccatgtactggcgagctgatacaaattgatggctgtgaccatcactggtttgaaaaccggggtcggccatgtacggcactggtctatgtcgacgatgccaccagtcgtctgatgcacctgctgtttgtgaaatctgagtccacttttacctattttgaagcgacgcgcggctatatcgagaaatacggtaaacccatgatcctttacagcgataaagccagcgtattcagagtcaataataagcacgccaccacgggtcctggtgaaacccaatttgcccgagccatgcgctgcctcaatattaccccactatgcgcggagaccagtcaggcaaaggggcgcgttgaacgtgcccacctgacacttcaggaccggctagttaaggaactcaggctaaaaggaatcagtacgatagatgcagcaaatgcgtttgctgaagaatacatggccgattacaaccagcgatttgccaaagccccacgacatgactttaatgcgcaccggccactggcattaaccgatgatcttgatgcggaatttacctggcgtgagccccggcgggtttcaaaaaaccttactgtacagtacgataaggtgctttatctgattgaggacagcgaatacagccgacgggctatcgggaagtatatcgatgtctggcactatcctgacgggcataaggaactgcgcctgaatgatgtgctgctcccctattccacctatgatcggttgtcggaagttgaccccgtcgcgattgttgataataaaagactgggtcatgtgctggacgttgcccgccaggtccagaaaaaaagggataataatcgatcccagtcgataccttcaggagatgagccttcccgcagacggcatgctccgagcatcaacaaacctcagcgatcgctgaacgaagaagacctgcttgaagccatgatacagcttcagggtagctcggaggccatttttggtaaaaggtga

SEQ ID NO: 208161 - DNA, 447 bp, Klebsiella oxytoca; identical to SEQ ID NO: 81018

SEQ ID NO: 208162 - DNA, 2532 bp, Klebsiella oxytoca
atgatagatttcacaaataaacttaagaaaaaagaactcccaaagagaatcaaccctgttgaaatatatgagtcattagatagacgtagcgaagccggtccattacgcccttcccaaaaaagtattctcgaacaatggtttaacagtaggcgtgacgaaagagataatataattaagctacacactggggaaggtaaaacattaattggattgctaattttacagtctaaaatcaatgaaacaaatagtccttgcttgtatgtttgccctaatatttacttagcaaaacaagcagtcaaagatgcagaaaaatttggcatcccttattgtataattgatcatagtaaaatgataccggatgattttcttgccggaagaaaaatactaattactcacgttcaaaaattattcaatggaaaaactgcttttggcttaggtagcaaatcaattcatgttaattcaatcattttagatgactcacaagcatgcatcgactcaattaagaacagctttactattaaagtagataatgaaagcgctctttacaaatcaatgttaaatattttttctgatgaactacgcgaacaaggggaaggtagctatttagaaatggaaaatggagttggaaataacacattgcttccaataccatattggtcatggattgataaaaaagagttggtggcgcaagaattaattaaaaacattgaagataaaagagtgtctttcatttggcctttaataaaaaatgaaatacacaactgccaagcatttctatctggtgaatatttggaaatttcaccaatcttttcactaatagattcctttggtagcttcagtaaggctaaccatcgcttccttatgtccgctactacacaagatgattcattttttatcaaaggattaggctttgacgtcgaagcggttaaaaaacctttggtaaatcctgatcttgtctggtcaggagaaaaaatgattctaataccatcattaattgatgaaacattagaccgtgagaaaataataaactggttgcttcgtccatatgacaaacgagcatttggaacagtatgtttagcacctagctttgctaatataaaacaattccagcgaattggggctactgtggcaactacagagacaatttacgactgcattgaacagttaaaaagaggtgtattttccaattctatggtctttgctaaccgctacgatggcatagacttacctgataattcatgtcgtattttaattattgactctaagccatactctgaaactttaacagatagatatgaagaggaatgcaggccaagcagtgatatcattaatgtaaaaacagcccagcgtgttgaacaagggttaggccggagtgtgaggggcgaaaaagattatagcgttattataatcaccggtggcgatcttgttcaattcttaaaaagcccattaactacaaaatatttctctcctcaaaccagaatgcaaattgaaataggaagtcaaattgtaggttttgctaaagatgaaattgatgaaggtgcagaagctgataagttattcgccggattaattaataaatctttgcaacgtgatgaaggttggaaggagtactatgttgaaagcatgaatgaaattgatatccacgatagaaaagataatctttatgacctaatttcactagaatacaaagctgagaaattatttataaaaggtgatttagacaaagcatgtgatgtattgcaagatatttgcgatagacatgttgatgatgaaatggagaaaggctggtatcttcaacttcaagcgaggtataaatataacataagtaaaattgaatctaataaaattcaaaaatcagcatttcagcgaaactgtaatctactcaaacctaaagacggagttgtatataaaaaaattgacaatataaatgctaccagggtaaatagaataaataaatgggttagcgcacatactgattatcaatctcttatgatatccgttgatagcattttgcaaaacatttcctttggtgttcaatctgacaaatttgaagatgctatgcataacttggggtcctctattggatttgtttgccaacgaccggataaggaaatcaaaaagggtcctgataatctttggggggatgtagatggacagtatttcctctttgagtgtaaaaatgaagttgatgaaaaccgagctgaaattaataaaacagaagctggtcagatgaataaccactgtggctggttcgcagatgaatacggtaatgcaaagtgcaaaaaaatcataataataaatacaagaacactttcatatcagggtgatttcaatgatgaaatatttgttatgcgaaaatcaaaacttaaactattaaaagataatgtgagatcttttttcaaagagttcaaagactatgacttgcaatcgctggatgagaccattatccacagatttattaggccacataatttagatattgaaagtctaacttctatttacacagaatcaataatcaaggcaaaaaaataa

SEQ ID NO: 208163 - DNA, 234 bp, Klebsiella oxytoca; identical to SEQ ID NO: 81384

SEQ ID NO: 208164 - DNA, 228 bp, Klebsiella oxytoca; identical to SEQ ID NO: 81383

SEQ ID NO: 208165 - DNA, 423 bp, Klebsiella oxytoca; identical to SEQ ID NO: 81380

SEQ ID NO: 208166 - DNA, 951 bp, Klebsiella oxytoca
gtgctggatcatctgtcggtatctcgtgttgcgagccagcttgatgttgcatggcacaccgctaataatgccattatcaacgaaggacggcgcctgctttttaatgactcgacacgttttgacggtgtgaccgtgctgggcgtggatgagcatgtttggcgacatacacgctgtggtgacaagtacgtcaccatcgtggttgaccttacgcccgtgcgtaacaaaaacgggccggcccgcttgctcgatgtgctggaaggccgctccaaacaagcctttaagcaatggctacagagtcgccccaaatcgtggcgtgaccagatcgaaagcattgccatggacggttttacggggtttaaatctgcagcgcaagaagccctgcctcaagcccaaaccgtgctggatcctttccatgtcgtgcgctgggcaagcaacatgctggatgaatgccgccggcgtgtgcaacacgacatcctgggccgcagagggcgtaaaaatgacccgctctacaaaagccgtcgaacgctactgactcggatcagctacctgtctgacgccaacaaaaagcaactgttccagctgtttgcagatgagcaccacctcgaagtggattgcacctggagcatgtaccaacgggtggtcagcgcctacaacgagccggatcgaaaacgtggtaaaaaactcatggaagaggtcataaatatcattacagccagcgacttgcccaaagcgctcatcgaggtgaaaggcttgggggaaacgctgaaaaaatacgctgagagcatccttgcctacttcgaccggccaggaaccagcaacggtccaacagaagctatcaacgggcgacttgagcacttacgaggtaccgccttgggctttagaaatttaaccaattacatagccaggtgcttgctgaagtcaggagggtttagaaatcagctacacccttaa

SEQ ID NO: 208167 - DNA, 591 bp, Klebsiella oxytoca
atgaccccacagcagcgtcgtagacacaatggagctctatcagaggtggcagtggccgcacataaacgatatctggggcgccctgagctgcttaccggcattcagtccgcttggataaaatcgctgcttaccatgtggggggaaagcgtatgcggtggtacagcccccaggaagcctaccagccattcctgctggaagatgcagaagggcatgcgctggtcagacaaagcgttagagcgctttactgctgcgattgagcaggcaagagaggaggggtttagcgggcagcaggcattaaatcgggcgcatgcaattctatggccgaaagcatccagcagtgtaatagataccgccatccatgatgatgacgttgattttgttgagcaatccgtacttaaggcattcgattcaagcgatcccatctacgttgttggcgtgagctactacaccacccgaaagaaaatatccgatatcaccagagatctgcagcggttagccccctggctcacgtcagagcaggcaagggagcgcgttaaatggtgccttcagatattcagatcaaaggtatttttatcggcaagaactctctaa

SEQ ID NO: 208168 - DNA, 270 bp, Klebsiella oxytoca
atgcgaatgataaccaggaagaagccagccttcaccgagctgtatcaaaccggcgtattgacgcgcatcgccgcggtaaaaagccctgatggtggagggtggcggttgtttggtctttggcgcgataaggaaatcgcggtttttgtcgaggctgcgcgcggtggcgtcagggagtggtctggcctggactatctcgccagtttctgcgcaagttgcggaatcagtctgtgggagattcataacaaggtcgaacaaaagttaccaaattga

SEQ ID NO: 208169 - DNA, 396 bp, Klebsiella oxytoca
atggaaaaagatagcgacaacgtcatcactctggtgcagccaaagcgcgatgaagagaagctgctgaatatcactgtaaccgataaaaaggcttacgaggaacagcgctgtaagcacctgtcgattgaggttagcgaaaaggaacggaccgtgcattgcactcgctgcggctgtgctgtcaacccgtttaaccatctcctgcagtgcgccaccaacggcgaaacagtcgtgactgagatagcgcaacttcaccgccgccgtgatgagctacgtgaggctgtagccaatctggagcgcgaagagaagaacgcaaaggcccggttacgctcagccagaacgtcgatcctcttcgcggaaaacgacctgaaaaataccgagcaggggataaagcagtga

SEQ ID NO: 208170 - DNA, 531 bp, Klebsiella oxytoca
atgaccagcaaaattagcatcgacaacagagaattgcttcaaaaaatcagtatcggagaagctgctgctgggattgattttggcaatgcaattgtccgcgaactggctgcattcaggctggccgcaatggacagcgagccggtgtatcagtatcaatcaggcgtatataacgatgataacggcgaaacggactggtattgggacgactgtgacaaaggattctatgagcagtacgcccatgaccggcgcaggattctctatcgccacgcgcagccggtagtgccggatgatgtgcagcgggatgctaaacgttggcgcgcattgctgggaagtgcccgcatccgaattcttggttcggctggattcgatgcaacagcgcaccctggcgaaaatcctgattatcgacattttggcatggaaatctggacgcattatcccaactggttgcacgagaagaacgagtacggaattgacacactgaagcaatatgctgacgccatgctcgcagccgccccgcaggaggtgaagtga

SEQ ID NO: 208171 - DNA, 606 bp, Klebsiella oxytoca
atgacaactgatatcaccgaactggcgcagagagagaaattcgaggcttggtttaagtcgtcatttcatcccgacaaaacagggccatacatcaaagaccaactgtatttctcctggaaagcggctagtgccgagctggtagaggcgctggagaaggcgcaggaggatggcaacgaatatgcagcgagtgagcgggcggtagtcgttaagaacgttgcgctgcaagatgaaatttatgggcttaaggtgcgcatcgccgagctggagtcccgcaccgtcaccgccgcctctgcagatgtactggcagagcgccagagacaggtaacggcagaaggatggagttctaagcatgatgatcaatataaaaacaccgaactggcttttgctgcgtcctgctatgcgttccatgccgccgctgcgtcatgggatttggaagatgatggcattccgtacgatagccatcccgtaccaaagcaatggccatgggacccatcgtggtggaagcctacggacgctcgccgcgatctggttaaggctggcgcgttaattttagccgaaattgagcgtatcgaccgcgccgctggcatcaagtgggaggctgagtag

SEQ ID NO: 208172 - DNA, 420 bp, Klebsiella oxytoca
atgaatattgaaccagaaatcgagctcatagcctctctggaaagcgcaggcgagctgtcaatcaaggagcggaggtatctgaagctggctaaggcgtatttgcagctggctgcggagaatgtggggctgaaggctgcaattagtgcagtaaacaggacagcggaagagtgtgagcttaacggcgacgaattgaaatatgttgtcgagccgtcagagtttgaggcgttgactgatttgctggacgaaaccccctccaccgacgcttatatggccgggattaaggctgatggggtggaggagtttgcaaagcattgcgatgaaagcattggatttgtcgagccagaaggcgaggagctttacacgttgatggaagaacaggctcgtgacttcgccaagcagctgcgcgagggggccaaatga

SEQ ID NO: 208173 - DNA, 786 bp, Klebsiella oxytoca
atggctaagaactcaatcgacgcttacggcgccagcggtaaaacgaacgtcctgatgttcgagcccgaaaatctgcacctggtaacggataaagcgcatccgctttatgacgaacgtattcacctgccgattaacgaggcgatggtgttgaacatcatggatcagggtgtgcttgagccgattatcgtctggaaggacccagaaagcgggcttgcctgcgtggttgatggccgccagcgcgtgcgtcacaccctggaagccaataagcgtctggtgaaatcgggtgaatccgcgctgctggttccagcagttactaaacgtggctctgccgttcgtatggcgcaggcgatggtcagcgctaacgaaatccgccaggcggacaccccattgggccgggcgaaaaaaatggccgatgcgctggaacgtgggcacgacgaacaggacctttccctgatgttcggcgtcagtgttcagaccgttcgcgcaaccctgtccttgctcgatgccacccaggccgtaaaagacgccgtagagtccggcacagtgaccgttacacaggcgcgtcaacttgcatcactaaaacccgaagaacagcgagaaaaagtggcagaaatcgaagcggcgaccgccggcactaccggccacgaaaaagcacggcgtcaacgtcaggtgctcggcgataagaaaccacgcattaaaacccgcaaagaaataaccaaagccctcgagggcgccagtggagattacgctgatgctctgcgctgggttttaggggaggctgtatga

SEQ ID NO: 208174 - DNA, 213 bp, Klebsiella oxytoca
atgattttaccgaagtgcccgaagtgcggggcggcacccgaatttcactggaagaatttcacgttcggatcgtgctctggtgccctgaaatgcccgtatgaccattatcgcgttcagcatagctactgggcgggcagcaaagtaaaagcgaagcaagcgctggaagaaaaatgggtagcggcggtgaataacagcgaggttaaaaatggctaa

SEQ ID NO: 208175 - DNA, 390 bp, Klebsiella oxytoca
atggaaaaaatcactgacgtactgaatgagctgggaaaggtgacgtgtcgcgacctggctggatattttgacctgcagccgcctgaaatgctggcacgcctgctggtgctggagcgtgaaggcagggcgaaaaacctgaacggttactggatggctggtggttcggtagcaccgcaaacctacaacctgactgcgctggacatgaaattactccactcagtgcctgtaggagtgtggttcgagtggcaatcactggccggcactatcgatcgtccgcattaccgctgcgggcgcttgcaggaggctggcttcctgagttcaaaaataatcaacccggaaaatccttaccacagcattcggttctgcaagctgcgtgaggtatcccaatga

SEQ ID NO: 208176 - DNA, 318 bp, Klebsiella oxytoca
atgaaaaagaaatctcagaaaactcaatatcgcaatgaaattacggcgctcgaattcctccgggcaaaccctgatttgaccacgcgtgaaatcgccagcgctctggatcgcggtatggcgtcagtgaatgggcagcttcgacagctgcatggggcagggcagatagtccaaaacgggcttcgcaatggcgtgatcatctggcgtgtaaacgatatgccgtttggatgtggtagccaggtgcgcctgatgttcgagggcttgctgaaacagtgtcgcgaaatgtccgcgcatccaaaaacgcagcacaacgcattttaa

SEQ ID NO: 208177 - DNA, 255 bp, Klebsiella oxytoca
atgtgcaacccgtctgcagctgaattgatcgcccgcctgaaaagggcttacccagcctatacgccgtccgaaggtgacagtgcatcgaatggtatccctaaagcgggagcgcggtttaagcacagacgcaggggccatatggtgacggtaatcaacgctactgagaaagacgtttcataccgggcagcgtgcgggacagcgtgctggatggggttacgtgagtttttacggaaatacaatgaggtttcggtatga

SEQ ID NO: 208178 - DNA, 426 bp, Klebsiella oxytoca
atgaaaatcaggcatgagcttattcgcgaggctctgaatgcctgggcgctttatcctggcggccgtaaaacgcctaccgctgcgattgttgatgcgtatttctcaatgggtatgaaactccctgggttgtacgacaacagccaccctgacgcgctgagccgcaatatccagaagattttccgctggcttgaaagtgactcgcccgcatccgtcgaaaaaattagccaacttctgccggccattgaacgggccatgccgccgttactgctggcgcggatgcgtagttattactctgcgacgttccgcgagttgctgcagcgcaagcagcgggtagatgacgaaatggaggcgttgttcggcgcaatgattgctatgtctggccggattgctggtggtggtccgtccggtaacacgctgacccactaa

SEQ ID NO: 208179 - DNA, 180 bp, Klebsiella oxytoca
atggataaggcatacgaagaatactttgaagctctctctgaaggtgaagaagcccttagctatgccgagtttgtcaaggcgctttcgccagccaacaacccggatgtgaagtttaacggcatggttactgatgagcatggcgaagaactggcggagttttccggggtatacgttttttaa

SEQ ID NO: 208180 - DNA, 294 bp, Klebsiella oxytoca
atggctagcttacagattaataatccgcagcttcaggcagcacaaagcaagctcgctattgctcaatttattggtgatggaagtatgtgggaacaagccatgtcatcactgaagagcgcctacgaagcaaaaaagcatgccgaagactgcatgtttccgggtcacataaacttattatcacgccttgaactctgggatgcagtcttaaatcatgaggcttacggtgatttactttctgtcgatggtgaccttcttactgctcaatataaaataaacaccgaagtctcttattaa

SEQ ID NO: 208181 - DNA, 225 bp, Klebsiella oxytoca
atgaaaatagaattcaatgataagggcgcaactgcgaccgcaactatcaccagcacggtattcgagttccggcgccataatcgcgcagtcgaaacaacgttattcctggcccctggcgttcgtgccagcagaaccggcttctttatcttaaaaacggtgatatctggtaaagcatctcatgtcctacgtgcgtttaagacgcttcaatgggaggcatctcgatga

SEQ ID NO: 208182 - DNA, 711 bp, Klebsiella oxytoca
atgaaagaacgcggaatgatttttaacggggatatggtgcgggcgctcctggatggtcggaagacgcagacgcgccgccccatcaaatggaggcagactcgtgctactgaaatcgctgagcgtgaagacggtagtaaatggccctggagcgaagatgcagagaacgtatgcgattactggcatccgtgcccgttcggtgctgttggtgatcgcatctgggtgcgcgagacgtgggcaatcctgggtaacgaagatggctgctgtatcgactgggaagaaaaactttgcaaagcggatgaacgctcagcggcgaggatttaccgcgctagctgcgagcagagaccaggtaattacggcctgtggtctattcctgatgatgccgactggaagccccacaccaaagactaccagtacgaaggtgcatggcgaccatctatccacatgccgcgctgggccagccgcatcacgctggaaatcaccgatgtgcgcgtggagcgattgaacagtatcagccagtcagacgctattgcagaaggcgcacctccgagccaccgatccattgatgctgtatcacagcagtttggttacccagatttttcacgttcgtggttcgggcagacctggggacacatctacggcgacgaaagctggcaggctaacccatgggtttgggttatcgagttcaaacgcgctgaaggcggtgcagcgtga

SEQ ID NO: 208183 - DNA, 1272 bp, Klebsiella oxytoca
atgtctcttaccgataccaaaatccgcagtcttaaaccatctgataaaccctttaaagtttccgattcccacggtctgtatctcctggtcaaacctggcggttcacgtcactggtatctcaagtaccgtattaagggtaaagaatcccgtattgcactcggtgcctacccagtcatctccctctcagacgcccgtagtcaacgtgaaggtattcgcaaaatgctggtactgaacatcaatccagcagagcagcgagcagctgaacgcagttctcgtataccaaagaaagtgtttaaaaacgtggcactggcgtggcataagagcaataaaaaatggtcacagaacaccgccgaccgtctgctctccagcatgaataatcatatattcccggtcattggtacgatgtcagtttcagaactgaaaccccgtcacttcatcactttattaaaaggaattgaggaaaagggtctactggaagttgcatcccgtacacgccagcacctccggaatatcatgcgctacgccgtgcatcatggattaatcgattttaatccggcagcaaacttggacggagtgacggctccgccagtaaaacgtcactaccccgctctaccgctggagcgtcttccagaattgcttgagagcattgagagttttcagcagtgccgtgaactcacccgccttgccatcctgctaacactgcatctattcattcgctcgagtgaattgcgttttgcccgctggcatgaaattgatttcggaaaccaggtctggataatacccgccacgcgcgaaactattgaaggcgtgcgttactctggtcgtggtgccaaaatgcgcaggcctcatatcgtacctctctcacaacaatcgatcgcgatcctgaaaaagattaaagatatctcaggagataatgcactcgtgttccccggggaccataacccgtataaaccgatgtgtgaaaatacagtaaacaaggcgctgcgcctgatgggctgggacacgaaagtggaaatctgcggtcacggtttcaggacaatggcatgcagcgcccttatggagtccagtatatggtcacaggatgctgttgaacggcaaatgagccaccaggaacgtaactccgtgcgccaagcatatattcacagggcagagcatctggaagccagaaaggcaatgatgcagtggtggtcggattatctggatacttgccgcaaatcctatgtaccgccctacatactggggagaggaaaaacgacgcttctagctggctag

SEQ ID NO: 208184 - DNA, 756 bp, Klebsiella oxytoca
atgatcgaagtgaataatctgacgttcgcgttcaaaaagagtaaaaccgcctttaacaatatcagcttctccattgatgaaggtgaagtactgtgcgtactaggaccgaatggtgttggtaaaacaacattgcttaaaacggttaccggtctgtatcagccggttagtggttcatgtcatattggccgagtgggaaaccggaaagctcatatggcgtatgttccgcaggccaaacgtgttcacttttcttacaacgtactcgatttcatctcctttggatgcccgttacggggcggaatgctggcagctcctggagagagggatatcgaaaaagcggcgcaaatattgtcgggtcttggtgcttcatatcttgcaaccaaagatgttaaccagatcagtggtggtgaactacagatgtgttatatcgcgaaggcgctggtatcagagccggacatccttgtacttgatgaacctgaatcaaatcttgattttaataaccagtctctcattatcaattggttgcacacgttgtcgcgggagaaaaatgttactattatcctgaatacgcacttcatcaatcatgcaaataacattgcagataaatgtttgctaatgggcaaagatagttactgttttggaactacacagagtgtcttacaagaatctctcctcgccgattatttccacgtccccgttaaacgttgtcattttgaacacaacggaatacagaaagaatcatttattgttgcattgtga

SEQ ID NO: 208185 - DNA, 1014 bp, Klebsiella oxytoca
atgcaggaaagaaaaaaataccgcatgctaatgtggatttcaatcgtattgttactgattgtggctatgatttctttgttcataggccgctatacattatctttccccgaaataatgacggaggtattacatgataatggtcgccgttgtttgagcgcaggattctcggttatatgcaatctacggttgccaaggattattgccgtcatgatggtaggggcagggctatcagtagcaggcgtgacgtatcaagcggtgttgcgaaatgcgctggcgagcccggatgtgcttggtacatcttccgccgcagcgttcggcgcagcgctcgggatattgctaggttttccactacaactcagcgctttttcctctttcttctttggcattgtcagccttttatgtgtgatgggactttgccatttcaagaaaaacaatggggagctcacgactatcctgtcgggcatcatagtggcttcggtgtttatgtcatttgtatcaatcattaaatatgttgctgatccacaggacgagctcccggctatcgtcttctggcttatggggagtttcgcttctttggtcaaagagcaggtttacggactcatcccgctatacatcatttgttatctggttatctataaacttcgatggaaaatcaatgtgttgtctctgagaaatgatgaggccaaaattgctggaatgaatccacaattgttgaatgcagttttgctaatcatagcctcaattttggtggcagcatcagtcaccatcgctggcgtggtgggctgggttggtctggttatcccgcatctggttagaacgctggtcgggtacaaccatagcaagctgatcccggcttcggctgtatgtggtgcgttgtttttattggtcatcgacaaccttgccaggaccctgacttacgcagagatccccattggaatacttactgctctggttggtgcgcctttatttgctgtactgttcatcatgagtaaccgatatgatcgaagtgaataa

SEQ ID NO: 208186 - DNA, 1080 bp, Klebsiella oxytoca
atgcttaatggaaaaatattatgctcattattcatatcatcgataatattattatcaacgtcaagctatgccaatagtagtgaggtgagtaagacgataaatgaccaaaatatgaaaaatattgaagaaatacccataaaattcaaccgtattattatcaccggtaattgcccctttggtgtaattatggcaaatgatttggcatataaacatgttgtgggcgtaggaccttgggcttttctgcattcaaacatgaaaattctcaaggatatgaagccagatatcgaccgtatcactactgactttattaataaagactatgttgtaaatatggaatccttactaaatttacaaccagatattatttactattatggtaaaagtcagaatgataatctggagcgggcagggatccccactattaatcttgatgctggtggtgacacgaaatttgagccagtagtaacgcaaacgtattgggaaaacgaatttaaccagacgcttggtttacctcacagtcacaaattttcggatgcatggaagagaagcctcaatgaggcaaaaccctatgccgagaagatcaaatcacaacatattcgggcattgtatcttgagcagagtgatgggaaagagctcaaggtgagtgggccgaaaacatatggtgatacctatcttaagatggcggggatggaaaatgtagcaagtgatctggtggtaaaaggggatgctggcaggtacattaatgtttcaatggagcaaataattcagtgggatcccgatgttgtatttgtggtctttggtagcgcgaaggatattcttaataataaaaatcccgggcaagactggcataatgtaaaagcattcaaggatgggaaagtattttctacacccgtagggctacataattggggaggattgtctgctgagactgcgctattaccattgtttatgattaataaatttaaccctgactatataacagatgcaaaattgaaagttgcaacgcggttacactataaaaaagtgtttgattatgaaattccggacgcgctattaaccgatgagttaagacagcggtaa

SEQ ID NO: 208187 - DNA, 1383 bp, Klebsiella oxytoca
atgtcaactgaacatatcaaagaagaaaaactcaacattggtgccgtgctggctgtatcacttagtacagtgattgcgatgctggacagcactatcgcaaatgttgccttacctgttattggcaaagattttgccgtctcagaagctgcatccatcctgataatcaatgcttaccagtttgctgtggtcgcttcattgctggtattcgctgcattgggaggcaaaataggtaacaaacgtatttttattcttggggtgattttttttgcgctttcctcgttaggctgtgcactttctgaaacactgatgatgcttacggcttttcgcgtcattcagggctttggggctgcggccattctaagtgtgaatgcggtgctgattaaagagatctatcctgcccggttgttaggtcgtggattggggattaatgtaatggtggtctctgtttccgcagcggcgggcccgtcaattgcttcaactattctatcagttgcgaactggaactggttgttttctattaatgtaccgatcgcttgtatttcattgctactctgtattttatcgttcaaaccgacgcaacgtaccgaaaaccggtttgataaagcgggtgcgttgttggttttcctgacgttcgcttcgttttcaacgatgatgctgggtctggcgaggaacaaagtgttagacgttatcccaagctcgattattcttgtcgtgctggcagtcactttgtatctgaatcaaaaaagaaaggttactgatgctttgatcccggttgcgatatttcgcaacaggacattttctctgtcgttattaatgtctttgttatcatatagtacgcagttactggcatatgtctccttaccattttattttcataatgtattaaaccgcaatgtcgttgaaattggcatgctgttaacggcatggccgctggcgacaatgttgacgtcattggtcgcgggtgaactaatcaaaaagttcgagcccaacctggtagcatttaccggactattactacttttgataggcactcttttaatgacatggctgccggtacaaccctcgaacctgcagatcctctggcggatcgctatttgtggttttggttttggactattccagtcccctaataattttctcattatgacttcggtcccacatgaaaatagcggtattgccagcggattattaggcagttcacgcctgattgggcagattattggttctgtgctggtggcgtttttctttaataactttgggcgtaatgtaacaaatattagtcttttcgccggagcattgttctcatttatgtctctggcggtgagttatctccgctataaatctgcttctcatgacgttggttttgttaagaaagtaacgtaa

SEQ ID NO: 208188 - DNA, 837 bp, Klebsiella oxytoca
ttgaacaccaacattacccggcgaaaacttattcttactggtttagcggccctcgcagccaatacactggctataccgctgacatatgcacatatgcgacctcagctaagtcataagcattcctcccacccaacaaatgggcgtagcaaatttacgataatgctagatcctggacacggggggattgattccggcgcagtgggttgtgaaggatcgctggaaaaacatgtagtactggatattacctctaagataaaagccattctcaatagccacggtattaatgcactacagacgcgatcggatgacacatttattccactatacgatcgcgtacagattgcccatgcacacaaagccgatctatttatgtccattcacgccgatggtttcgcaagtcctgcagcccatggagcatccgtttttgcactttcaacacggggagccagcagtgctatggcaaggtatctatccaaaagtgagaatgctgctgataatattgctggaaaacaaatcattcacagagacaagtatctcgacaaaatcatcttcgatctggaacagactgaaaccatcagggaaagtcttttactgggatcacatttagttcaccacatttctcctgtccaccatatgcattcaaaccatacagaacaggcagcctttgccgtacttaaatcaccctatatcccatctgtcctggttgaaacatcttttatcaccaacccacaggaggagaaattattaggcacaacggcattccgcaataaaattgcatccgccatttctaatggcatcatcagttattttagccacaaacaaaacgctttagcataa

SEQ ID NO: 208189 - DNA, 1041 bp, Klebsiella oxytoca
atgacattgcattacctacgctattattttatatcaatcacactactcttctcaccgtactcatttgcggtcaacgttctgaatcaggacggtaaaaatctcgatttttatggcactatcattgcgagacgttttaccagtaataacatcaaagatgatggcgatcgtagctatctctattttgggttgattgggaagcatgaccttacccacaactggcaaacctatgctcactgggaatatacggttagtgcatcagatgcgagcagaaatgcaacccggctggcgtttctgggtgtagacaacccgtactggggaagcctggatatcggtcggaactggggggtactgtacgatgtgacctcaataaccgaccgctctcccttattcagggaaatgtcctataactacattgacaacttcatgcgtggccgagcccttaatcttgtgacgtggcgcaaaaatttttcggtctttcaacagactgtgaaattagcgatgcaataccagttcaaaagtaacaacgaaaatcgagccttaagacaacagaacggcaagggtattggtacttccctgtcctggttctttacgccaaatctcagtgcaatttttgctgcgtcatcttccgagaccacattttcacagcaacaaaatgccggttacaaaaaaaatattcggactttcgcagaggggctcaagtaccagagcaaaaaactttatctggccactgttttcacgcagagtaataatactatcaacccccaacctcgcaataataataccaacgccttcagctatgaagccctggctaaatatatgctgaccgacaaatttcagcccagcattggttacactcacctgacgcaaacaatcgctggccaacgaacccgagtactggattatgaagaaataggctttagctactacttcaacaaaaatatgcagatatttttagactataaatttaataacatcagaaatagccctgccgggattgactgtgcagataaacttgatacagggataagttatcactggtga

SEQ ID NO: 208190 - DNA, 921 bp, Klebsiella oxytoca
atgtcctggaatagcaatctcaagcttatggcaaaaaactggttaacaatacacgaagctgtgcaagtgattaatgagacattcgacacttcaattacagaaagtacaatataccgctgtgcactttatggacaaatcaatctatccatttacttccagtctccggtgacattacgaaaaataactaaaaatggagaaaaagtaaaaatatctattttggataattcagaactaaagagactctgctttcttgataagcagtgtttcataaataataggaaccttatcatatctactgaaggagattacttttcatctcgcagaaatatttttgatactaacttatttggatttgaatacattatcattcaaaggtatctagcagactccctcagaataccactgcctattaacaatcctgacaccattaattttggaatcactgttacgagtgcaaatgatctatttttgcttttcaataaaatatcatggaacgaacaaattcagagcaagataaaatacttacaggatgaaaccacctctataattaaagagtctaccttgcggaatgaaaagcgggactatgcggatccatgctactttccaatgcatgacttgccacaagatgcttgtttcgttatcaaatgtgttgaaattgagagattaatagaaaagctaaccagtgacaaaaacctcaagttatctccgacgagaatatctacgcccttatctcggctgttctggctagcctgtcatcataatgaagatatacgccctctggtgaaacaaccttacaaactcttgtctatatttgaggaatgggcaatctctgatggtatcaccgatcatctcagcggtgatacgctaaaaacggcgctagagcgtggctcccctttatcgtttaaaactacggcgaagtag

SEQ ID NO: 208191 - DNA, 186 bp, Klebsiella oxytoca
atgccatctcatcaattattacgcctcagacaagtcgagcaaaaaacaggtcttaaacgttcacaaatctatctatatatgaaagacaagcgtttcccactctcaataaaaatcggcccagctagcgtagcctggctcgagtcggagattgacgaatggattaatcgtaaattagctaaccgctaa

SEQ ID NO: 208192 - DNA, 573 bp, Klebsiella oxytoca
atgtttccctcgctgaattattacgtactcacggatgtaatatatgcattgaaggaaggtgacttgtcttacgctgaaacacttggatttactcttgaagaaattaacgaaatcagtcagttaccctttgatgcattattttctttctgccactctcccgtatcatttattgcggtaaaaattcaccatgacattttacgtaaacggctggcaaaagtacgtactgaaacccagtatcatcagcaaattaatcgggcgatccggttaggtggatctatagcattactaaagcattatttcggtcttacttctaacgatgtctgtctcaaccgcagattacagggcatatctgtaccgtatgggcgcacacctcttcctgatgaaaccatggatgccgcaatatggtgccgatggaaagcgttaaaaggaaaaagccctgatgctaatgaagctcttaatatcatgatgcagatcaccgaagaattagcctcggagcccaatcccccctcactcactgttgtctgtaaccgaatcacattttgcgagcagggaaggacagacaggaggacatga

SEQ ID NO: 208193 - DNA, 210 bp, Klebsiella oxytoca
atgcctgacgaagttgatcgcgaccaggaattcaatgagcaacgtctggaggaaatgattgagcaaagccgtttcaaacctgcagcaacgccttccctgtatcactgtcagttctgcggtagatcaattcctgaaaaacggaggctcactctgccgggagtaacaacgtgtagagaatgccaggaaatgctggaacgatgtaaacgctaa

SEQ ID NO: 208194 - DNA, 708 bp, Klebsiella oxytoca
atgctttccacatctgcctttctggcggtggccatgcagtgtgccgccagcattcatccgtccacagcactcgacgtcgtaagggtggagtccaattttaacccttatgcgatcgcagaaattatcccaaggggctcaggcaccttcaatcacaataaaatcatttctcatcagcccaccagccgggaaagagcagagcgaatcatacgtcgccttgtggcacagagccgccgttactctgtggggctaatgcaaattaccagcaccaatttccatcattacggtgtgacagcctctgacctgcttgatccctgtaccaatttgtctgttttcgaatacatcctcaacgactgttaccgacgcggcggctcgctgaaaagagcactgagctgctactactccggcaatttccgtaccggagaacagccggaagcggctttttccggaaccagctatgtgcaacggattggttacgctgcagctccccactatgccgtacccggaacccacgaggataaattgacatccccgccgttcctgaagcctacgcctgcaggtgaccagttacgtccctgcgtgatctggccgaagggcgtggttcgtggcgtccccccaaaattccgccagaagaaaattgccctcgaaaagatctctacgccgtcattgcgccggagcctctccctgtcaccccgtgaggagaaagaataa

SEQ ID NO: 208195 - DNA, 294 bp, Klebsiella oxytoca
atgacactttgccgcatacttaaggccgctttcagtcctgtttccgcatttgcactcatcgtctgttctgtacccccggtttttgccgacggctttcaacgcgcaaataccgtgatggaaaaagtcgccaccggccttaatggtctggcagccatcaccattaccgtggccgtgatctgggtaggttacaagacactctggaaaggcgaaagcctgtcccagtgcgcctacatcatcattggcggcatcctgattggtggaggcagtgaaatcggcgcactgctgatgagctga

SEQ ID NO: 208196 - DNA, 705 bp, Klebsiella oxytoca
atgaaacggcgttttcaagcattaattattgcgtgtgcgatcctcagcccgatggcacacgcaggtatccctgttctggtggatgctgacccactacgtgagctcgaatggctgaaagaggcacaacgctggatacagacagcgcagcattatgagagccaaattcaggcatataaagaccagttagcaacggccaccggtgtacggaatattgttgatttcgttgatcaggcgaagagtcttaaatcagatctggaaaaactgcgtaagccgggtcagacactcaacgacctgctactttctggtggcatcgccgggcagttcgatgcgctatacgcaaagtaccgggttttcgatacgtgcaacgcggcgcagtccggaagctatgccgatatctgcaaacaacaggttatcaataaggcaattcagtttgagcagacagacgagatccaggatcaggtcagccagacattgggtgaaatcaataatctttcaaaccggattgcactctctaaagactcaaaggagtcgcaggaccttgccaacagtattcagttgaaatcagtgatgctgaacacgctcactgatcaatgggaaatgagtgtgaaggcggcagaaaaacgcgggaaagtgctggaggatgagcgtctcaaacagtggaaccagcagcagttaactgcaccaacctccgatttaaaccgttaa

SEQ ID NO: 208197 - DNA, 228 bp, Klebsiella oxytoca
atgcgtttattaaccctttcgttcctgtccattttattcctcatcatttgcggctgcagagacgacaccaaaactacccagtggtacaaagatcatcccgatgagctgaaaacagtatatgaaaaatgcctgaaaaccggcgatgcctctgaaaactgtaaaaatgccaatgaagctcattttcagattcaacagttaaatgcccccactcccaacctgaattcatag

SEQ ID NO: 208198 - DNA, 138 bp, Klebsiella oxytoca
atgaaacgcttgattgcgctgattttactgtgcgcgctttacggctgtgcgcagtctccccatcccctggcctttagtgggcatggcatcccggtaaacacgcctcagatgatggcggagttaaacaatcatgagtga

SEQ ID NO: 208199 - DNA, 684 bp, Klebsiella oxytoca
atgagtgaacagtcaatcattgcggattcccgtaactttgagcagaaaatgattgagcgggacaaacgcgccacgaaggccgggtttatggttggcggcgcgggcttactcattgccatactggcactcacaattgtggtgctgctattaccgctgaaacagacagttattgaactgtacgctgtagataatcataccggacgggtggagcacgtcacccgagcgtcaaaaacgagtctgacagcggaagaagcttatcaaaaggcgatgacctcaagttacgtcagagtgcgtgaacgttacatttaccctgccctacaggacgattattcaacggtacaggtttataacagccctcaggttaatgatgattatctggcactttatgcaggaaaagacgccccggataaggtgtaccagaatgaggcccacaccgtacatatcgacatcctgtctaatcagatcaccgaaggcactgcccccgataaagtcgccaccctccgttacaaaaaaactatccgccgcctcgctgatagcagtacgcgtacagaatactgggatgcccacctgacattccactccgacccaagtaagaaaatgagcgatacagagcgggaagttaacccgttcggttttacggtgaccagttggcaggcagatcgtgaaatcagaggagttgaataa

SEQ ID NO: 208200 - DNA, 900 bp, Klebsiella oxytoca
atgaaaattatcatccttttcgcactggcgatgtgcggtatagcctggggtgctgcaataccacaagcaagccgctacgacgcccgtctccagcaggttgtctataacccgtttaacgtcactgtcgtcaatacccgacccggtttcgtaaccacgctcatctttgacaatgacgaagcggttatcagtgctaaaccaggttttgaggacgcatgggaagccacaacagacgcaaaccgggtcagtatccgcccggtagccctgattcagggtgcccccggagtggacggtaatacaacgcaggtggtcattccccccaacagtcacgactggcataccaacatgctaatcgttaccactcggcggctgtataacgtcgagctaaacgtcatcgatgaaaaatcatcgcagcagcctgcttttcaggtgagttatcgctatcccgatgaagcacacgaaaaagcgggccgtgaagtcacaaccaaagcgcgggaacgggagcagaaacaacagcaggccgatatccagcaggctcttaacgccgcgcagacgccacgaaactgggactatctcaaatatccggggagcaatagcacacgtatcgttccggacttcgcctatgacgatggtcgctttacgttcgtgggcttctccccagccaaatccattccctctttgacaaaagagctaaacggccaggagcatgtggttaacagcagtgtccgcaggaaaggcaacttcaccgtactggttattcaggaggttaccccccgtctggtcctgcgttccggtggcgctgtggtcggcctggaaaatcgtggtttcggcagggttcaggtcgcagatggtgccacagtctccccgcaagttgagcgagtggaaaaaaccgcaacccattag

SEQ ID NO: 208201 - DNA, 1251 bp, Klebsiella oxytoca
atgaatgacgaacatctgcatcctgtgccagatgaatcccgatcctgtccgacacagaaggatgatgatattgctgcgcttgagcgcgaggcccgcgcaaagcgtgaagctgtgcttcacacctggcaggatgatgacaataacgatcccatacagccggctgtcaataaactgaaaaagcgccagcaggggaaagccaccgcttttctggcattcgctgccgttgccctgattgcactggcgtgggggggtaactggatataccacaatcttctttggcagccaggtgaagaaaagcctcaggaaactgtggccccggcagatcggaccgattctcgacagcgtaccgatctgggtacgcactatatcgacgcgaaaacaccagaaccggcggacaacaaccctggtattacgacacccaacggatcggaggctctgtccgacttagataaagcccgttttctggtgcgccgggagggttcaggttcagcggtacgaaatccggtacggacccggcatcaggaaatgacgcaggtatcctcagccaagcagccgtcagggacacaatcttctgataccggtcagccgctaaacacctcgtcgccacagccggaacagtccccgacagcggtccggcgaattccttataatcccgatctgtacgtgccggaaaataccgctattccctgctcactggattaccgttttgtctcagatcgggctggaaaaatccgctgcacgatcgccgaagacatctggagcgccagcggtaatacaaagctgatagaaaaagggaccaccgccacggggatgtaccagactggcgcagaaacaggaatgacgcatggacagggacgcgcattcatcgtcatcacgaaactgcgtacccgccagccccctttccttgatattccgctggtcgatacgaatgctgccggagaactgggcgaggctggcgttgatggctggatagactcgcatttcaaggagcgatttggaggagcattgctagtcggtatgatccctgatattggcgcatgggcatccaacagcgccggtcagaaagatcggaataccgactatacagaaaacagccgtcaggctatggcggatatggcacgtaccacgctggaaaacaacattaatatcccaccgactctctacaaaaatcagggtgaaatcatcaacctggtcacagggcaggatattgatttttcaggcatctacacgctgaggatgaagagtgaataa

SEQ ID NO: 208202 - DNA, 387 bp, Klebsiella oxytoca
gtgaataatcgaaagtttttgtttggtgtcacggcgacagacatcatcataagggacgatttcagcaatgctgtcgtcaacgacttactgtcacaccttaccggaatcagaagaatagtcatgacatgctatcgtgcaagcggcgcattagcagagctcagtattggctcaggtgaaggacaaacgttctgtatcaccatcagtgaaggccctttagatgcaccgccgttttccccggacgatatccggctggcacataagcagatatcgctgcctgacgtcaccgatatactcattcttgtaacgacattagcccgctacgccgggctttccccctccgtctccaccgatgaagattcatcttccctgctggagttcagctcgtag

SEQ ID NO: 208203 - DNA, 303 bp, Klebsiella oxytoca
atgaaatacgtcaccactgcgacggtaatgctgtgcattgccattgtgccccctgtttactgtttcgccgcggacccatgcgaagtcgtgctttgtatgtatgggaaagcgatcggaaacagtggagggagtgagtgcaattcagctgaaaaaactttctttaatatcgtcaaaaagaataaacacggatttttacccgatcatacactgaatgccagaaaagctttcctcggagaatgtgccagtgccgacccggaggcggtgaataaaatcctgtccagatttggcaggctcagaggataa

SEQ ID NO: 208204 - DNA, 306 bp, Klebsiella oxytoca
atggataaagaaaacctttttatttccaacatccactcaatgcatcatgacagaatatctgtcggagccgtatacagaaagctctctaaggaagcgagtcagggatgtggcctttactatgagatctatgaaagtagactgatcagtttattgcgacatcatctttcgcgtcttaatgaacaggatgctgacagactcagacgatacgccgaaaatcagggaacgaaagtcgataatgaaacctaccgggaggtattaaaagctgaacaggaatgccgggctgaaatatatcgcgaacaggtgtga

SEQ ID NO: 208205 - DNA, 1926 bp, Klebsiella oxytoca
atggggcgaatggccgataaaggaggcattatggtgttaaataagctgatcgtttcactatcgccgatagtggacggcatgctgggactgctcgtttttatgcaccagcatcaacctattttggcgctattctcagggctgaccatgccattcttcgcgtcgatgaaaaacgatgaacgactcaaagcccctttatggaaaaagctggtgatagttttttccatactgtgctttttgtttggcacaatagcgcccgtggtgaacgaattatttcagtgcatataccgaataaaaatagccaccagcaataccgtcctctcctggctgatactgattacctctaccgcagccggttttgttttccatattcttctgcgcagggtgttaacacctgaactcgataaagtaaaaaatcggttcgtcagaaaaaccactttggaaagggaattacgtactgatgtccgaacggtgaaatcgctgctaccggaaacattgcactataacccggaggattatattaacctgagtaaaggtatttttatcggcatgaacagaatgaaacagccgatgtacctgccgttaaaagactggcaaaaacaacatgccgatatcatcggaaccacgggggccggtaaaggggtggctaccgggatattactttatcagagtattttggccggtgaaggcgtatttgttatggaccccaaagatgatgagtgggccccacacctttaccggaaagcctgcgaggatgcagggaaatcctttgccctaattgacctgaggaaacaggcataccagctaaacctgattaacgatatcaccgctgatgaactggaagaactttttgtcgcgggtttcagtctggcagagaaaggacaagagtccgacttttatcgcattgacgatcgcaaagcagcccgaatagctgcacaatttgtcgcccgtaatacgacctcaaccattcgggatgtgtataacggggaatacgttcaaagtatcgctgataagataaaagcctttttcgggaaaattgaggagctggccttactcaatgccatcaatgcaccgacaggattttccctcaatacaatatttgataacggtggttgctgctatgtgattggctcgatgcgcaacagcaaaattattaccgctcagcgcatgctgctggttcgcctgtaccagctggcagaaaggcgcgaccgggtaaaccacacaccccgccctattgctatttacctttccgaactgaaataccatttatccaagcctgcgctggaaggcttaggtgcggcacgggataaaggtgtacacattattatggaccaccaatccattgccgatttaaaagattgcccggcggatttgaaaagcgatgccgtggtgggtgctgtcgtggagaatgccaaattcaagctggtttatcgtgtcatggaccctgataccgctgaatgggtggcaaggatgtcgggcaccatattagtcgatgatgaggtccgcaaagcgaaaacagatgcggtactgacagagacaatcgatagagaacgcaccatcaggcaggccgagcgtttctttatcgacagtaatatggtgttgaacctgcctgattttgtcagttttatattcaccaccaaagccctcccctctgcttcactgatttctcctatcagggttaaaaaaagggaactggcgatctgtgccgtatcgcccgctgttgccgccaccgcagcaagagtcaacattgccctgaattttgacgaggaagaaatgtcatccggaccttcatcaacatcagttatcacgacaacacaacccgatctcttttttgataagccggacgagaaacacacaacaacaagtgcaggtgcaggtgcaggtgcaggtgcaggtaaagaagatcatccctcgttactaaacttttag

SEQ ID NO: 208206 - DNA, 852 bp, Klebsiella oxytoca
atgacaaatgatacaagtaaacatccgaaagtggatcatgctgaagaaaacgcatttttcccctctgactattcccttagtcagtttaccagccccgtatctgaccttagtgactacaactatcccaaacagtgcatgggagggaagaaggtgctggtcatcgctgcggatgagcgttacctgatgactgatagtggggctctgttctcaacgggaaaccatcctgttgaaacgcttattcccatgtatcacctgcatgccgccggttttgattttgacattgcgacaatatcaggctacatgaccaagttcgaatactgggccatgccgcataaggatgagaaagttatgccttttttcagccggtatagaagtaagttccaaaatcctgaaaaattgtctgatgtattgaatagcctgaacaagcaaagtgaatatgcagccgtgtttattcctggtggccacggcgcactgattgggctgccagaaagcagcgcagtagccgatactcttcgctggttcatgaacaatgaccgcttcgtcatatccctttgccatggccctgcagcattcctttcgctgcgcaatggtgaaaaccctctaaaagggtattctatttgcgctttccctgattcagctgataagcagacgcctgatataggttatatgccgggccatctcacatggtattttggcgagatacttaagcaaatggggatgaatattgttaatgatgatattaaaggaagcgtttacaaggatcgtaaggtactaacaggtgacagtccttttgcggccaatgcacttggtcaactggcagctaaagagctcctttcagcttatgcgtcctga

SEQ ID NO: 208207 - DNA, 498 bp, Klebsiella oxytoca
atgaccaataaccagttaacaggcaatcagctgacgaaaattattgaatcagctgaggcggtgatttcagctctggctggcactaacgatgacgtccacccggataatagctccaagatgtgtcttctgtgggatagcttgaacgatgatgacgcaccaccagaagcagtccttgccatggcccgtgagctacaggaacgccgcaaggccgatattgcgccagcgggatactttgcctttgatagtgatggcggattcactaatcacgacacagcagaaagcgccagaaaagaagcgcaggaggctatcgattatttccggggtgatgcatgtgacggctggcctggtgacgtgagtagcgtttgctggggcgtcatcatgcagcagtcaacgaagaccggcgaaagaccggttgaagaagacgataaatgctcatctcacattgagcgcgtttgtgattacgtactgctgccagaattgcaggagaagccagaatga

SEQ ID NO: 208208 - DNA, 255 bp, Klebsiella oxytoca
atgaaagcgacggcgcgtaaaaaaccagcatttaaagacttttatgagaatggtatgttttcgcgagttatcgccaccaggacaagcaacaacaggtggcaattgtgcggaatgcacaggaatggtgatgccattatttttattgaggctgcaaggggagggattagagagtggtctagcctggaatatttgtcagagttttgtgagtctattggagtgaaaatttgggaggttcacaggaagtcaggtaggtga

SEQ ID NO: 208209 - DNA, 189 bp, Klebsiella oxytoca
atgttttatctatatgaaatacaggcaataaatcaaataagccagtacatgttaaccaaaaccgagggtgacgggttcattacagcatttgatgccgggagtgatgaagcggctatggatatggcgtcgatttatatcaacaacaccctggggaaaaaaacagagtttggaatatccttagcattataa

SEQ ID NO: 208210 - DNA, 1128 bp, Klebsiella oxytoca
atgctgaaccagtacggcgtttatgtctcaggtggtcaggccctgaacgccggcgagaagatggttttcgagggctgcacgatcgggaacaactcggttgcgcacttctggtctcaggctccgatgtggttctacctcaataactgctcactggattacaccagtgctgatgtattcctggtgggaaatctgtctcaggtatcaaggattctcattcagggcggccatgttgagggggttccgggttatctggtgaattgcccggccgcaccagggataccagttaaagttcagttccgcgacactcagctctacatgaacggcgctaacaactccatgcggcagcttatccatgcaccagggggcggttgtgcggtttcttttgaggaatgcgactggacgtttaccgagtattttgaaaattcacagtacatttcgctgagcggttatagcgacggcactgaggcgaataaccgctgcgtgattaccaataaaagcccccgcgttaccgggctgcgtagctcacagattctgccgcgatataacaatggtctgatgggctggcgatttaattttgttggcacggagggtgcatcgattcttaaccttaccgatgccaacacaaaaatcacggtctccagtgcaaatactgacgtaagcgcaaaatacggcgcagcaaccagcgacggcgcgaggacgatcgagattaccgcagccgcagcaactgatgtggttgagttgctgctgactccttactatccggcaaaagctcgcccggcatggtgtggcggcgcatcggttaatatcgcaggcgttacagcaggggagtgcgatatgtaccttgttgccagaacctacgaggagccaaccctttctttcaatagcggcacatcaactatcacgacaaaccgggctactgtgactaactacatttccgacgttatcaatgtgagcgagattttcagcagggccggaacgccgctgacggcatccgattatgtgggcatctggcagagtgtgagccaggcacagtacgctgattcatgtcgactggctcttcgcttcaccaatttcgtagggacgattaaagttaaactccccgttttctggcaatcatcggtactgtga

SEQ ID NO: 208211 - DNA, 1161 bp, Klebsiella oxytoca
atgcctaagatatcaaacgaacagaaagcagtaatggacattcttgatgttattcatttccattgtgtatatacatcaaaatgcctatcttcagaagatataaagttatttcaaaatatagttcttgatgtacaggaagctgtaaataaaatcagcgcagaagaagctctactagatattttaactcactatttgatatgtggtctggaaatttcattaagtggcgatgatgtaaaattcatgagtaagttgaagggtcaacatgaaatacctaatgaagtactagattctattttggaaaagaaaaaagaaatagcgctcgatcttctgagttgtatggtatcagaacatggagttataaaatctgattttacaaagcaattaattaatttgacaaaaaaatatgaagtgatgaatataccagccacaatagcttatagacttgctattaagttcaatagtctaattcatcctgttgatcatattctcttctatggataccttaatgaccttggtataatgacatgcgcgaaatatcggtgtgacaaaaaaaatgataataaggactcctttaatcgggtagcattacttatggagtttgagatttttagagtatttgcaaggttttgtattgatccaggcggtatggatgaaataaccttaaaagctcctccgaaagatattcctgatacgttaaggaaaaatattatagatgaatataaatatttaatagataatgtttttagtaaagaaggtattctttataaatttacagatacgagattaaatgaggaggaaactgctttaatccttctgggaaatgtaagtcgtttatttaaacatagacggttttttcaaggaacaatagccagatggcctggcgcttggggcgcttttttaatagaacttttaagacaggagaatccaacaagagcaatttattgtgaaagcaataatactaatagcattagtgaagaggctaaagatataatggataaactgaattataaagtatcagctagaatgctttatttacgttatagtcaatttataaagaatgaatcaaaatttataataaaatataacaatatattagctcaattgccttatacgcctgaatgggatggtgacagctatgtttatcataaatttttagtgtaa

SEQ ID NO: 208212 - DNA, 1149 bp, Klebsiella oxytoca
atgactaaacaaagctcccttggacaatactacacgccttctgacattgcagtacggattgttgaaaaggctttaaaaatcataggaaagtctccatctcgaacactggagctagctgccggtgaagggcatctgcttgcagctattgagctcaaagcccctaactgcaaaatgtacgcgatcgatatcgacgatgcgaactgttcatctctgaaggagatgcatccagattacgaaactttcaatgctgatgcaaccaagcccattgattttttggataaattgacctttgattttgcattaggtaatccaccttttttaaataatgtaactgtagatctttttattcaatctttattaagcagcacattaaacatagaaattaaaaccggtaaaaaaattagagctgaatacgtttttttatgccaatacatgaattttttaaaaaaaagtggcattcttgctattattcttcctgattcgattatttcaggtgtaaaatctcgtatctttagagaggccttgctaaggaaattcagtattgaagagatagttgaattaaatggaagtccattttctaagactgaagcgaaaactcatgtcttatttatcaggaatagatgtcctaataaaatagagactaaactatcttcttttgatgtaaacaaaaaaagtattatggtattaaatgattctttagttgatagaatggattttacttttcataaagcgaagaataaaactacaggaactagacaattacttaactatgccacaattcaacgtgggaaacttacacatatagatctaaaaatgatgggcgaagattacatacacagcacaacatttgataaagatttttatctgccgataaaatctatatctcccaataaatcatatgttaccaaaggggatgtcatcatgtgtagggttggaagcagggttgcagggaaaattagagtatataatggtgatcccgttttatttacggattgcatttacaaaatacattttaaagaaaataacatcaaaaatgatttcttatcctttatcacatcaacaggagggaaagaatctcttatgtcattgctacggggtgtatgttcgaaatatataacaaagagcgatctggagtctatttttttctaa

SEQ ID NO: 208213 - DNA, 1767 bp, Klebsiella oxytoca
atgatatctaaaggcacccgctggtaccagcattataagcgtgaggatgagaaattgtctgttactgagaatgaagagtttgaataccgagcagaccatatgactcttgaggagctcgagaggatcacagcagaaagccggttttatagtggcgtactaaaaaaaatattatctcgtggttcaaagttgatcgttgggcctagaggagtaggtaaaactcaccatatgcgcatcgcttttaaacaagcgctaggcagtgagaataagccttttcctgtttatatgacattctcaaaatatctgagattggaacctttaaaaaattcatcgtcaattgctatacaatatttccattgttgggtgttatctaaaatattattaggtgttaaggacactttagatgaattaaaaataccctgcgataaagtaattctagatactgacctagaatggaatgatctttcctattattgtgagcaaattgaaaaacaacaaataagagattggcacaataatttattggatactatttcggtagcgctagtaacagaatttatcgaaaaagctataacggattctaatcgcaagcatgcgattcttttatgtgatgatgcagcgctggttctcactaaggattacatggttgaattctttgatattttcagatcacttaaatcatcaaaaatatcacctaaagcatcgatatatcctaatactgaattaggaccgcgtttccatataggtcaagatgcagaaagtgtttcttgttggccgacaattgatgatgacgaatatgtagaattattcgaacaaatttatagtaaaagatataccaatgaattaaaagatgatgttaaaaagtgttttatttatgcagcttttggtgttccaagagctttcattaatttgataaaccagtatgaaatttcgtcgaaaaacagcatacagagtaaagtaaactcagtgatatctgagcaatcagagatcattctaaaagagtttaaaacattgtcctctaaacagcctcagtataaacaatatgttaatgcaggccataaagtattaaatgaaattattagcgagatcacgctagcaaataaaaaggcattagctgaaaacaagcagcaggtttatttgggagtattgcaacagcaagaaaacgctaataaaaagaataaagatattagcttgattataaggcttttagaagagactggtttgctttcacgtattcatccagttaaacacggaaaaacagcaacaggatcgcggacttatgaccgatttattccacatttcacacttcttctaaatgaaggtgcctatcaagttggtagggctggttatattacaaatttttcaacatctatctctttcccaaaagaaaagcaccctgttagaaaaaactcatttgctgagtttttgacacaagatgaaatcgactcgctatcattagagttgcctagctgttctagttgcggaaatcccagaaaagatgaggaacaacggttttgtatgtattgtgggtcggagttgataaataagtccaccttcgatgaattgacatcaaagaaaattgacgatttaccattatctaagtggttgaaaacaaaaataaaagaagaaactcgtattgaaactattgctgatattgttttttctacaaatcctgctcaagaacttagaagagcaaaaggtgttggagagaaaaaggccgtaaaagttatcaatgaagcaacacggttgatggaggagtttctttcataa

SEQ ID NO: 208214 - DNA, 900 bp, Klebsiella oxytoca
atggctaaagaaaagaaagccccattttttattaaagtatgcggtgactcgcgagtagtcacgctgaatactgtcaatttatttggtatggatcgcgatattgtagattcgccaattgatgtatatatcaaaaaaaacaaatctctcttagttaaattggggagattagaaagagaaggattgttagattcgacaaatgaggaagatcgtgatgtttacaatctttttttgttaggttttatatcaaatgtcgaatcatttattcggcgaattatacgagagactattcttttagataatatcgcttatgaacaatgcttggagcagcagttaacttatgctgcggcaattcaccataaggctgaccttttgccagaggctttattagagaattgtacatttattagcttggataatattcaaaaaaccaccaaaacttatctagatataaatatcaataagcaatcaagtgatcagaaagaacttattgaatgcttatcgatgtttgaacaactatgtcaattaagacactgtatcgtacaccgcgcagggttattaggctcaaaaaacgctgttaaattaggtattaatcagcatagcaaattttttgaaaaacctatagttctcgatttttcattccttcaggaatcaagcgcaatatgtttaaattgtgtcaggacgtataataattttctatttaatgagctgctaaaaagatatgtggtaacaaataaatcagctctatcatggaattttaattcggatagaaagtggttttcacgttatttcaagctttttgtgtccagtgaattaaataatgaaattattcgacagcagaaacaaccatatacgcctaaaacagcttataatgaattaagagactattacgaagggtcttga

SEQ ID NO: 208215 - DNA, 1890 bp, Klebsiella oxytoca
ttggctgaagcaacaacatttaaagacctggtcaacgaggcttttattctaccgcttcgttcagttttgattgttgatgaccagtatcccacgtgggaagagatcttctcagaaaaaaacctagatgtatcgagtgacggctcagagacagatgtggtgccccaaaaaaaatggcataccttagcaaccgctggggaagtcatgcgcctcatcaaacagtttcgggagcataaaccggggttaatcatcgatattcatgatggtatatcaattagtcaaggggaaggaaaaactagaagtgagtcgcctgaagaacttgctgatcacctccatcagtcagatttactcattcttgattacaaccttgaaggggcagaggctggaacgggcggagacactgccagaaaaatccttgcatctgttttaaataaccaacattttaatctagttgtcgtgcacacaagtgaagacctcgataacgttagtcacgaatgtttgcgatccctattaccaagttgcacatctcaatacactcctgaaatgaaggaacaaatttctcttttggatcaagaaattattgttcaagaggatagcggacggtttgatcgcagcgtcatccttgagaagatggatatggcaacttatatagcagccagacatcctgcacgaggtcagcaacaagcactcggcgaatttatgtcctgcaggggggctttcgcactactgaatgaatgggccagtgaattgcagctacagcaatcgcaacgtagagtattcttttactgggctatcgagcaatatgaaaagaaatacattaatgatttcagcatcacccctccacaattacttgactggaatataacagaaaagtgcaaatggttgcgaacctcacgaggcttcgtgtgctttgtaagaaaagggcctgaaaacttgatggccgagctggaagaggctttgctggactggaagcccaccccatccagacttctttctgcaaaattccgtaatgaaataagccgtcttggcgctgaagtagaagaaacatctctcaagcaaagacatgcctatgcaaaattctatgagacaatatgtaatccgggtagcaatgaactttcagcagaacatactgaacttctgcgcacataccgtctaaaaaaccatgttgcacgtcagtcagaaatgctctcattcctagtagaagatgcagtggctgatttcggcagaaaaatttatcagtcagacatcgccagcggctccacttaccatgagcattaccgtgttgacctcagtaaagaggctggaaaaaaacaggcaataagcgaatataatcgctacgtctgttgccttccatctagaataagtgaggatggtcaaagtgcaccggagcagctagacagcggacatattttcaaattaggtgaaacttggtgggtttgtgctactcccgcatgtgatttacaaccaggtcaaagcattattgcgttcaataaaggtaatgatgctagtttacgcccatttactgcaatcaggcttcatccttccagcccagataatctgacccaaaatcatataaacagcggctcttattgttatgtcgaatataagggaaatataataggtttgggaatacgttcgccaaaagatgatgttagcagcccagccatccagaaagttgattggcgcgcttttgttgcagagcacggtggaatgattgaaaacagaatattatcattgcttgacatccagctagagttcaaggataacactattaaaagcgatcccaaaaaggcagaagtagtagcaaaacttcgatatgaatatgcgttgaactatatacagcgagttggtgctagcgttagtaggataggccttggatacattgcaacctaa

SEQ ID NO: 208216 - DNA, 2970 bp, Klebsiella oxytoca
atgattcaaacactcgcgtttcgcacccaagccaggacggtcgatcatcttgggcgtgaacaaattgccgactgtcctaccgctatttctgaactctggaaaaatgcttatgacgcttatgcacgaaacgtaagccttcatctttttgatgaacaagagcctgttgcggccgtattcgatgatgggcatggaatgaactttgaggagtttgtaaaccgttggcttgtcgttggtactacatctaagtatgagaacaatacgaaggatgatgaagatcgtgacggtttgccaaagcgaactcgccaaggccagaaaggcatcgggcgtctgtcatcagcaaacctaggtccgttacttctcattgtaactaaaagaaaaaatgctgatttcgttgcggctctgattgactggcgaatttttgaaaatccttacttggtactttcagatatagaggtgccagtcaccgaatttaaaaataaagatcagttatttgtaatccttccgcaattgttcaatcgtctattggataacatccaaggtgacaaagaagatactccccgttctcaaaggcttaagcttgcttgggagacttacgaccgcgtggttcaggaaaatagtccctcctcacctaaaccatcagcggttatagccagcactatagtcaatgcccgcttcgaagagcatcatctgactccatggtctgtctgggagggtagctcttctcatggttcagcgttgattgtatctgatattaattacgatcttcgagctcaattaccttcagttgaaccagatggaaatgttaataaaattcgagaagccctcgtttcaactctgtctgcgttcacggatccctacgttgataatgacgcaattgaatttaatgccttcgctcctgaattttcttatgaagtcaggatctggtcaggtgctgtctctaaaatgattgtggaagacgagcgtagatcaattaatcgcgatgtactggaagaagcagaacatttgctttcaggaaacattgatgccgaaggcattttcaaagggcaaataaaggcatttggtcaatggctttttcagggttctgactacatcatttatccccctaaagattttaaactaccatctggtcccacaacgttagtgggtccattcagcttaactgtcgcgacttacgaaagaactcagcgcaacactacattgtctgagactgattgggccagattcgaacaactcgctgatgaacacggtggttttttactattccgtaatggtcttcgggtcctcccgtatgggcgaacggataatgatttctttgaaattgaaacccgccgtagtatctcagcagggcgtgaattctggaatgctcgtaggatgtttggtcgtgttgctatatctcgcgaacaaaatcctaacttgaaagacaaagctggtagagaagggtttattgataaccgaagcgcaaaagcgctgcgtgcattggtcattcatattctgcgaaccgcagcctatcagtattttggtcaggcatcagaattacgcaaccagatactgccggatgtacaagcaaaatatgataaggaaaaagctgataaagagcggcaagcattgtccgcaaaaaatgcgagccgcttccgatctaatctccggaagaatctccctttattaaatgagatatatgctgaaacggaaaatatcctcttcgaaacaaaaattgaaaatgaacaggatcttattaatgcacagtcattaatcactaggctcactgaaaacatggccgttctgcgcctatctggagcacctgccaaacttggtgcaattgaagatgactatcgcgcatatagagccatgtatgctgaaataacccaaaaaataaaggacttagaagataggcgagcaaccgcaattgagcttataaaaccagctaagcccgaggaaatagcgcaaaagcagctaaacagccactcaagtcgtcttcaggcacgtcttagaacttggcgtaaagccattgaaacgattcagaatacagaaagtgaacgagttgcgtctctgtttgacgaacgaaataaagcatttcatcaggatgccatgcccttagttgagggcgtccgcctcggccggtgcggtctagacgatgcgcttgccgaaatgaaagcaatttttcaaaagcttgatagtgagaatgaagatacctttcagtcatacctttatgcgttagaaatcatgagcgaaaatattaatattgaacttatcgcgcgacaaggcaccgctgaaaatgtgacgttacgagaggatctcaacaggctcaatcaagtggctcaacttggcatcaccgttgaaatactcgggcatgaattagcaagtaatgaacggatggtttacgaaggcattcgccagattcagcaggcagggcagtttgcaggaaccgaactcattgtcgaagggtttgaagctttgagccagcaacttgagtttctttcaccgctaaaagtctctggtaccaaagccaggcggttgataactggtagagaaattgaagattatctgaataaattttttggttcagtaatacgcaatagaaaaatcaatatccatgcttcagaagagtttcgacaatttgctctttatgagcagccttctcgcatatatccagtttttgtaaatttagtgaacaatagcgtttactggatggttaattcccatacagatgaaccagaagttttcatttcggttgaggaagagcgaatagttatctccgacaatggtcctggtatcaaccctgtggaccaagaacatcttttcaaaatgttctttacccgtaaatctagtggcggtagaggaattggactttacctatgtcgcacgaatttacaggctggcgggcattcaatagcgtacaccacagaacgtaagttcagacgtcttagcggtgctaattttgtcattgattttaagggggccacttttggctga

SEQ ID NO: 208217 - DNA, 1146 bp, Klebsiella oxytoca
atgaataatattcaacaaaagcaaaagcccgtggcgatcgatttgtttgcaggtgctggaggattttctctagccgctgttaatgcgggcttttctgtagaactggccattgaaaatgatgcctatgctgtaaagacttacaaaaaaaatatcgttagatacgcaggtgcaaaggacgtaacagttctcgatgatagcatattgaagtacacgccagaaaaagtgtacaaagagcatttggctggtagagattgtgacctccttctaggggggccaccctgccaaggtttttcgacccaccgaattttagatgcaggagttgatgacccgcgaaatgagctagtgctcgcgtattttaggttcgttaaggcatttcatcctcgtgtttttttgatggagaatgtaccgggtatactctgggaacggcataaaagttatctggaagccttctacgaggaaggggccaaagcaggctatacaatttttgagcctgctgtgttagatgcacgagactttggtgtacctcaaagacgtaagcgggtattcatactaggagttagggatatagccgatacacaagacttcgtctggccccccgaaccaacacatgcaccactagacaaagtgaaaggagatctaaaagtgtgggctgcctgtgaaagcgtatttagacctgcccccgatggagatgaaaacgatattcatatgaatcatgggcctgagctggtaaaggcgttttcaaatacaccaccaaacggtggaagccgcaaagattcaggtcggatactcccttgtcatgcaaagcatgatggccataaagatgtctatggacgtatcaatcctgcgttacccgcaccaacaatgacaacagcgtgtattaatccatctaaaggtcgtttcgttcatcctaccgagcaccatggtattaccctacgacaggctgcaagaattcagacatttccggataattatatctttactggtgggcttacagcggcaggccggcaaattggcaacgccgtaccggtaatgatgggaacatacctcatccgatatatcaaacaacatctgctgaaaaacaatgatgctcatctatataacggtgctccggcagattctgataaacgagatattgagaatatatga

SEQ ID NO: 208218 - DNA, 1419 bp, Klebsiella oxytoca
atgaggttttcagaggcttttggagttgaaggcagacaagtagcgttagattttttggatattcctctgcacactgatttaagattttttttagatccaacatctataaaggttttaaaatcccaatgggggcaggatttagtttacgcgttacaagactattttacagaaataatggtgtctataaaaaataataattttaaaaaagctgcttatttattgtcatcactaagagagtccaatgcctttcatttaggatattcaacaaaagaatcatccggaactgctcttggtgaaaaaactgctgaagatattttggattctctaaagagtagtcaggctgcaaaatcaggaatattaactgatctagaagatacagctctgactatcccaggcattggttctgaccgaatatcggattcagtttgtaatattcttaaaggtttttttatagaatatactaaggatgtttgtatattttacggcattgagactaaagaggtttcagaagtcaaaacgtgggataaggttagtagtaaatggcataaaaagcgttgtcatctccctgtttttgaaggcgaggagattatacttattcctaagatacttgcacgtgaacagataatctattcacataggaatttatatcggagacatattatcccggaaatgaaaaaggaattgataagctctggttcggcattagttaaagtgcttaaaggggagcggattgttaccacgacaagtatcattgatgagtatggtcagactaaggcatttatcgaatctcagctcgtaaaatatcctaacaccttgaaagagtataaaaaagatctggagattaatcctccgaatcctctagcacatagtgattttgataaggatgaagatcctgtaattctccccataaaagatctaatgaaagatattgatttagcaattaaaaataacgaatttagtaattacactaaagcatacaagaagatattgatttcaatcttctatcctagcttattttacccaaaattaataagtgaagatgaacagtgctgtcttttttcattaattaatgaagctaagaaaggtttcttttttgatttttcagtgtacaacattatttcagagttgatagttgtgaatgtcattgaccctcagcataaattgaacaaggaacatatttatactacacttagaaaactcgaagaatgtaattctaagataggtttaatattctgcgaaaatcctgctgaggaaaagtatcttgatagagtgaaagagatatcgaaagatgaaggtttgtatattttcttgattagccgaaataacttaatggaaatgattaaggaattttcaaccataggtgaacagacatttgacgtattaaggagtatgtttaaaacataccccggtaaagtatga

SEQ ID NO: 208219 - DNA, 189 bp, Klebsiella oxytoca
atgttttatctgtatgaaatacaatcaattaaccaaatcagccagtacatgttaaccaaaactgagggcagcgcggtgatcacagcatttgatgctggcagtgatgaattggctatggatatagcatctatttatatcaataacactctgggtaaaaaaacggagtttggtatttcattgtctctatga

SEQ ID NO: 208220 - DNA, 195 bp, Klebsiella oxytoca
atgcaattaattttaaaatctaacaaagggctgcatgttcaattatcggcctctgatgccgaagggttattaaatgttgctgcaatgtgcagattattaggtgttgactataatggcgtgagacaacgtattttccgaggggatacgattgagcaagctattcaccattatttagacaaacaaggcggtgaataa

SEQ ID NO: 208221 - DNA, 1038 bp, Klebsiella oxytoca
atgtctaaagatttattctctggtgtagtgtacgacagctttacaagcccgtttactttcagcactcagttaaaccgtattatttcaaatcttggcttattccgtcaggagtcccacaacgtaaatctgatatctcttgaaaagatcaccgatctaaagaatctcgttgcgaaggagaactctccttatgcacaatcagattggaactctgcacaacgtccagaatttaccaatgctctttaccagcttaaatatcacggtattttaaacagtgttacatctcttgacctgcaacaatacgccgcgcgtggaattgctgacactgccgaccaggtaagtattgctctgtcagatttcagtgatagccaatattctatggcagaaaacgccgttgaaattgacctggtgaatgctctgttaggtctgcgtgttaatagcgactatgccggacaaggcgatcttgatttcttagctggcggtgctcgaacagaatacaccctggacacttccgacactgcgaacatctttgaacaattaagcgaaattgcccgtattcagaatgtcgctcttggggatggcttggcacaacagaaacaaggcgctgtgatcctggcttctggggctgctgctaaagcacttcgctatcatccatctattaaagatttcatggtgtacaccctaagtgtcaatagctctgacaacttctacactcgaacagtagaaagtaatccggcttacgaggtgtggactctgaacgggatcaccgtaatagatgtaacagggtactccctgatcaccgacaaaatcggtgtggacgggttcgccgtcatcccacgcatgagtgaagggagtaatgcactggtgctacacactgggatcggtgttcgtcatctgacacttggaaaatctgcaactctgcataatcagtatgttgtttcagatgctaaatggcaattcccgtctattgcaacagaaaccagctatctaccaattaataacatacctacggcgatagttttcggtagcatcgcagaataa

SEQ ID NO: 208222 - DNA, 348 bp, Klebsiella oxytoca
atgaataataaaactatggacacagtgaacaccctaattaactctttccacgatatttggcatctaccaaccttacagcttgttaataaggcgtggcgtgagagaacgccctccgcgctcctggaagcgttgcaatacactgaagaggcaatcactgctcttgaacactggaatactgctgtagagcacctggtgcagttgaacggggataccgtcaccgtggatcaggcgtggcgaattgccaatgatatggaggagcttgccctggctatggaacacatcaccgttgaactcggagagcttgccatccagatcgcggaagcgcacggtgtaagtcagaatgcataa

SEQ ID NO: 208223 - DNA, 384 bp, Klebsiella oxytoca
atgggacgaaaagaacgaaatccaattaaacggatagaacaagcaacacgcgccagcaaacgtaaatacacctcttctctacgagacctcgcacgagagtctattccaggagaatggatcaccgaaataatagaataccctgcaacggtgcccgtaggggcagagtttgaactattgcaggatgttttagcatcttcggataacgtcttctataaaccacgccgccgccgtgaataccgtgttgattcatcgaatcttaagaagtggcagctatacgcagaaaactatattgactgggtggggtattcccaaactaacggcttatctcaccacatacaagattttgacattctctttgacgacaaggaaaacaacaatgaataa

SEQ ID NO: 208224 - DNA, 720 bp, Klebsiella oxytoca
atggcaaaaacactcgccgagattaaggcagactaccaatacaccgacaagcaaactggtgaagtaaaagatcgtacaattaacaccccacattatttccgagacattcccagaatttattctcccaacctccaggatggttacatggacttttgccccaaggcgcaaaagttgtactgctattttcagggatgggaaaattcagggaatttctgttacgaaagtcagacagaacttggaaaggtgatcgatttatccagggagagaacctgcaaactcattcagaagctgcaagatgcagggctaatcacgaaagagaaaaaccctggttatcgttccaaagtttaccgcacgtttccgatcactgatgcgcacattactccaccagaagcactgacagtgcagcctgatatcatttctgacgtagtgcctgaaccagctacggcagaggaaacgcaggatgatgcgacagaaaagtctgagcctttaggactgcctgaaacgattaccgatgaaatgaaaatagacgcagtgtgcgatctattgtccaaatcggaaagtttacggcaacaaagcaggggggacacatttattaactacgctcgccgcgtattgcatcgcaagagtatgaaactaccttccagattcgaagaggaattagaaatgcgatttgaacatcgttatccacacttctatggacgattcggaacaccattttaa

SEQ ID NO: 208225 - DNA, 306 bp, Klebsiella oxytoca
gtgaaaccattcagcgggatcgagaataacatgaacggtgcattggtcataccaaaattgatatgcatcaagttttactgcatattttttgagcgtgaaatcgcaaaatcgataaaaaaagcccgcgatgttggcacatcgcgggccgggaggagatcagccgagggttttaaaggcctttattcgctgcagatgcggggagatgtttttaaatttgtgggtctgctcttcatcccagattatctcatagtaatggtgcagcagctccgccgaacgctggctattcagcgcttcgtcctggcgtga

SEQ ID NO: 208226 - DNA, 1227 bp, Klebsiella oxytoca
atgctttgtagcatttctaaaataaatataccaatcccatactccagaaaaaaagttaatatacagttagatggaagaagtctgattatcactggtggtaatggttgtggaaaaacaagtttcataacagccatttataactatttaaaaaagggaatagacagccctaacaataatagcgtcgaatacttgagtcgccagataaataattatacacgcctcatggaagatgagggacgagatggtagggcttacaattcttataagaatgaggtagagaaaaataaagccagattagaagaaattaataatttcaatatcgaaattgagtctattgacaacaaagacattcggtctttgctcagattccatagcgctacaagacaatccgcaatatcttcgccaaatcaagcaccaaaacactctgttcttatagaggaaaataagcatttttctaatgataaagatggtagtcaattctttgaaagctatttattgagtttaaagaaaaaccaaagctatgcaatagcttttgataaagatgaaaatgaagcaaaacgtattagcctatggtttgataagatacagttagatctacgctcattatttgaagatccagatttagttctagaatttgatacaaaagatgagaagttttatttacatcaagatgggaaagacagatatacctttcagacgttatcagctggatactcttcaatactaagtatctatactgatttaataatgagagttgaaatgtggggggtctctcctgataatatacagggaatcatttttattgatgaaattgatgctcatttgcatgtatcattacaaaagcaaatattacgttttttcattaagtcattcccaaaaattcaatttatcgtaacaactcattctccatttgtagttacatctgttacagactctgttatttatgatcttactgctaatgaacaaattatagatgtttcttcatattcatatggtgtggttatggaggaaattttcggagttctacctgattctcacgcattaacagataaactaactcacatcgaaaatttagttcaaaatataacaccggaaaatatcggtgagttagaaaaagtcatttcgtcttttgcatctgaaaaagaaaatatgagcaatgatactcaagctttccttgacacagcacagttaaagttaattaaaacgaaaaaaagaataagcgagtag

SEQ ID NO: 208227 - DNA, 654 bp, Klebsiella oxytoca
atgttcaatgtagtgagatcaatgcccgcacccgggtcactattaactcataaaaaatatgatggtgatgatgttcattctgctctacaggagtgcttccatgaaaaatgttatttatgtgaaaccaaaaaacctttagatataaacatcgagcattttgaccctcatatgggagatataattaaaaaattctcatgggataacttgtatttagtatgttcacgttgcaacaatatcaagctagcaaaatataacaatcttctcgactgctgtgtaataagcgtatgggacagagtaaaattaactcccggattttctccaaaaacaaaaaaattcattattacgccgcaattttctgacgataaaacacttgaaacagcacagctactaaatgatatttacaacaatgataatacaatcaataaaagacttacagctcgttctctacgaacccaagtagtccataccacacacaaactaacacaacatatgattgtttattatagcgaagattctacgaatgaagaaaaagaaaatgcacttaataaaataaaagttatgattaagaagtcatatccatactctgcattttgtcgctggatgataaaggatgatgaagatcttgataaattattaactcctgtcatggactga

SEQ ID NO: 208228 - DNA, 375 bp, Klebsiella oxytoca
atgaaagaactaactattattgaaatgaatgatgtttctggtgcttcactcaaggattttattgcgggaacccaaggtttgggtgaggcagtaattgacagcgccatcggtggtgtaattggagcccttgcatttgcatctgctggcggtctgcagggtggggttaccggtagcggtgctggcggtggcttattaggatttggattagtatccatcgctgtcggatctatttggggagccattcacggtgccatttatggtgccgtagcaggtatctataatggttctgactacgttaacaaatatgcagatataatcgcaaatggtgtactggatggcaccggtggtgcctataagcctaatggctggttttaa

SEQ ID NO: 208229 - DNA, 204 bp, Klebsiella oxytoca
atggggttcatcatgcaatcttatgctgagcggggcgcagccagcggttttattcatccactcgacggtgccggggcggcggccaacgccgcgccgttcctgtttcccacggtaatagcgcaggtcgctggcgtcatcaacgctgtccgccgcctgggggtgaaaggtggtaccgtgaggacggagggcgtcgccagctgctga

SEQ ID NO: 208230 - DNA, 267 bp, Klebsiella oxytoca
atgtacttctggaacgatgtgcactccacctggctggaagcgggctaccagcgcgtcgactatgaccagggcggcgataaccacggctggaagctgacattgtcgcagaacatcgccatcggaatggggccggagttccgcccgatgctgcgtttctacgtgaccggcggccaggtggataacaagcgcaccgcgaaggtcaacggcaccaaagacgaacagctggattcgctgaacgtcggcggcatgtttgaagcgtggttctaa

SEQ ID NO: 208231 - DNA, 330 bp, Klebsiella oxytoca; identical to SEQ ID NO: 120908

SEQ ID NO: 208232 - DNA, 330 bp, Klebsiella oxytoca; identical to SEQ ID NO: 120907

SEQ ID NO: 208233 - DNA, 732 bp, Klebsiella oxytoca; identical to SEQ ID NO: 120906

SEQ ID NO: 208234 - DNA, 348 bp, Klebsiella oxytoca; identical to SEQ ID NO: 120905

SEQ ID NO: 208235 - DNA, 279 bp, Klebsiella oxytoca; identical to SEQ ID NO: 120904

SEQ ID NO: 208236 - DNA, 639 bp, Klebsiella oxytoca; identical to SEQ ID NO: 120903

SEQ ID NO: 208237 - DNA, 972 bp, Klebsiella oxytoca; identical to SEQ ID NO: 120902

SEQ ID NO: 208238 - DNA, 390 bp, Klebsiella oxytoca; identical to SEQ ID NO: 120901

SEQ ID NO: 208239 - DNA, 429 bp, Klebsiella oxytoca; identical to SEQ ID NO: 120899

SEQ ID NO: 208240 - DNA, 774 bp, Klebsiella oxytoca; identical to SEQ ID NO: 120898

SEQ ID NO: 208241 - DNA, 582 bp, Klebsiella oxytoca
atgactgataacagcatccccgtagactttaattccagagacgcattttcccattttaaagaatgtttaaggttagaagtcataaaccggaatggagaaaagaaattttcatggtttaaggtctttcaccgtgtgctttttagccataaaaagagattttactattggtggcgacttgctaattacatgaatcagacaccgtccagacgatatcagaagtgggcaaggaagataaatgctaatctgcgttgcaaatatggtgctgacattagtatcgaagcgcaaatcggtgaaggcatgaaactcaatcactatgtaggtatagttatccgttctgaatgtaagatagggaaaaatgcaaatattcgtcagaacacgacgattggaaggaaaacgtccaatgatgtaatcggcatgactgtaattggggataatgtagatattggtgctcattcttgcatcataggtgatatccatattggacataacgtaacaataggtgcaatgacatttgttaacaaagatgttcccgacaactcaattatctacaacccagttacatcggtaataaaaaccaaataa

SEQ ID NO: 208242 - DNA, 468 bp, Klebsiella oxytoca; identical to SEQ ID NO: 120896

SEQ ID NO: 208243 - DNA, 693 bp, Klebsiella oxytoca; identical to SEQ ID NO: 120895

SEQ ID NO: 208244 - DNA, 222 bp, Klebsiella oxytoca; identical to SEQ ID NO: 120894

SEQ ID NO: 208245 - DNA, 423 bp, Klebsiella oxytoca; identical to SEQ ID NO: 120893

SEQ ID NO: 208246 - DNA, 780 bp, Klebsiella oxytoca; identical to SEQ ID NO: 120892

SEQ ID NO: 208247 - DNA, 501 bp, Klebsiella oxytoca; identical to SEQ ID NO: 120891

SEQ ID NO: 208248 - DNA, 255 bp, Klebsiella oxytoca; identical to SEQ ID NO: 120889

SEQ ID NO: 208249 - DNA, 330 bp, Klebsiella oxytoca; identical to SEQ ID NO: 120888

SEQ ID NO: 208250 - DNA, 1986 bp, Klebsiella oxytoca; identical to SEQ ID NO: 120887

SEQ ID NO: 208251 - DNA, 423 bp, Klebsiella oxytoca; identical to SEQ ID NO: 120886

SEQ ID NO: 208252 - DNA, 732 bp, Klebsiella oxytoca; identical to SEQ ID NO: 94600

SEQ ID NO: 208253 - DNA, 231 bp, Klebsiella oxytoca; identical to SEQ ID NO: 94599

SEQ ID NO: 208254 - DNA, 648 bp, Klebsiella oxytoca; identical to SEQ ID NO: 120882

SEQ ID NO: 208255 - DNA, 1248 bp, Klebsiella oxytoca; identical to SEQ ID NO: 120881

SEQ ID NO: 208256 - DNA, 1092 bp, Klebsiella oxytoca; identical to SEQ ID NO: 120880

SEQ ID NO: 208257 - DNA, 723 bp, Klebsiella oxytoca; identical to SEQ ID NO: 120879

SEQ ID NO: 208258 - DNA, 273 bp, Klebsiella oxytoca; identical to SEQ ID NO: 94597

SEQ ID NO: 208259 - DNA, 360 bp, Klebsiella oxytoca; identical to SEQ ID NO: 94596

SEQ ID NO: 208260 - DNA, 264 bp, Klebsiella oxytoca; identical to SEQ ID NO: 94595

SEQ ID NO: 208261 - DNA, 831 bp, Klebsiella oxytoca; identical to SEQ ID NO: 94594

SEQ ID NO: 208262 - DNA, 267 bp, Klebsiella oxytoca; identical to SEQ ID NO: 94593

SEQ ID NO: 208263 - DNA, 243 bp, Klebsiella oxytoca; identical to SEQ ID NO: 120873

SEQ ID NO: 208264 - DNA, 567 bp, Klebsiella oxytoca
atgcctcactacatatcccgtgcgcctcatggcgtcgcctgtatccgtcttgataacggtgatgaagctctctttgtgaatggagaactgatttcctcatgtacagccagtgaactttatccgcgtattattgcctcagggttgaacctgtcgacggcacttagcttgccatttaaacagcttactgctcaggttcctgataaccctaaatggacatgggaggatgttactgcatcgctaggatggggacagcgtactgaacttaatcacaaaattttgcgttctgttctggaatgtagtctgagccatattacgcggagggatagcgagattctgagcgaactatgtcacgccgagtatgaaagcgaatggatccatgaatccgatctgggttacatcattcgcgttgatgccgtcagttatccgcttctagttctgaaacgtcatggtatttcaaaagcggcgagaatagtgatttacactgccatgataaaggctgacatcagcatggttcattttacttcatggggagaaatgctggcagacgttccgacgtttgaatggtaa

SEQ ID NO: 208265 - DNA, 309 bp, Klebsiella oxytoca; identical to SEQ ID NO: 94590

SEQ ID NO: 208266 - DNA, 336 bp, Klebsiella oxytoca; identical to SEQ ID NO: 94589

SEQ ID NO: 208267 - DNA, 2700 bp, Klebsiella oxytoca; identical to SEQ ID NO: 94588

SEQ ID NO: 208268 - DNA, 492 bp, Klebsiella oxytoca; identical to SEQ ID NO: 94587

SEQ ID NO: 208269 - DNA, 651 bp, Klebsiella oxytoca; identical to SEQ ID NO: 94586

SEQ ID NO: 208270 - DNA, 270 bp, Klebsiella oxytoca; identical to SEQ ID NO: 94585

SEQ ID NO: 208271 - DNA, 2301 bp, Klebsiella oxytoca; identical to SEQ ID NO: 120865

SEQ ID NO: 208272 - DNA, 1185 bp, Klebsiella oxytoca; identical to SEQ ID NO: 94583

SEQ ID NO: 208273 - DNA, 1209 bp, Klebsiella oxytoca; identical to SEQ ID NO: 94582

SEQ ID NO: 208274 - DNA, 633 bp, Klebsiella oxytoca; identical to SEQ ID NO: 94581

SEQ ID NO: 208275 - DNA, 2160 bp, Klebsiella oxytoca; identical to SEQ ID NO: 120861

SEQ ID NO: 208276 - DNA, 543 bp, Klebsiella oxytoca; identical to SEQ ID NO: 94579

SEQ ID NO: 208277 - DNA, 1203 bp, Klebsiella oxytoca; identical to SEQ ID NO: 94578

SEQ ID NO: 208278 - DNA, 3054 bp, Klebsiella oxytoca; identical to SEQ ID NO: 120858

SEQ ID NO: 208279 - DNA, 864 bp, Klebsiella oxytoca; identical to SEQ ID NO: 94575

SEQ ID NO: 208280 - DNA, 405 bp, Klebsiella oxytoca; identical to SEQ ID NO: 94574

SEQ ID NO: 208281 - DNA, 525 bp, Klebsiella oxytoca; identical to SEQ ID NO: 94573

SEQ ID NO: 208282 - DNA, 771 bp, Klebsiella oxytoca; identical to SEQ ID NO: 94572

SEQ ID NO: 208283 - DNA, 1308 bp, Klebsiella oxytoca; identical to SEQ ID NO: 94571

SEQ ID NO: 208284 - DNA, 981 bp, Klebsiella oxytoca; identical to SEQ ID NO: 94570

SEQ ID NO: 208285 - DNA, 702 bp, Klebsiella oxytoca; identical to SEQ ID NO: 94569

SEQ ID NO: 208286 - DNA, 351 bp, Klebsiella oxytoca; identical to SEQ ID NO: 94568

SEQ ID NO: 208287 - DNA, 3543 bp, Klebsiella oxytoca; identical to SEQ ID NO: 94567

SEQ ID NO: 208288 - DNA, 288 bp, Klebsiella oxytoca; identical to SEQ ID NO: 94566

SEQ ID NO: 208289 - DNA, 1161 bp, Klebsiella oxytoca; identical to SEQ ID NO: 94565

SEQ ID NO: 208290 - DNA, 807 bp, Klebsiella oxytoca; identical to SEQ ID NO: 94564

SEQ ID NO: 208291 - DNA, 474 bp, Klebsiella oxytoca; identical to SEQ ID NO: 94563

SEQ ID NO: 208292 - DNA, 726 bp, Klebsiella oxytoca; identical to SEQ ID NO: 120844

SEQ ID NO: 208293 - DNA, 492 bp, Klebsiella oxytoca; identical to SEQ ID NO: 120843

SEQ ID NO: 208294 - DNA, 837 bp, Klebsiella oxytoca; identical to SEQ ID NO: 94561

SEQ ID NO: 208295 - DNA, 477 bp, Klebsiella oxytoca; identical to SEQ ID NO: 120841

SEQ ID NO: 208296 - DNA, 1161 bp, Klebsiella oxytoca; identical to SEQ ID NO: 94559

SEQ ID NO: 208297 - DNA, 204 bp, Klebsiella oxytoca
atgaatatccagagttccctttttgccagcatcatgctcgttctgtcagtgttctcttcagcacagtccatccctcttgcccgagcatttcatccagagggttccattcaccaccctgccgtcgtcaactgttccgataccgccgaattacccgatgagaaaatcgtcttaccggcatcccctgcatcacgaatgcattcctga

SEQ ID NO: 208298 - DNA, 882 bp, Klebsiella oxytoca
gtggactatcggtatttgcatgcatttgttgtgcttgccagagaactgcattttggaaaagccgcactgcggctcaacatcacgcagccagccttaagccgtcagattagagtgctggaagatcagcttggcatggtgctatttacgcgtgatcgtcgtcatgtggcgctgactgtggaaggaactcagcttgcagcggaggcgcggagcgccgtcagtcattacgaaaaaatgctgagccgtgcgagtagccttcgaaaaggctataaaggacaactcatactgggttatgtcggatcttccattcttgatcccgccctgacacggttaatcacctgttttcgcgagactaaaccggatgttgagattgttattgaggagcacaacgttgacgaacagctcaccctcctgctcgaccatcaactggatatggggctgctccgatcgcctgttccgcattttgccaacctggactacgtggatatcgccaccaggtcactcatcgccgcagtaccgcacacgcatccgcaggcaggtgccggtaaaatagagctggagacgttgtccggggatacatttatgatccagaaagatccgcccggggtcgggctaggctggtctgcattgcatgcctgtgagatggccagttttgtcccgccaaaaatctattttactcgcgatgttgcggtggctattggcatggtgtcgatgggaataggagttacgctggtgccagaaacccagcgttctgtaacgttgcctaatgtctgctattgcctgctgcacggtcccgaggccacaacgaccctaacgctttgctggccgaaattcaggaaaagcagggaactgatcgagtttgtccgctctttaacgcttggttga

SEQ ID NO: 208299 - DNA, 1485 bp, Klebsiella oxytoca
atgtctcaaacacaaaaagtgactgacctacgcagtgcgctggccgtactgcgcaagtttgatgatgagcttatcgaaaccgatgaacccgttgatccaagtgcagaactgtcaggggtgtaccgctacattggggcatacggtacggtcatgcgtccgacccgtatcggtccagccatgctctttaaccggattaaaggctataccgatatgcgagtgctgataggtcttctcgcctcgcgaaaacgcgtggcccggctactggataccacacccgataagctggcctttttattgaaagacgcggtaagcaccccgataagtcctgtcgttattccgcaggaaaatgccgtctgtcaggaagtagtccatctggcatccgatccgaatttcagtatcctcaatatcctgccagcacccacgaatacgccggaggatgccggtccttacttcactctcggtatgtgctacgccgccgatccacataccggcgagcatgacatcactattcaccgcctgtgcgtgcaaaacagggatgaaatatccatgtacttcgttcccggtcggcatctggatttgttccgtcagaaggcagaggaagatggggccccacttcccatctcgatcagcattggtgttgacccagccattgaaatcggtgcctgcttcgaaccgcccacaactccacttggttttgacgaactgtcagtggcagggagcttgcgtaaacagcctgttgagctgtgccagtgtctgaccgtgaatgcccgggccattgcgaacgccgaagtcgttatcgagggggaactcattcctaactatcgggtcagggaggatcaaaataccaacagtggtaaagccatgccggaattccccggctataccggacaggcacagcaaatggtgccagtgataaaagtgaaagccatcacccaccgccgtcacccaattctacagacctgcattggtccaagtgacgagcataccaatatggcagggatccccaccgaggccagtattctgcaactggtggagcgcgcccttcccggctttgtgcaaaatgttcactgcccgtcacccgggaccggaaaatatcttgccgtattgcaggttaaaaaatgtctgccaaacgatgaaggtcgtcagcgtcaggcggctcttctggccttctccgcattctcggaactcaagcatgtgattctggttgatgacgatgtggatattttcgatctcaatgacgtgatatgggcaatgacgacacgctatcagggggatatcagcacggtgttcatacccggcgtaaggtgccatcccctcgatccgtcctctgacccggcttttagctactccgtccgcgatcacgggatcgcctgtaaaactattttcgactgtaccgttccgttcacgatgaaaggccagtttcgccgcagcgaattcatggaggtcgagatcagtcgtttcctcccggataacttcaagtactga

SEQ ID NO: 208300 - DNA, 615 bp, Klebsiella oxytoca
atgtcgacatctgaatgttctcctcgcaagcgcgtcatcattgggatcagtggtgcatccggttttttatatggagtgcaggccctgcgttatctgcgacaacttcacgtggaaagtcacgttgtgatttctcctgccgctcatctgacccgcagtctggaaaccactctgtcagaagacgacgttcatgagctggctgatgtaatttatccctttgatgatattgccgccgacatcgccagcggttcgttcagggcatccgggatgctgattgccccctgctcaatgaacaccctcgccgctgttgcggcgggctttaccaacagtttgctggtgcgggcagccgatgtgactctgaaagagcgccggaggctggttctgatggtccgggaaacgccgctgcatgccgggcaccttcgtaacatgcttcaggttaccgaaaccggcggcatcatttttccacccgtacctgcctggtatgcacgccctgaccgtactgagaacatcatcgctcatagtgttgcgcgggcactgagtttactcgaccttgattgcgacacattgccacgctggggtgaaactcccaacctgaataacaggagtaaatcgctatga

SEQ ID NO: 208301 - DNA, 720 bp, Klebsiella oxytoca
atgattacaggcccatggtttaacggctctgccgtcgtcatcggcgggatggcaggcgccatcattagctcacgtctacctaaaaggttacgtacctcaatgccgctcatttttggtgcggcctccctgtgtatggggatcgtcctggtgacaagtgtcagccatatgcccgtcatggttctctcggtccttctcggcacactggtgggcgagctctgctatctggaaaaagggataagccacctgggcggacaagcccgtgggttggtggagctcgtcgtgaaaagcgatcccggagacaaagactcacaggcgcagtttttacaaaactatgtggcgatcatcgtccttttttgtgccagtggcaccggtatttttggtgcgatgcacgaaggcatgaccggggactcgagtatccttatcgcgaaagcgttcctggatttgctgaccgccctcatttttgccacaaccctgggttacgccgtggcattagtcgctgtcccccagcttataattcagttagcactcgcctacagcgcgatatatatattgcccctgaccacgcctgccatgcaggccgacttttcagctgtgggtggcgttctaatggtggcgactggcctgcgtatttccggtatcaaggtcttcccggtagccagtatgcttcctgcattggtactggcgatgccagtttcctctttctggacaatctacttctga

SEQ ID NO: 208302 - DNA, 261 bp, Klebsiella oxytoca
atgaatgtactcacccgctgtaccctactccccttactgtggctcagtgctactcaggtgtacgcctttcaaagcacactgccagaacagcccttttctacaaggcaatccgtaaattcggagcaacacactcaggaatatagttactcagacaaacatgaacctttgcaaacaacgcctttagggggctgcaatgctagcccgattccgggatgtaattaccctacgcaatcggattacgattttcaccagaaggagtga

SEQ ID NO: 208303 - DNA, 2673 bp, Klebsiella oxytoca
atgcgcgagaataaacatatctgggttgtcgatggtgatgatttaaaaacaaagcacagacaaggcggaatgattgcattaaaaggatttggatatcaggaggcacatgcgttaaattatgttataaaattattgacatgcgatgatggcttagtacagctaagatatgagggggctcaagatgtagatattatgtttggggatggaaaacagctctatatacaatataaagaaactgctgggacagagtacacattcactgaaatgcgtgatattttgcatggattcatgcgtgatactatagatgcatgtggacatccagctaatactaagcatcttgatactctacaactgagttttttgtttgtctctacgggagtctttgtcggtcctgagatgatgaaattaattagaaaaacatcaaccaatacacttgcaaacacactctcaaaaggatttacatacgagaaaaacccgctttctacaaaaaatgagtacaaagaagttgctgaatatgttcttaatcatgtgcaagttagccttgatcaaaaacaggaaattaagaaagatttagagttgttggcaatagctagattggttttatttggcgtcccaattgaacgaatcaatgattctatttcaagaattaaagaattatttataaaaccttgctcgttatttgcatatgatatatctcaatgcctaacaggccttgctccttaccacccattacataatgattctccatttaatcttcttcccggcgacaatcaatttacagcaaaagaacatgccgctgaagagtttagagagagtggcagagggtcatgggaagttgtccattatggtatggatattattcgtgaccaatctgataaagtttatcatgactttaaaaatatgggtaaatctttatcgatgatcctaatttcgggagcatcaggaaccggtaaatcaacgcttatccgtcgtgttgcttgggatatacatcgttcaggtcaagcccttgttttcgagatgacaaatccatcaaaattaattgagcaggcatgggatgaaattgcacgtcttgctaagttagctggcaaacccgctctaattgtcattgatgatatttcaaactactcgcaaatttttgaagatctacagcgtcatacctatagtaatatagtcatcatagcaagtgacaggtcggcgaattgcatccccaaaaattaccctgcgtctcaatgcatccatactcttacttcggtatctgaaaatgaaatagctgaactagctaatgttcttgatagaaaagtaagttcagataataaaagaaaattactatctttaatgcaatctggggagattttttccctttccttgctattaatgggatcaagtctaatgataatagctgagcgaactatacagaaagctaaacaacatggtaataaagcgtacgacctttttctcagtctttgtgtgtgtggtacttatgatcaatcagtacccaaaagtctgctaatgcgtattgaaccatctgttagtttttgggcagaagctaaaaaagaacacttagtttttgatgaagtaaatcgtcggtttagatctggacatgcgaaactttcaaccagtattttagaatgtgttaaacctgatatcatggctttgaaaatatctttgttaaagcatattgatgccagagatattgatgaacgacgttttggattgggattgttgcagaatggactagaaaaacaagctcctgaactgaaatattttacacatcctcttatagaattttccgagactatagttgaggttggtgattatctggatattgtccgttgtaaaaaaattatagatgccgcgataaatatggaggcatataatctaaatataactagtttacgtttgcaaagcgtctgcacgtcagaacgcgtacgaacaggtcatgatgctgtagtttacttagctgatactcaagaagatgtagaaataacgtttgccgtagtttcaacagtctttgctaaaaacgagattttttttggtcgaagcaaatttatgcgctggattagtgaacatacccgaggacgagaagtgcttcagcggcaagcagttgttcttcattttgaatggttaaaacttaatggatatcctttctctgaaactttagcactaatcaattgtataacacatggtaatgctcagctatcaaatactacaaacactgaatttaccgaaataatactaactattttaaataacctcgatttttcaacaaaggctcagattgaattattagataaaatatgtgaatctaatataagtcgattgcgtgatgagcgggcggtaggcagtattctggatagggtaaatgaatttttagataatataaaattggatagaaatactgagattttacgtaaattagcatcattgtcgataagtattggaggagaaactgacaaaaataaaatgtcaaaactactgattaaattgttaccatctcttcctccaaaatttatgaaaatagcttttttttggttggtaaaattatcggaaagcaatcaaaaatccatgatggcagattggaaagctattttccaaaatgcggataaatctgacttgcctgacttgataaatagttttatcaaagcgctatcacccggtttttatgttgattga

SEQ ID NO: 208304 - DNA, 3603 bp, Klebsiella oxytoca
atgaataattcgtcgaaacatatcctctccgcatggctagattatctgaaattcagcggtgcggaaaagagtaaaataccggccagccaggcgcatgaacaccatcagctcatgctcggtaaagacaactgtgaagaaaaccagaacggggtagtgctcagcgttacgccagaaatgcgcgaaaactggcgcaggcgtttcgtcaaatatggtgaaaaaggtgagattacccatattgagcctgtcaacctgctgtttccggtgttgcgctgtatcgaaaatgagcgcggcagagccaacgtaaagtacctgccgctgttctcttttccactccccaaatccttctttgaacagggcaatacctcgctgctggttccggttaaagacggacaactggtcagcgcattccccttcgcttttcgcgagatgtttggcatccagctggatgaactgggtgagaaccgccatatgatgagtatcgtcagcgcgctcaccgggtgtaaatatgacaccttccttgaggcatttgaggctcttcagatatgggttgctcagcaatcaaaccgcaaataccagggactggaaactgcgtttaacgccctggtggcaccactgcataatgaagattacaacctcaggcgtgatgcagaagatttcacctggttgtgcgataacgcggctggtgacttccctctgctggagcagtatctcaaccatattcacaatgacgggaatgcccctgacatatacgaagtggtaaccggcggtctgtttgaaacacaatacccgctgggtcatggacagatggcggcaatacaggccattaatcaggatgagcgcctgattgccgtgcagggtgcgccgggtacgggtaaaacaacactgttcaaatcactcatcgcacaacagctggttgccagagcactggcaatcgctgatggaaaggaccagaacttcggcatgctggtaacgtccacggcaataaaagcggtggaaaatatcattgacgatctgcgcagtgaccctgcaacccaggatcttgactggttatggtttcatagcggctcgaacgaacaggttcagcatgagcttacccggcttgagcaactgatcagccgctggcggcaggaaagctatgacgaacagcaccagcgcgattttttagctgttctgctcaggcatcgcgacgagttgaacgcctgttaccgggcgtatctgaatgaaaaggcaaccgcgatacagtctgttgtggattgtggtctggacaccaccaacgcagaagagcttccggcacgtttcatggcaaaaatccccctggtagccgctcaggcacagcagttgggaattgacgtttcactgcatcatcccgacgacctggacaacttaaccagccagctggagctatgcctgcaggaacttcgcgggataaaagcgcagcgtttgcaggccagcagaatttaccagacattgcaggcgacatggccgcagcagcatgatctggcgcagatactgcgctggatggattcaccactacgccccgcactggaactgcattaccgcgattatccgcgtaaagggataaagcgccatctggcccgcctgttcgagggaaaatacccggcacggctgcaacagatgagccttgctgcaccggatgactttcagcatttcagtctttcttccttgccccatcgccagttagcggctctggctgatgcgggagaaatgctgtcacatcagacagacaacctggccctgctggaactgctcatgcatgacgaacccgatgggcagcaggaagaaaatctggtgagcctgtgtgctgatatcgcaacactccggaaacaatggcagcaagtcacccgggcacaacaggttatggctcagtatcaacagcattaccccgaaggtaactggtgtgacattttgcgtaaacgcttcatcaggcaacaccgggaaatgtttgaagccgctatcggttatctctggcaggaacaactgaagcggaaaattgagctggaagaggtactgactcactggcgggctctgatgagtaatcgccgcagtgcaggctactatcgctggctggataagctggatgaattctatcgcgcactgtcactggtgtatccggtaatggcaaccacactggtctccgcgtggaaagtggcgggttatcgaaaacttgatgaactcaggggacacaaaccctggcatctggcactgtgcgatgaagcaggcatgatttcgcttgaatctctggtgccactattgagtcgcagcgagaaagcgatgattgtcggcgatcctctgcaaatcgaacccatcagaaacctgtcaaaaaacctgcaaacacaactgcgcgaacgtcattttgctgacaataatacgttatatgagcgagtttcacctgcaagcgttacaggctggcaccgcgcggcaggtacactttctggacgagtggatgataccggcaacggtattattctcgatgagcatcgccggtgccagaaacccattgccgatctctttatccggctggcgggctatcatggcgtcagcgtggaaacggcctccccttccgaccgcattgccagcgcctttgagaagtctggtgggcatcatttgatgttctacagcgtagagggccagaaaggcgatatggttaacaccaatctggatgaagtcgaggctattgagcaactgctgaataagttggaagaagccggttacgatctgactgccgatgtgggcatcgtcactccctatagcaatcagaaatcattactgatcaagcaccttgcccagcgtatgaatcactggcagaaaaactgcattggtacagtgcatcagttccagggcgtgggctttgaggtcatcatttacagcccggtaatttttcatcctcttgataattcaaattttcagaacgatgcgcctaacatgctgaatgtcgtggtttcacgcgcaaaacagcagtttatcgtggtaggtaaccaccatcggttgcgacaggcaggtggatacctgaaagttcttgcggacactgttgctgaagatttccttcttgaacagggtagccaacatccaagtttcgacagcctgatccagacaccacgtttgctgcgttattaccgcgactgtgaacatatcgccgcattcagtgcgctggcgagccagtgtgaacaggagctggttattatcactccgtggatccgtcggggtggtaaacaatatcaaagaccggaactggcgcaactggtagcaacacagcggcgtgatgtcagcgttaaagtctactacggttactaccatcaacgtctggaccgtgcagaggataacgatgaaactctggttgctgagtaccgtgaacaactgggaaaagacaatgttatccgtctgaccgaaggtactcatgagaaggtactgatgatcgatggccgctatattgttctcggcagctggaactggctgtcacatggttatcatgatagctgtgagcgtagcgagcagttcagtaatgctattcgtcatgagattagtgcggagctggatgatgtgtcgctggtgaaggagcttagggagaggttgaggctggaataa

SEQ ID NO: 208305 - DNA, 876 bp, Klebsiella oxytoca
atgggaacttcaacagcttatggaggacctggcggcgggactccacttattccatcatggttggataacgaaaccccggtatctccgccagatattggcactggatctggcggccagcagccaacagatggccctgaaccactaacgcctccaaatcacccaccaatacctaatgcagcggatccgcaacgtttctcaagcgcacgcagcaacttcacgcgatttgcaggatctggaggtactgatcgtgcaagccttggacgagccatatcgaagtatgtctcaacgtcatcaggcggtgctcgccaagctgcacagcgtatgggagcgtccagaggagcgagcacacgactcctcggtttcttggcagatgcgcaagcaagaggtgttaatgaagctctgcgctcactggatctagaatctctggcaggtcgcccaataacagaaatttttgttgggctagccgactatatctgccctggtgcaggcacggttgatgaagggattgctcgcgaagcatatattgagactatcgtagagcttgcgagcgaagggctcacagatttgaatacatttacacaagatcaaatgcataccgttttcgaattatatgctactcatgcgattgaagctcgtatatgtaatgatatcgggaccaaagcagtgtccatgcctataaatgctcattctgcacatcttgttgagcagcaggtgcgtgatttcatccgtggtggagtaagcgatgctctggcacgagctcaaacgggtactcattatcttaccaccgaacaaattcaagggttcgtggataccatttatgagtctgcattcgggattttacaggcgcttggtgaagcagaggctaataatcaatga

SEQ ID NO: 208306 - DNA, 1368 bp, Klebsiella oxytoca
atgaaacgacaactcctggttggtcatttcggctacgacgattcattttccgcagtggcaggtatcgatgaacagataacttacctacaactcatcgctagcaaacaaactttggattatggtattggtcattcactgtccagactcaaagatatcggaatattcccctcagaaataggcattgatctgctagtattagccgctcatgttcatgctgctgatacacgaatatctcgtgttgagcagtcgcaggattcatggacacgcgaaattagattgatagtgcctgtgagtgagccctcccgctggggctcagcagcaccaaccatcaaaaaatctctcgattttctcaccggcgatcgctggactatagatttcaggccacgccctgagcgttttgctactattgccgaagaagcaccaccatctttgattgctcatccgtttgattccgtaagtttgttctctggcggacttgatagcttgattggggctattgactcgctggaaaatggtgcaacacctcttctggttagtcatttcggagaaggtgcaacgagtgacgcgcaaagtaagttatttgctggcttgaaaaaacattacaccacatcatctttcgagagattacgggttggtatgacctttgaggaaggactcgtcgaaggtgttagttcagaaagtagtactcgaggcagatcattcttgttctttgctctcggcgtttttgcaggaacaggattaggggatcatttcgttttgcgcgtccctgaaaatggactaattgctctaaatgttccgttggatcctctacgattgggatcaaacagtactcgcactacgcacccgtattatatggcaagatggaatgagctactttccaaacttggaattaatggcgaaattcaaaatccgtattgggacaaaactaaaggagaaatggcttcggcttgccaaaatacttctcttctaaaaaaactagtttcagactccttatcgtgttcatctcctgccaaggcccggtggttaggacatggcattgaacaatgtggttattgccttccatgcttgatccgccgtgcagcattgatggcagcatggggttcagatagcgatccaacagtatatacagtgacagacctccatgagcagcccttggacacacgtcaagcaactggagttcaagtcagatcctttcaatatgctatagagcgtctgaaaggaaatccacaactcgccaatgtcttgattcacaagccgggttcactcgcggatgaaataatgcacctcgaacagctagctagtgtctataggcgtggccttgctgaagttgaacgactcattgatggtgtcgcaacgagaccttgttga

SEQ ID NO: 208307 - DNA, 753 bp, Klebsiella oxytoca
atgaatccaactaaaggactcgtggactttcactgccacttagatctctatccggatcattctgcggcaataagaggtgcggaagaagcggaaatatttacattagccgttacgacgacccctcgcgcatggccccgcaatcgcgagcttacactacgcacaagatatgttagggcagcattaggattacaccctcaactggttgcagaacatgaaaacgaacttgagctatgggaccaatatattgcggagacacggtatattggcgaagttggattggatgctggtccccgttttttcaaatcgctcgatgcacagaagagagtatttcagcatatactgcagcaatgtgcccaagcaggcgataaaatcattacggttcatagcgtaagagcagtcaaaactgtgctcgatctcattgaggccaatttaccatccgagcgtggaaaaattgttcttcactggttcactggaacaaaaaacgaggcaaagcgggcgtcaaaattaggctgttatttttcgcttaatgcaggaatgcttagtaacgtgaaacatatacccatggtccttactataccgctggaacggatattgacggaaactgatggtccattcactcgtacaggtgacaggccttcacaacctacagatgtagcaaatgttgtagaagagctggcccgtttacgtggtctatccacaagcagtatggtcaaacttattcgtaacaatctaaggacattgctaaatagttga

SEQ ID NO: 208308 - DNA, 414 bp, Klebsiella oxytoca
atgcagctttttcacggaacaagacagcgttttgataagtttgatgtggcatacaaaggaactggtgagtctggaaacatcgctgccagctggtttacggataattttaaaggggccagcaatcatgcgttattaaaaaacagaaatcccggactgccactggtttatcggtgtgaactgaaagccggggcgattatcgctaatcaccgccagccgctcacagagcaacccgaaattgtggatcgttttaaatcaggattacctgtggacatcgagttcggaaatggactaaaccgatttgtcctaaaaaaaccttgttatacaaagtacaaagggaagatggtttactccggacacactcctgtggaaactgatgaacttattcgtctttatctggcactgttgcaaagttag

SEQ ID NO: 208309 - DNA, 606 bp, Klebsiella oxytoca; identical to SEQ ID NO: 94644

SEQ ID NO: 208310 - DNA, 618 bp, Klebsiella oxytoca; identical to SEQ ID NO: 94645

SEQ ID NO: 208311 - DNA, 444 bp, Klebsiella oxytoca; identical to SEQ ID NO: 94646

SEQ ID NO: 208312 - DNA, 1053 bp, Klebsiella oxytoca; identical to SEQ ID NO: 94647

SEQ ID NO: 208313 - DNA, 201 bp, Klebsiella oxytoca; identical to SEQ ID NO: 94648

SEQ ID NO: 208314 - DNA, 261 bp, Klebsiella oxytoca; identical to SEQ ID NO: 94649

SEQ ID NO: 208315 - DNA, 540 bp, Klebsiella oxytoca; identical to SEQ ID NO: 120922

SEQ ID NO: 208316 - DNA, 672 bp, Klebsiella oxytoca; identical to SEQ ID NO: 94651

SEQ ID NO: 208317 - DNA, 627 bp, Klebsiella oxytoca; identical to SEQ ID NO: 94652

SEQ ID NO: 208318 - DNA, 507 bp, Klebsiella oxytoca; identical to SEQ ID NO: 94653

SEQ ID NO: 208319 - DNA, 1098 bp, Klebsiella oxytoca
atgaaaaaacttgccctgcccctgttaataccgtcgctgttaagcagttgcgcgggatttaataaccgtaacattgctcctgacacacctgcgctcgtgtttgtcgacggccagatcagcgatagtgccgatatcattacacagacacagcggcgaattgcgcctccggcggccactcccgttcccgtacgccagccgacatctgtagcggtaacatcgcagacctccccgctgccgcaaccaacaatgatggcctcctccgcaaaacaagtcagctcagtgagccccatcatgaatccagcgctgccggcactcacatttaccggcacaccaggtcccgttgccgttctgtcattatcaccggtgcgtaacctcactttcgaacagtgggtcaggcgcatcattccgactggctggacgctgaactatgagaatgccctgcgacctgtactgaatacccgtatcgtctcggtcgacaccaatgaccagtggaccagggtgctcaaccgtctgctgacagagcaatccatccagggtcagctggactgggatcgtcatgccgtcacattgcagcgaaaggggcaaaccgctcagatgaccgtccctgcactgtccactggaaacctccctgctccaccacaggcgtctggcgcgccgagaaatccgttcagcggaccggaggtgacccaacccataccgccggcagcggttaaaaccagcacatcctctgtaacaacaaaaccggtgaaggcaccaacagcggtagttaaagcacaaccagccaccggggaaccagtcgcacctgtggttcagggtaaaacctggctggcgccatcgggaacgactcttcgggaaatgttgatgaaatgggctcaggatacccgctgtgaatcaggcgcatcatcgcactggacggttatctggccagtatccgtgacggattatcggcttgacgcaccactgaccttccgcggctcatttgaaaccatgctcggtcagatattcgacctttaccgttcagcacagaaaccgctttatgctgaagcttcccgcatgcagtgcgtggtatctgtcacagacactccggcaggtcggtga

SEQ ID NO: 208320 - DNA, 438 bp, Klebsiella oxytoca; identical to SEQ ID NO: 94655

SEQ ID NO: 208321 - DNA, 1677 bp, Klebsiella oxytoca; identical to SEQ ID NO: 94656

SEQ ID NO: 208322 - DNA, 1305 bp, Klebsiella oxytoca
atgaaggatgaggattacctgtttacaatccgggatggaaaatcccgcagccgttactggctggcggggatggactgggcgccaacggaaaaacagaaatttcggctgccgtcatttcaactaagaaaatcacgttccggaagaacagacggcgttggcgtccacacctcaaccgggcaattcaatacacgggaaaaagggcaatcagtcgcagggagtggcagattgcccgtccgttatcgacgtcaccagctcttttcgctggcactcgcgttctgtgccagcacacgaaatggatacggcatttatcggctgagtagtaccgacttcgtgtttctggccagtattaatggtgtgcctgccgtcactgccgataaaacagggagtgcggacaaaatgcaggagctgctgacactgttcctgagcatgaacgaaccgcccccagaaggctgggactgtctggcatcagtggaaaccccccttgatgctaacagtctctttgccggactatctgcacgcaggcgacagcaatgccgtgtgcatgtagatgggctccggagacagcgctggttactggcttgcgcgatactgctgctcggctcaggcgccattgcctggtggcagacgaccacaccaccggaggaaccggtactcaccgctgaagaaatacaggccagggcgcgcgcaatgttcgccagtcaggcaaaacctaaggttttgcctcatccctgggcacgcgaggtaacagcccaggctctgatcgaggattgtcagagaaagaccgatccggcgctacatgttctggggagctggaaactggcatccgggacctgctctcctgacgggataacccttttgtaccagattatgcccggtggcacagttgaagggtttctcgctcgcagtcaggaggtcttcggtgtcacgccattattcaatctcaaggagggggggcgggaagcccgaatttcattaccgcccccggacagaccactcagagatgaagcagtgcctgacagttcattgcagctcatccccatcctctcctggttccagcgtcagcaaatcacactcaacatcatcgatgtagccatgcctccagtcctgccggggtcgaacggagaaccgcctcctgtgcaggactggcaggaatacgcgtttagtttttccgcgcccctccccgccatcatcttattcgacggtctggatgaaactggtatccgacttacccgtttaacattcgagctgaacggaagtgcgttcagctataccactgaaggtaaaatttatgcgtcagcaaagtaa

SEQ ID NO: 208323 - DNA, 516 bp, Klebsiella oxytoca; identical to SEQ ID NO: 94658

SEQ ID NO: 208324 - DNA, 1560 bp, Klebsiella oxytoca; identical to SEQ ID NO: 94659

SEQ ID NO: 208325 - DNA, 1095 bp, Klebsiella oxytoca; identical to SEQ ID NO: 94660

SEQ ID NO: 208326 - DNA, 615 bp, Klebsiella oxytoca; identical to SEQ ID NO: 120933

SEQ ID NO: 208327 - DNA, 558 bp, Klebsiella oxytoca; identical to SEQ ID NO: 94662

SEQ ID NO: 208328 - DNA, 675 bp, Klebsiella oxytoca; identical to SEQ ID NO: 94663

SEQ ID NO: 208329 - DNA, 1242 bp, Klebsiella oxytoca; identical to SEQ ID NO: 120936

SEQ ID NO: 208330 - DNA, 969 bp, Klebsiella oxytoca; identical to SEQ ID NO: 120944

SEQ ID NO: 208331 - DNA, 1662 bp, Klebsiella oxytoca; identical to SEQ ID NO: 104011

SEQ ID NO: 208332 - DNA, 744 bp, Klebsiella oxytoca; identical to SEQ ID NO: 104010

SEQ ID NO: 208333 - DNA, 477 bp, Klebsiella oxytoca; identical to SEQ ID NO: 95283

SEQ ID NO: 208334 - DNA, 267 bp, Klebsiella oxytoca; identical to SEQ ID NO: 95284

SEQ ID NO: 208335 - DNA, 621 bp, Klebsiella oxytoca; identical to SEQ ID NO: 95285

SEQ ID NO: 208336 - DNA, 498 bp, Klebsiella oxytoca
atgagccttgtagccggtcgcaccattatcccctcttcggaggatgtaccagacactgacgacggtggcgagaaagtcaccgccggaacgttctggccggaaatcgccctgagcgatgtgcgcatggagatgcgcatcaatggcgcggtgacgacttcgcgcctgaagcaggccgtgatcgagggagtctcgcacactattgaccagcttgctgactggcaggccgctcagttggcagctggttacacccggcttgctgatgttccggcggtagcagttaacggtgagagcgtgaaggttcaccgataccgccgggcggtattcagcatcgcccgcgcgcacatccttggcactaaccgggacgtggataccaccggtgatgcaggcgagaaacgcgccgttgcgctggcgtcgcaagccgatgatatgtggcgcgatgcccgctgggccatctccgatattcgcggcactgtacgcaacactgcggaggcgttctga

SEQ ID NO: 208337 - DNA, 1047 bp, Klebsiella oxytoca
atgagaaatcctacccgtaagctgtttgacagctacgttgcccgccaggcgcagcttaacggcgtcagcgccgccgccgttgcggcacagttcagcgttgacccgaccgtgcagcagcgccttgaagcggccgcacagcaggatgatgcctttctgaaactgattaacgtctttggcgttgaagagcagatcggtcagaaaatcctgatcggcagcaaaggcccgctggcaggcgtcaacaacagcaccaccaaccgccgtaatcccggcgctaacgacaagatggatccgtacaactatctgtgccggaaaaccaactacgactacaccgtcagctatgcgcaaatggatgcgtgggcgcatcagccaaacttccagccgctgattagctctgcgatggcccgtcagatgtcgctcgaccgcatcatgatcggctttaacggtaccggatacgccgacccgtcagaccgcgcagcgaatccgctgttgcaggattgcggtattggctggctgcaaaaaatccgcaacgaagcggcgcaccgtcgaattactggcgtgacgatcacctcgcgcaaccagaacaacgccattgttgctgagggcacctacggcaacgtcgcggctgcggtctatgacgctaaaaacagcctcatggacgaatggcataagcgcaaccctgacaacgtggtgattttgtccggcgatctgctgacaaccagcaatttcccgaccatcaacgccatgagccagaccaacccgaataccgaaatgctggctggtcagctgattgtggcgcaggaacgcgtaggcaacatgccgacctttatcgcgccttacatgccgggtaacgccattctcatcacgccatttaaaaacctctcgatctactaccagcgcggtggtctgcgccggacgatcaaagaggagccggaatacaaccgcgtggcaacgtaccagtcttcgaacgatgacttcatcgttgaagattacggcgcagtggcctttatcgacggcatcacctttgccgaagcaccgggcggcgagtaa

SEQ ID NO: 208338 - DNA, 822 bp, Klebsiella oxytoca
gtgactcacgcctcgggcacggtcggtgtcgtaggtgataacgccgccgggcgtgaccaccttgcgcacggcacaaaaagcggtgatcaggtcatattcgccgcggtcatactcccagcggccggcgcggatcagttgcagcatcttcagtaccagcatgcgcttactggctggcgagaactggtagcacaccgccgccggaaaacgtttcttcacgagctggtacaccgcttcgccaatgccgctgccgtcgatgccgatgtgctgcacgttgtagcgcgtgagcatgttaatgatcatggcggcctgcgcctcaaactccatgccgcgcacgcgaatggtttcaatagtgcggaacttgccgccggggatcagtggcgccgcgttaacagagatggccccgctgtcacctttgccgctggagccgttggggtcgtagccaatccacaccgggcgatcggccattggccgcatggcgtaaggtttccagtccggccactcgtcgtaaccgtctgcgccgcagctcagcagcatgttgtagtcaaaggcggtttcaccgttcttgatgaaggtgcaggcgtagaggttgtcgtactcttccgggctgttttcctcgcggatttcgtcaatgtcagtcagatcccaaccgttatcgaccgcatcctgcaacgtgacgatctggcgccagattttgtccgggcacatcaacccactgttaagcgtcttccaggacgtgtcgaactccacgcgcttaccgtggctgcggcctttgttgaaggcctcaccagaccagaaggggtacgcttcatgactctctgctga

SEQ ID NO: 208339 - DNA, 567 bp, Klebsiella oxytoca
atgagtattattttaaacaaagtaaaagcatttacaaacacaaaagaaaacagaattgaaaaacttttattcagcaatgatattgatttagtgaaaagagtattgataaccaatcctgatattaacttagactttattaatgatgaaggtaaaacagctttgtttggtgctgactatcttaaagcagaagctttaataaatgctggtatcaatataaatgctaaagataaagacggcaatacagcgttgttcttttctgattatatgacttcaaatcttcttttaaacaaaggggctaatgtcaatcatagaaacaatgttggtatgacagcgattttcagagcagacagatcaaaagcaagcttgcttataaaggctggagcaagagttaacttcaaatcctacgtagacaacactacagctcttcaaatggcttacataagacgtgatgaggctgttatgaccgttctcatagaagctggggcagacattcatcacaactggagaggctactcagctcacgctaaagcattcatgacaactattaacgaaagacaagcagcataa

SEQ ID NO: 208340 - DNA, 663 bp, Klebsiella oxytoca
atgagtaagaacaaaaaaaacattaaaaacaaaggcattaagaaagatttaaacattaacgttcaacaaaaaatggagtcagaggctggggaagaaatagaagcaggacgtaaaacagttatagcttttcttctgtttttacttatttttttaatacctctttttacggaaactttatcagagagaaaatatgacaatcaaataacttatgatgttgttaatgaaaataactatgaaattatattaaataataatagatacttccttgatttagattttgatgatgaacaatatgcttcagccataaaaaattccaacattgattttattagtctttctttagaaagcaaaagaatacaactgaatgatgaagaatgtttatatacagatgaattatgtaaaaacaaaatcaaatctgataagttaggtttaattacgaaaatacagaaatggtctgacgatagagttaatcttggtgttatttggttgagtaaaaacaaagcaaaagaagaagaattacaaaggaatacacctaccattataagaatactaacatttccaacttctaaatataaccgtgtaagattggcagtaggtaataaccttataattgttggcccaattgatttctggatcaatatatttaaaaaaataacaccttaa

SEQ ID NO: 208341 - DNA, 804 bp, Klebsiella oxytoca
atgagtgaaccatcaggaaataaaatagttagtttttttaaaaagcatgatatggcattacattatatcattcctgttttactgattatcatatcgcaaataatgagggtggtagtttcagaagagtttttaaataaccataaacttattcaattcatttctattgaaatgccactaatggcaggggtgatgtttttaatgtttttggcaatcatagcaatatggcattttgctttatatttgttaagtgcgatgatacaaagtaaaagattttatatccagatcataccgataatttcttttataagttttttgctttctgcgataatagctacgaatgaaataaatcaggtgaaaccagaaggtattttaacctcaccatatttttatactttattttttatatatacagttggtttatggttatcatcatgtttcttgtgtgtatcttcagttatagccgatgaaatcaaagacatgaatattaaatcaaaatttgtattaagattaaaaaaatcaggaaaaggcaaggacataatacttactgtattactaatgatgttaacgacaatatgtataagtctatggtttgctttatataatgccgaaggtcttatttattataaatatacatacatagcacttccattcattctaatcttagcaagtgtagtcatgttattaattgaagtctgttttggtctattttcagacgacaaggtagaaaacttaaaaggaatgaaaaacaaaaaactaaataaaaggcaaaagagattattaaaaagagaaaaagagagaacttaa

SEQ ID NO: 208342 - DNA, 294 bp, Klebsiella oxytoca; identical to SEQ ID NO: 121365

SEQ ID NO: 208343 - DNA, 129 bp, Klebsiella oxytoca
atgggaacggaaacaagagaaaaagaaatagaaacatggtcagattttattgatgagtttcttaaaaaaggtggtgttatttatgaaagtaaaacaaacaaaaaaagagaggcagcatatgacaaataa

SEQ ID NO: 208344 - DNA, 276 bp, Klebsiella oxytoca
atgacaaataagatgaaattaggtttatggtcaaacagaatagttatgttttcatgtgctgttttcgttttagggattgcttttggatttataaatgaaagcttggcgagacaactattaccgtgggtattttcattaggcactatatatataatatacaagtcttactctatatataaatatataaatgaaacaggccacgaaaataacaatataaaatcttccattgaaataatagaagcagaaacaacaaaggagaatgattatgataaatag

SEQ ID NO: 208345 - DNA, 558 bp, Klebsiella oxytoca
atgataaatagttttagattattaaggggcaggaaaagtaagaaagggttttcactattggaattgcttttaacgttaggtgttatcgcaggaataataatatccgcttttatagtttttccaaaagttcaggcttcacaaaagatagataaagagagcagaaacataacagctattcaagcgggagtgaaatcactctatggcggaagggctaagatctcatcattgaatactgatagcttcattgcgtctaagaacgcccctgacaacatgatcttggatggtaagttagtgaacgagtggaaaggcaatgtaagcgttgaatacagcggcaatcatggcaaatacaacatcatgtatgatgccgttccccctgatgcttgcgcaaaactcattacagcggtttcaggtaattttgtgagtatcactgtatacaacgacaacgggagcactgatgttaagaacttagaagagggatatggaatagacataaccaaagctacagccgcttgcgcatcacaagaaagctcaactgttatgtttacatccatcatttaa

SEQ ID NO: 208346 - DNA, 546 bp, Klebsiella oxytoca
atgacacacatattaagtaagaaaagaaagaaaggattttcattgttagagttgttgttggtttttggtgttatagcagcaatcatagtagcggtttttatggtttaccctaaagttagctcaggtcaaaaaattgacagtgatattaaaatattgggaacattaaacgcaggcattaaaaatctatacgccggacaagctgactttacaggtttatcagttgacgcagtaatcaagtctaagatagttccagaagacatagttgatgatggtttaatatgggatagttggggggctaacattcaaatagaaccctactacgatggaagcttttatattgggtttgagaacgtatctgtagatgcttgtcctaagttcgtttcacaagccggagcaagttattttaaaatagttgttggatctacagaagttaaaaatatagaaaatggtttagagctaaatatggctactacaacatcggcttgcgccaatggtgaagatggatattcagacaaaccaattacagtttacttttacgataaataa

SEQ ID NO: 208347 - DNA, 207 bp, Klebsiella oxytoca
atgaaaaataaagttttagaagcatggttttatatagttgtagcaatgacgtttacgggatattcattttacctgtttttcgagacaacagacatatcaagatatggtgtaataggtatcatttttaatcttgtttcgttaaaactgttatatgagtcttacaaaataaacaaagagataaaaagagaggtggttaatgaaggataa

SEQ ID NO: 208348 - DNA, 216 bp, Klebsiella oxytoca
atgaaggataattttttagttaggatatttgcttttctcgtaatagcatttatattttggaatgatacaagctttaccgccaacttgatttactctgtaataatggctacgttagttattgacaatattcttatgataaaagtagcaaatagaggtcatatctataaagggatgagtataaaattgctaaaagaaagtttttttaagaaaagttaa

SEQ ID NO: 208349 - DNA, 447 bp, Klebsiella oxytoca
atgagcgatctttctcacttatcaaacattcgttctctgcgtaaaatcgccaatgaaattggtgatgaagagttcttagtgttcgctgaaaaggttgaagctgtaaaagaagagatcaacaagcgaattgaagaagataagcagaaacagctactggttgaagacaagcttaaagctactactgaactactccagtctgaaggctttgaagtgagcttagacagcgtgagagcgttcctgttgggtcaaatcgagcttcctgcggcatccactaagggtaaaggcgctaagggcgtaaaacgtggttctgttgagcctaagtacgcctatacagacagtgaagggcaagaacagacatggacaggccgtggacgtatgccgttagccctgaaagcattgatcgatggcggtaaagagctggaaagcttcttgatcaaaaaagactaa

SEQ ID NO: 208350 - DNA, 474 bp, Klebsiella oxytoca
atgaaatcatgtgatacgaataaaaaactactactggatcttttagcgtttatagcttttgacatgctggatgagaaatacaataacaataaattaatcataacaaacagagctaaaaaatatttagataataactacactggtagatttgattacatcatgaatttaaagcctgaagttatctcttcaaccttcatgaaagaaggggtagaaggccatatcttcgcttacagtgataaagatgaagacattgaagatttatttgattatgttgtcagggataagttaaaggcttatatagataacacaaaatacaatcaggatgagttaactaaagagatagagattttagctaaagagtttcacaatggatatatgaagaactattcattcttaaatcaaatattattgtatgtatgcggttgctataaaataaaacctcgccttgaaaaacctatcatgattgctttataa

SEQ ID NO: 208351 - DNA, 504 bp, Klebsiella oxytoca
atgagtgaaacgaactggttagaaatagagagtaaaaatcatataaaagtgattaatgatacaaaaataaacaagcaagatgaaaagatagctatacgtgttgagcgtagtttattaagaaagataaaagctataagcatgggtagcatttcatatgctgtttgttctttagctgattacgctcttaatgatgtgataaagaataaaaaacatcttgttctcaagagagagaaaacaggcaatgtgtcttatcagttgagagattacattgatagcgacaccaaccatatatctatcacttgtgagcgtagcgacataagcacagatcttacaagaactacaatttgggcttatgaaaactttatacaacgaataaaggcaaatacaaactcatactatacgatagccgtcattggtcttgttaagtatggaatggatttgctggataccaaaaacaaaacattgatgattacaaaaaaggagaaacaatatgaaatcatgtga

SEQ ID NO: 208352 - DNA, 552 bp, Klebsiella oxytoca
atgggtaatacaaaagaatatataatccatccttttgttgcgggtgaatgttcgattgataattttgagtcagaagaaatagcggtaattgatataataacaagagaagagatagtgtattgtgatccgggctgttatttgattagtagatcgttattaaacacattaatagaaaataatgttgattgtgtgaacataattaaacatgaagatttaaaaataaagtttagtgttaaacacaacatggaacatcccaataaaacaatacctaaatggtatagattgataccgtttagtaaaggagaagaaaggaaagaaatatatttaaatgaaaacaatgatcttattgtgaatgaaagaatactcaacctattaaaaaggcatagagtaaaaaggctaaaaatagaagagtatgaagatgaacatgaagcaaagataatagaagaagaaaaggctaaaccagtattcataacagaaaaaaacaacacaatgaagcaaatcatcatttttgttgtgatcatggctgttgtcgcttattggttctttaactaa

SEQ ID NO: 208353 - DNA, 2217 bp, Klebsiella oxytoca
atgattaaaaaaatattgcttataatggcaatgctattgtatgcgacaaatgcgagtgctgatactttttcaatggattggttaactccattatcaacagattggtttatgaacaactttgtagacaaatatcttaaccctgaagctttaggcgtattctctggaataatggctttatttcttagttttcttttagtgttgggtggtatattagcagcatatacattaattgctggcacaatggctacagctcatgatggtgagatgttaggtaagaaatggtcttcaatgtggcttcctataagaacagctttaggaacggctatgcttcttcctatgccgacgggcttttgtgctattcacatggtgatttactcatttataaaagctggggttggtttagcaggaacaatgatacctctcgctatcgcctgtataactatattctttgattattcaagtgtaagttctaatcttgagataagaaaacttgctaaagatacgcttttgggtgctgcgtgcgttcaaatatataatgaagaaacagcaagagaattagctcaatcatctaaatattttagaggtaatattcaatattttagtgttcagaactttgaagcaaaaagcgatggaaaaagagtaatcggctataactttggtggtttaaaagatgactggaatacaggtgataaatctcaaatgtgcggttttcttagattagatgtatcaaactctggtgaacaacaaaatgctcttgcgtctggatctggatataaaccattagttgatgtttcgtcaattcaaaatgcggttcaacaagctcaggctaaggcactcaacaaaatggttttagatgctattgcttactcagatactttagttaatgctgatccagcaaatccaaaacctattaatgataaaattgaagaaatgactgaggcttataaaaaatcaatgaatgaagctggtaaattagcaatggctcaagctattaagattgatgctatcgctgatataacagaaaaaggttgggctttcttcggtgcttattacatgaaaatcgttcagtctataaacggaactaacgcagcaatgaatagtattccagcatcctccggtcaggccgctgaacgtttaaattatcttgcagatagatttggtgctcgttttgataaagttaaaaaaatcgttgatcgctctgataatcttaacgctgatgctactaacatcgcaggtgaagacagttcattatttacaagtctattgagaggggcaaattcaaacggtggttggttcatgggtgatggcaaagtagatcaattgctctctatcacacagcaggtaaatgttggtaatcacgttctcaatggtgtagcaacaatgggtataggcgcaagttctgtagcattgttcgcattgatacctaagctctcagatgttttgatagcagccgggactataatcgggccattcttttcgttcttgatgatcgtaggcttgataaacggcatcatgcttgcttacgtcatccctatgataccgtatatcatctggatggggattgtgttgtcatacatggctacgtgtatagaagcttatgttgcctcgcctatgtgggttctggctcacttagcacctgatgctgatgatgttgtcggtaaacaaggacagggctacatgcttacactggtgttaacacttaaaccagctttggctatcttcggtttcgttgcatccttcgtaatgatgtgtgcgggtgcagctcttataaacgcaacgttcttgatcgctacaagttttgttgactcaggttggttgggcattacttactcaatagcaatgattgctgtttatatgtgtttaaacttaaacaatacgatgaacgctacaagagttatgtctactcttcccgacactgttttagagtggataggcgcaagaggaacttcattgagcggtaaagttatgggcggttcagaagaagctcttaacagtgcgaaaagtaatactactactactgttgaaagagcaggacaagctacagcaagctctatgtcaaatatggcaagaaaccgtgagaagaaaagagatattgaacctaaaggcggtaatgaaggtaatattggtaaaggtaataatcaaactccagaaaataacacgccagcagataagggaaatcatggtcagtctataacagaccttaatccaaaggaataa

SEQ ID NO: 208354 - DNA, 600 bp, Klebsiella oxytoca
atgaaagataaagaatttgaagataaagtaaaaaatactgctaaaaatgttttaaagtcatacactactgttaatccaaaaaagattatgaataatttatatgactcagcatctaatacagttaaagttcctttagaaacagctcgttctaatatagaactgtttaataagctcaaaggaaataatgataagaaactatcatatgaagagttgtatagtataaagaatgctaatgaaaatgtaaggcaaaaaaattacacaaacttctctatagcttctttagtgatgtttgtttttatgattggtgttgctgtgatgggtggttataaaatctattatggcattgacacaacagcaaaggttttatcatttatgacatttggttcaggagtgtttttgtcatttgctgtttattttagatgtgtagtaagagcatattgcctaaaatatgcgacggttgataataagcttaatgctttaaagggaatagataacattttacctaatccattctatgatgttagagctacaacaaacagtgaagataaacccataattgcttatcttgagactaaagaagaacaagagagaaataaataa

SEQ ID NO: 208355 - DNA, 246 bp, Klebsiella oxytoca
atgacattacttagcactttcaactacattccagcttttattgttggtttagtaatgatgtttttatctgttaaagtagttcttttgccaatggctgatttaatcactaaaatcagagacaaaactactgatgttgctatttaccctcttagcgtttttatgggtgttccagctatcgcagtattttttgtagctgtatcttttacagtaagtatgttcgcttacatggttggattggttcactaa

SEQ ID NO: 208356 - DNA, 1098 bp, Klebsiella oxytoca
atgagtaaagataacgatttaaatgattttgaacaggctttttcaatggatgctccaatgcctgatttccctgattatgagattgtggccgacaacgtagccccagctgcagctccggttaagaagccagaacctgaaccagaagttaaccttgagcatgacatgatggaagtcaaaagccgtatagatagcttcaaggatgtgcttaacatcggtgacaagttcggtatgagtgatgagcaaaggaagatgattaagaaccagctttcagaactggaactcacttacgttaagctacagaagacacttaaccttgaagagccagctcctaccgcttccctgatagagaagaaaccagaagaggccaaaccaaccgttccggctgctgttgtctctgctgctgatagcataccagctcaagacttcaccgatttggataagtttacccaaatgaagaatgaagaggctaaacagccttttaaagccaagagccttaaagaccgtatcaagtctgttcgttctaacatccatgaagaagagggagagatccagaaagataacagacctcaatatgtgaaagactttgaaaaaaatcttatgcctgaaactgagctaaatgttaaaaccaacggcagaagccgctatttaaccaacgatgaattaaaaaatctttttggtgataactatcttcattcaagagataacatagaagagggaaaacttacttcaaggactcactatttcggggatggtcttttaattaaagaaacagaagacgctatagctattcgtggtagacgtaaagctaacgatattgctgttgacttgattgatgtggctaaacaaaaagggtggaacagcattgttttaacgaagggtaatcctgtctttatggaacaagcttatataagtgctatcaaaaatggtatcagggttgaagccacttctcttaaacaagaagaagaattccagatgatacacaaagcatatgatttagatcgatacatgaaatttggcgaaccaaaaaaagaagagattaaaaaggaagagtttatgccggagtatcaagttaaacgtggtagaagtttaaaaatgtaa

SEQ ID NO: 208357 - DNA, 948 bp, Klebsiella oxytoca
atgactatttcccttcatacccagataagtgcccctaacacgacagcggcgaccagcgtatcctcgctggatctgtcaggctcctcaaaaacgaaatgttcaacagccagaaccgatatttatcagactgttaccgacagcataattgcggcgctggaaaccggagttaaaccttgggtgtgtccttggcagcgaactcccggtatgtccggtttaccgtccaattacgccaccggtacggcttacagcggaatgaatatcatgttgctttggtgcagcgcgtcaaaacagggattctgtgattcacgctggatgacctacaaacaggcaaaagcggtgggtgggcaggtgcgcaagggagagcacggcactaccgccattttctataccacgctggaaaaggaaaatgataacggagaaactgactatattccgatgctgaaaacattcactgtgtttaatgttgaacaaattgacggtttgcccctgaatgatgaagccgtatttccggcagagacctttgagccattaccacgtgcagaagcactttttaacagtagcggtgcaaccattattgaaaaaggacagaatgccttttttacaccattaaccgacgaaatccgcttacctgaacggtatctttttattgatgctgctaatttctacgcaaccggcctgcatgagctcgttcactggagtggggcaaagagtcggctgaaccgtgaaatgaaagggaaatttggcagcgaggggtatgcgtttgaagagttgatcgctgagctggggagcgcattcttgatggcggatctggggatagttggagaagttcagcatgaaagttatatcgcttcctggcttaaagcactgaggaacgacaaacgctatattttcaaggccgccagcgcggcatcgaaagcacatctctatttgatgaataaagctgagtag

SEQ ID NO: 208358 - DNA, 267 bp, Klebsiella oxytoca
atgacaactattgatgatgttgctgaatggatgaagtctcaagttaatgcatctgtcaggctttaccaggaaaatgctgtatataaaatcaaacatttgtttggtgatgactttgtctataaaaatgctaatggcaatctctcgattgataaaaaggttttggctcgatttaaaaagataactactgacgatgttatttgggatcgtggagataaagcatggcgcaaaagaaactctcgtgataaacccggaaggcaacaagaataa

SEQ ID NO: 208359 - DNA, 519 bp, Klebsiella oxytoca
atgaaagaacaactccatcaaattaatgaaataatgaaagaagtgcttggtataactaataaaaaggaaggtgtatgcctgtatatgggggcgctattatttgctcaaatacatgataattttgagctaaaaccaaggttcgtaacaggaagtctaaccttatatgacagacttgtctttgcacacaaacctatcaaaccagttttttccgctggatccgatttttctggaacctgggatggacacgcatgggttgaagtggatgactatatttttgatgcatctatattctggaccatttattcttcaaatactccgggggagttgcaatcattatttaatttcgtctttaacgggaaacatgactacttaattggatctcgtactttgcttgaaaaatctggtgttgtttataaatcctttgaagagctgtcagatggtgatgcgacaattttgattaacagtgggttcaacgccggaatctttgatagaagcataagagacaccttgaatttataa

SEQ ID NO: 208360 - DNA, 318 bp, Klebsiella oxytoca
atgagggacgaaaagagtttagcgcgcacccgctggaactgtaaatatcacatagtttttgcgccgaaataccggagacaggtgttctacggggaaaaacgcaaagcgataggcagtattttaagaaagctgtgcgaatggaataacgtgaatattctggaaacggaatgctgtgtggatcacatccatatgcttctggaaatcccgcccaagatgaatgtatctggatttatggggtacctgaagggaaagagcagcctgatgctttatgagcagtttggcgatttgaagttcaaatactgtaacagagagttttga

SEQ ID NO: 208361 - DNA, 933 bp, Klebsiella oxytoca
atgatgactcgtgatgaaatttcaaaaatagaaagtggttttttcttgcctgtttacgaaacattcgaaaaaggattgatagagataaactccgctattgaagaggatggtaaaaaaatagctctacacattaaggatgattttaaccttaatgctcacgcacaaaaaaaagatgataattttcatattgttctattgagtgggttgataccaataacgtttgacattctttctgaaaatgtagcattcttcatgagagaataccctgaattcaaagaaaaggaagctccagttgccttagggtgtgtctttatttggcaccatattttcggtcatgaacttggacatgtcgctcgtggacacttatcactagtcgaaagtaaagaaactaacctggttggtgattatcagatttattcaatgggatacaatgtagtcgatgaggattttagtgaagatcagattaaaacactaatggagtatgatgcagatgtattctcagcatactttgttgcagatgttgttttaaatacaataaaaaaggccccagagaaaaaaatagaagaaaaaacacttattggtttatctttaacatcaatattttttttctttaatttcctatgtaaattggaagggaagaaaagtaaatatcctcccgcaatgattcgcgcacatgcattgcagtcacatgtgattaagcatttaagtaagaagactaaactatctgatgaagaactgaaagatataatggatgtttctatttttaatgcatattcctatttagttgataaaaaaagactctttcaatctatggatgatgttagtttaaatgatctgtatgaacgtgaaaataaattactaaggcaatactctgcctttgataaagtcctttctgaaggattagtgccacacaataaatatcctccggcatag

SEQ ID NO: 208362 - DNA, 825 bp, Klebsiella oxytoca
atgggaagtataaaagattactggttcgatcaaatggaaactcgtagggatagaaaattagcaaaattactgggcattacagaagatgagcttgatctcatctcttttgaaattgatagtgttaaaagtaatgatgggtttgaatttggttatacagtcatatttgatgaggataatgatccgacaataatgggaaagattgatggtctaacttcaggctcatatgtaagtctatctccatgggacttggacgaccccgaaaaagatgaaattgaatgggatgttaattattccgctcaacttgaaacattcaataaacatttatccccaatatcaaaaatccttgatattaaagttgaaaatgaaatccagtttagcttcttggttatgctgcatgctcatatagtttccgcgctcgagggctttttggcctcgacgttcattcataatgtcacgaattctgacattttgataagaaagttaattgaatcagaccctgagtttggaatccggaaatttacaattaatgagatttatgcacagcatagcaatataaaagtaactgtaggtgaatacttgaaaaacattatttttcatgacatgcgcaaagttaagccaatgtatgctaaagtgctctcatatgactttggtgatatagcatggctcttcaaagccataactataaggcatgactgcgtacatagggctggttacgataaagaaggtaattcagtgccggtatctatagaaagcgttaatgatctcataatacgctgtcgaaatttagccgaaatgattgattctcacgtgcagaaaataggctga

SEQ ID NO: 208363 - DNA, 2172 bp, Klebsiella oxytoca
atgaatagagaaaatacagaaatggaagctgaaaagcttcttgataatatggatttgtcattagatgatgaagaacaacaatctgatgaagatacaactttaacgcatcctgaaactgatgctttcgataatgctaaattatacgatgagcgtattactgatgaagctttctatgcttcaaataactacgctattcatcctaaaggcttctttaaaaggatttatccaaaagatggtaatccttactggaagcaaattcataactattttgctataccatacttaaagctttccactgctaaacaaggttcaggcgtaaaaaccttagaagctaacactggttatacaggtgttcgcttcctcaataacgatttagaagtaaatgaagttgctctttcttcatcggatcgagcagagtttaccagctctaaatcccgtcttaccttgaacgattggacgcctcctgcgggttctgaccgttcagaagtatataaagccttcatggaggccgcacaagctggctatgagcctcatgtaaggccaaatggtaaagtctatcctgctttcatcaagcgcatgacgggctacactcaaaggggctgggtgactccagatctccatatacgttctaagcatgatctgtatgtcggcaaagttgctactcagagtgaaaagaaaggtgatgctgaaatacagaaggaaactacaagagagataattaaacactctccggcagttagtattttcttagctggcacgtatgtgtcatacacaaaaggccgtatttgtatttcagatgagttttgcccgattattaactacacgggtgaaggtgaaaagggtaagtctacaactcttaaaatatgtgctgctacagaaggttctccagctaaaggccgtatgatcattgaagctataagttcagaagttggcgttgaaaactttgctactgcttataatcatggccctgtttttcttgatgagattgacgagctacttagaacaaatgacttaccacaaaggataatgcgccttactaacggcggtggtagagttattttcgacaaagataatactttcaaacaacctaacgtttggaacggtatgttctttacgacttccaaccaatcgctaagacaaagtgttaaaggtgatggtaaagagtcagctattttaactcgtcttattgaaatagatattcatgatcctgaccttcatattttcttccctgacaagaatgatggaggtaaagtttctcagtggatgtctaagctttcagagaactatggtcatatatatgatgaaattatcgcatatataacaaaaaacgctgatgaacttgagcaaaagcttgctgattttgaatctgagttattaactacagaagagttaaggtatttcaaaaagaaccgccgttcagcgcatactttagctcttatcatgcttggtgctgaaattatggaaagcgttttaggcaaagaaagcgctatgttaactcatgaagcaataaacatttataaaaataaatatgctcaggatattaacgaacaaattgattatgctgattataaatacatttctcatcttgagcgtctttatgaatggattaatgctaacaaaggtatgatctcttggagtaagtttgcttatgctgaacaatctgatgatataaacgaaagtatcagtagaacgcagaaaaaagcggctcagacgcttactaacaatgctactcatagaggttcggttttagcagaagttaagatcaatagagttatggaacaccctgatgattttgaaggaacaatagtgttcaatgcgatgggtatcaaacacctaaaacaacatgctcaacttgattttaacgagctttgccaatctcttgagaagttaggtatggttgaacataacgcgaaatttacagataagaagaaggatgttttaggtttatcctctacaagaactgttcgtttaacattaaaacctatggatgagctaagttctaccatgttcactacaaagaatactgttcttgtgaacgacagtgagaaaacagaagggcaaaccgaaattcttaatcaaaacaatgctgatagtgagtttaacataaacaaaatacttgaagcttccgctcaatacgaagaagattattccgcttactttgatagaacataa

SEQ ID NO: 208364 - DNA, 588 bp, Klebsiella oxytoca
atgggattatcaaaatcagttagtgatttattaagacaaaaagcgcaattagataatgaacctgatgatgttcaggatgaaaatgaagttgaaatatcaggagaggaaaaggctttatcattagaaagtgatttggttcttttgggtattgtctggaacgctattagacctcatgaaacttttgaaaaattaaaaactcgctatcatcttaatgaaaacttagtaatagaaaaagggaataacagtttttggatttacggtaaagaagatttaatatcagaaagcattgtttcttttgttgattactttgctaaagatataagagattttaaatttgttagacctgaatcaccctatgacagttttatttattatttctttaaagaagccatcatgtgtaggttgaatgttttagtttctaacgcttttcatgaaagagatttacaacaagtaataatcaaggatgttattagagaactaaaagacgacgcaaaaaagatggataacataaacaaaaaataccatattcaaatgatcgacaactggataagtcaaatactcgttaaaaacacacacttatctatgtga

SEQ ID NO: 208365 - DNA, 1962 bp, Klebsiella oxytoca
atgagtggagcaaagatattagcagtattagataaagacggaatgcgtgatgctcagggcattaatggcggtaaaacaagtcctttagagccaaccatcaacggcgctacgtataaagatagtgaacttgatatagttattaaagctgaaaacggtttagagcttctaaaagagattgaagctaaaatagaccgtgggataatgtcaaaacagtatttgaataccattcaaagaccactttcagaactcagcactaataaagatccaaaagccctttttggtgatattggtggcaaagggaatgagtgggaacaactttttattgatttatcaggtttcagagcggaagatcaggttttagcacatgatataatcactgatagcatggctaatcctaattttatttatgtaaaagatcaggggccgggaaaatcaaaacagtatatgcctgttattggtaaaaacagtgtttttgcttggggtgttcatagcgaccaaaaaactaaaactcattcccatatattcagacatacgcatactattactgataaaaactatgaatacaacccaaatactggtgaagtaatcattaatcaggtaaaccctgacgcaagaagaataacagcaagtctttcattaaaagataactttgttagaactcaggttcttaaaaacatcaatgacaatcttaaagccgctggcttacctcttttagataatatttatttatctaagggtaaaatgctttctaaagaagagattaaagcacaagaagttattgatacaaataataaagaatatcttgacgagctatacactacagcaagagaaaaagctaaagaagagtctattaaaaatcaagagcaaattccaaaagaagttattgaagatgctgttgttcagaatgaactaaatgaaatagacgctcttattaagcaaaaacaaaaacttgctgctgaatatgccgctaaagctattaaagaaaataacgagatacaaggctttgaaaaggctcgtgaagctgttatagctcttcatcaagaaaaacgtgttaatcaggaacttactacagaactgaccagcactaagcaatcccttgaagaagaagcgaagcttagaagccagtttgaagagaaggccaataaaacaagtgaagagttagcagaaaaaacagaagcgtttaatgctctttctgatgagtataaaactcttggtgagcagtatgatgatttagaaacaactcatacaactactttagagcaacataaagaagtcgttgagagacttaatgaacagcttgttcaacaagaccttgatcatacgaatgaagttgagttgttggagaaaaatcatgaagctgttgtaaataaactaaacagcgatcatgtaattgaagttgaaaatcttaccaacgctcataaacaagagattgaaacacttaaaactcaacaagcttctattgttagtggtttgaatagtgaaataacaactcttaacgatactgttaaagctattactgaagatagagatagccttaaattcgataatgaacagcttgagattgaattggcaaaagctaaacaagctattattgatatgaaacgtgaacataaagaagaacttgaaaaacgtgatgaagagaaagtttcattcgaacaaacaataaaagatttgaaagaagagaagattgaagctgacaaagctattaaacttcttactgaaagtaatggcaaacttattgaagaggttaaccaacacattgactcttacaataaaattaaggcagaaaatgttaagctgaaaaatgattatgatgaagagaagaaaacaaacttaacattacaagcagagaatgaacagcttaaaactgataaacaggctttagaagaagtaatcaaaaaagatatagaaaaaaagaataaagctgacaacagcaataaaaacaaacctactaagaaataa

SEQ ID NO: 208366 - DNA, 372 bp, Klebsiella oxytoca
atgacagaccacaaaaaagaaaaatctaaaaaacctgccggatggctcgatgatatggagacttttgaaaaattgtctctggaaacggccttttccgatcctaatgctggcacatactgggcgcatcgagaagaagacttaggagaactccagccgttcactacgtcatacgttcgttgcgactttaaagtagtggcggaagatgaaccccgcttaattggtttccgtgttcctaaagctctggaagagaagtttaagcttctttcccatgatgccttatcaaatactattcttgctcttgctgatttaaaagcagatgagttaatcagagaaaataaatctattcattttactaagaaaaagaaatcctga

SEQ ID NO: 208367 - DNA, 654 bp, Klebsiella oxytoca
atgcttgctatctcgatttacaataaaaaaggtggtgttgggaaaagtctcttcagcatcgttatctcttcttggtttggacacaacggcaaaaagacaactctgttagacctcgatccacagggcgggagtttgctctttgcgagcatcgcagaacaggccggaacaaaactaacgtttaacgtagctcgtaagccaacctctaaagatgttgatgtgttcgtatttgaccacagccccggcattcatagcggtggtgatggtcagcttgccccgttcgtaatcattccaactatccttgatgccagctcatacagtgctacgctcaagagcgttcaggaactacgtgaacagggtaagacagacaatgattttatcgttgttcctaatcgtgttgagatccagaacaaagaacagctcgacctgttaatcaagctacaggaagaacacagggcagcaggccatgagtatgatctgccatacatcaaaaagcgtgttgcctatcctcgttcatacaacaacggcgtcaccatctttgaagacaagacaggcttaccgctggtatctgatgcccgtaaagagtttgagttgttgatggaagcagtaggccagaaaatcaaagccggtgttgaggctcgacgcaataagagttaa

SEQ ID NO: 208368 - DNA, 267 bp, Klebsiella oxytoca; identical to SEQ ID NO: 95291

SEQ ID NO: 208369 - DNA, 558 bp, Klebsiella oxytoca; identical to SEQ ID NO: 95292

SEQ ID NO: 208370 - DNA, 261 bp, Klebsiella oxytoca; identical to SEQ ID NO: 95293

SEQ ID NO: 208371 - DNA, 507 bp, Klebsiella oxytoca; identical to SEQ ID NO: 95294

SEQ ID NO: 208372 - DNA, 138 bp, Klebsiella oxytoca; identical to SEQ ID NO: 95295

SEQ ID NO: 208373 - DNA, 462 bp, Klebsiella oxytoca; identical to SEQ ID NO: 95296

SEQ ID NO: 208374 - DNA, 495 bp, Klebsiella oxytoca; identical to SEQ ID NO: 95297

SEQ ID NO: 208375 - DNA, 222 bp, Klebsiella oxytoca; identical to SEQ ID NO: 95298

SEQ ID NO: 208376 - DNA, 393 bp, Klebsiella oxytoca
atgaaagcattaacagacatattaaaaaccaaaaacacaattgaaattgaaaaattcattaatgaaaaccgcgttcttgaagaagatttttatattgatgaagtagccaatatttttcatgttgttctacttacaaaacaatataagagctatgaagtagcaagaatgcttaccaaatactttgacattaacaagcaggataaagcaggtaaaacagttctgttctatgccgttttgatgggtaatacagaggctgttaagttctttatctcaactggaggcgatgtatcaataaaagacaatcaaggcaggaaagcggcagatcagataacactacttgatcttcaaaatgcttcttcaatgtcaagagtattactatcagcagagaaataa

SEQ ID NO: 208377 - DNA, 483 bp, Klebsiella oxytoca
atgcttcttcaatgtcaagagtattactatcagcagagaaataacatggatgaattttctttagatacgttaaaatcatatatagacagaaatcaaacttcactattctatgattatctcactaagaaccaattagacactaacataaacattttatcttggtgtcttttgtctattttttcaaagtcagaaaatgaaaaccaccaatactataatttgttctgtttagtcgtggggttgttcaaagatgttaataagccaataaatggaagactaccattagaaatagcttactcaatcaataatattaagttttatattcacctccttttgaatggagctgatccccaaaagaaaaacagcaaatatcaatctacttatgaaataataattaaggacgaaaacgagaagtttctttcttatattatgcggtatgagcaaagcctgattaatgaaatacagaaaagaaaaagcactcaataa

SEQ ID NO: 208378 - DNA, 909 bp, Klebsiella oxytoca
atgactgtatctattcaaaacaccccatcttcaagcctaaagcccctttatcgttgggctggcggcaaatctaagctactcaacagctacaatccacatctaccagatttgaacagcgtaagcgcatacgttgagccattttttggcgctggcgctctctttgcatctgttaagtctacatacaaccagatccccacaatcatcaacgacattaatcctgagctggtaagtctactcaataccatcaaatacgattttgaagcgttctgtatcgagctgcaggagctggaagcggcctatctgtctatacgctctcatgaggtcaggaactaccgtttctatcagcgtagagaacagtattggaaagaacagattggtagtgtccgggcatcggccttactcctgtttttgatgagcaccggctttaacggcatatggcaagtttcccgtaagacaggccgctatggaacaggcgcaggattgcttaaccataagggcagtctgtttgattactcactcctgaatgagtggcataacgctttacaggcaacgtctattcattgcggttcctatgccgatctcgatgttcctgtaggggcttttgtctactgtgatccaccatacagagatagcattgctgactatggccatgcgttcactgatgaagaccacaaagaccttatcgaatggtgtcgccagcttcaggagcggggctgtgtggtgtggttagctaatagagaggcaaatgatagcttctttgaagaaaacgcctcagatgcttctgtattgcggtttgacattacctacacagccggaagaaaaaagaaaacggaaaacggacatgaagcagtaaaagctaaggatttgctgatgatttggaataataaaaacatgattaaagccgcttaa

SEQ ID NO: 208379 - DNA, 456 bp, Klebsiella oxytoca
atgagttatatgtcattaaatgtagtaagcattcagattaaaaaagcaaatgttgaaaaactcactgcgtgggtcagagattttgaaaacatacgtgcatatggaagcgcatcaaacatagatattataaaaaatgatgatagagaagaagatgctcattacataaaaacgaaaaggtatagaaaagaatggtttgatattttctttgaatcctctgatgaacttaatcatttttatcaagacgggtttttagaagggatcgcgagaatgtttgattgctatgtcaatattagctcaataacatcttggtgttgtccttatcatgagtcatatactatgtatatggataactggtatgaaccgtattataaaaactttaccggagatgaaagtagaaaatggcctcgccatgtaggtatgtatttttggaactgggtaaatcttgatgagatttaa

SEQ ID NO: 208380 - DNA, 294 bp, Klebsiella oxytoca
atgagaaagaagtttagacctgtagattttcaaacaagcaatatgggaaataactatataacaatagaaggtatgatgtcagcaccatataaagaacatagcccggagttattttcacaatgtctaaaagaagtaagcaatattaatagattacttatagataaaaggaagtgtgataacgaagagcattaccaaaaagttttaatggttgctgatatgtgtttatcaatgatgatgattgaacgccgtattggtattgttaatgaagataatagttattttaatcaaaaataa

SEQ ID NO: 208381 - DNA, 381 bp, Klebsiella oxytoca
atggaatacatgaacgtagtgagaagtgatttcgaagagttcgcaaaagagaacgtagaaggttatgaacatagtaaaacattaatgatgcctgaatatgtatcaaacacggattatccacagatagaacgtgttcctttcttttcatttgagggtaataagttgctgtttacctataatcaactggaagaaaacagaataaataaagctgtattaaagtatgctgttaacctttgctttaatagtgatatgagtaataaatatggagatattgaggctttaagtaatacgtattccgctgtttattactgtttactcgataacatgtataagacattaaagaaaaaagacattgagagtgttttatattggcttgattaa

SEQ ID NO: 208382 - DNA, 327 bp, Klebsiella oxytoca
atgaacagaaataaaagcataaaagaaacaattatcgaggatttgattaatactaattggagtaattcagaaaaatcaaggtttttcatttcaagagtaagcgatgattcaaataagtatttatttgggaaaaatattcacaatgagggtttttatttggtttggaatgacaattccgttgtggatttaacgagagaggtttatcaggatataatcaaagaaggtaaaaaatctaatttagctattaaatatcatattttctctaccggaacgttgattgacaggaaaaacattaaattttataaaataagtgattatgtaaaataa

SEQ ID NO: 208383 - DNA, 402 bp, Klebsiella oxytoca
atggatttgctgttagataccaacattctcttgttcatggcctatgaaccggacaagctgaaacaagaggttgtagagctgctggaagacactgaaaagaccctttgctttagtgctgccagtgtttgggaagtcgtcattaaaagcggtttgaacaagcctgatttcgatgtagatccagaacagtttagagatggcctgtttgaagctggtttgattgagatacctgttaaaagcgagcatacgcttgttgtagccgatttgccggagaagctacacaaagacccgtttgaccgtcttatcgttgctcaggcgaagcataacaagcttcctttgattaccagcgatagcaagctgattgagttcgtcagcgattacataaccatcatacctaaccgataa

SEQ ID NO: 208384 - DNA, 246 bp, Klebsiella oxytoca
atggaaaaggttaacatctatgatgccaaaactaacctgtccaagatcgttcaagaagttgctcggactggtgagccagttgtgatcgcaaagaacggtcacgctctggtgaaagtcatcgcctacagagaagagaagcctaaacgcaagctgggcttccttaagggtaagggtagcgttcctgccaactttgacgacatgaacagcaatgagatcgtggatatgtttgaaggaaaatactcataa

SEQ ID NO: 208385 - DNA, 1710 bp, Klebsiella oxytoca
atgaacagcgacaacgcccgcaaggtgcccgccgacgcgccgaccgcattcatcaagccacgctgggcgaaactggtgctcacggacgatggcattgaccggcgctactacgagctgtgcgccctgtcagagctaaagaacgcgctgcgatcaggcgatgtctgggtgcagggttcgcgccagttcaaggactttgatgagtacctggtgccggccgagaagttcgctactctgaagctggccaacgaattgtcgctggcagtggccaccgattgcgatcagtatttgcacgaccgactggcattgctggaacagcagcttgccaccgtcaaccgcatggcggcggccaatgatctgccggatgccatcattaccgagtccggcctgaagatcacgccgctggacgcggcggtgccggagaccgcacaagccctaatcgaccagtcggcgatgctgctgccacacgtcaagattaccgaactgctgatggaagttgatgagtggacaggcttcacccggcatttcacgcatctgaagaccggcgacacggccaaggacaaaaccttgctgctgacgacgatcctggctgatggcatcaatctcgggctaaccaagatggccgagtcctgcccaggcacgacttacgccaagctgtcgtggctgcaagcctggcacatccgggatgaaacgtactcaacggcgctggccgaactggtcaacgcgcagttccggcaatcctttgccggaaactggggcgatggcaccacgtcatcgtcggatggccaaaatttcagaaccggcagcaaagcggagagcaccgggcatatcaacccgaagtatggaagcagtccaggccggacgttttatacccatatctccgaccagtacgcgcccttcagcaccaaggtagtcaacgtcggcgtgcgtgattcaacctatgtgctcgatggcctgctgtaccacgagtcggacttgcggatcgaggagcactacaccgacacagcgggctttactgatcatgtcttcggcctgatgcacctactgggcttccgattcgcgccacgtatccgagacctgggcgacaccaagctattcatcccaaagggcgatgccgcctatgacgcgctcaagccgatgattagcagcgaccggctgaacatcaagcagatacgcgcccattgggatgaaatcttgcggttcgccacttcgatcaaacagggtacggtgacggcctcgctgatgttgcgcaagctcggcagctatccgcgtcagaacggactggccgttgcactgcgcgagctggggcgcattgagcgcacgctgttcatactggattggctgcaaagcgtggagctgcgccgccgcgtgcaggccggactcaacaaaggcgaggcgcgcaacgcgctggccagggcggtgttcttcaaccgactgggcgaaatccgcgaccgcagttttgagcaacaacgctaccgggccagcggcctcaatctggtaacggcggccatcgtgctttggaacacggcctatctggaacgggcaaccaatgctttgaacgggcacggcaaaccggtagacgagacgctgtttcaatacctgtcaccgctggggtgggaacacatcaatctgaccggcgattacctctggcgcagcagcaccaaggtcggcgcaggcaagttcagaccgttgcgaccactgccaccggcttaa

SEQ ID NO: 208386 - DNA, 303 bp, Klebsiella oxytoca
atgatatttttaacattggttattgtagtgaatttattgatattcattaacatggggagttttgttagctgggtttcagagcacaagatttatggggtatggtataaaagaatattcaagatcggttttcttttcttattcgctatgtttattgccagtatcttgggcggtgaagcagttcagacagcagctaaatctttcttcttttatattgattgcgtcattgcgtttgtcctaatgactatagttcacgccttttacatcaaactaaaatccaaaaagaacacgtccaaacccgcataa

SEQ ID NO: 208387 - DNA, 300 bp, Klebsiella oxytoca
atgaagaagcagattttagcagcagcggctcttatggctacgctggcgctctccggttgtggtgatgatggtatctatggaacgtatgaaaacgctcaatacggcgctgttctcgacgttcagaaggatgtaatcaagttcaggggtgaaagcttcccggtgaagtcatgggatgaaaccaaaaagccggtatacatcgctaaaactcaacatagcgttgtcgggtcatggacattcaagcttgagaagacaaaagacggcggcgtgatttatcaaggcacaaagtttaaaaaggattaa

SEQ ID NO: 208388 - DNA, 273 bp, Klebsiella oxytoca
atggaaaataaaactgttcgctgtcctttttgtgatcatgaaactaagcatggtttaggtgtgtgtctaccttgcggggcaaacatcatatacggtaaagcgcctttgtggttcggtcaaattggagctttattatctgttgtattaagctttttagtcctgattttttcagagaatatgtttattggtttggcttctctttttgtatttttgatattaacttttgttctctctaaaaccatttatgcggatagagttgtattcacaagataa

SEQ ID NO: 208389 - DNA, 861 bp, Klebsiella oxytoca
gtgcccctgcggcggcagtcggtcattgtgcccgccctcaacgccgtcgagcgggcgagcgccgaagcgattacccgcgccaaccggcgtctctacgacgccttggctgagccgctgacggacgtgcatcgccgtcgcctcgacgatctgctcaagcgccgcgacaacggcaagacgacgtggctggcctggctgcggcaatccccggtcaaaccgaactcgcggcacatgctggaacacatcgaacgcctcaaggcgtggcaggcgctcgacctgccctccggcatcgagcggctggttcaccagaaccggctgctcaagatcgcccgcgagggcggccagatgacgcccgccgacctggcgaagttcgagccgcagcggcgttacgcgaccctggtggcgctcgccatcgagggcatggccaccgtcaccgacgaaatcatcgacctgcatgaccgcatcctgggcaagctgttcaatgccgccaagaacaagcatcagcagcagttccaggcatccggcaaggcgatcaatgccaaggtgcggctgttcgggcgcatcggccaggcgctgatcgaggccaagcaagcgggccgcgatccgttcgccgccatcgaggccgtcatgtcctgggatgctttcgccgagagcgtcaccgaagcgcagcggctcgcgcaacccgaggacttcgatttcctgcaccgcatcggcgagagctacgccacgctgcgccgctacgcgccggaatttctcgacgtgctcaagttgcgggccgcgcccgccgccaaggacgtactcgacgccatcgaggtgctgcgcagcatggggtccgcttggaaaaaggaaattatcctacgctaa

SEQ ID NO: 208390 - DNA, 255 bp, Klebsiella oxytoca
atgaaactgatcactctactgaacaagcattttgatactgatttaaaagagtatgaggacgagaacggcgttaaccaccccgctatatgggtttatgaaaaaggtgaagactgtgagcctgtgatggtgcttaaagctactgaacagccggagatctggaaggttggaaacgtatactcagctcttactcacaatgcgctgttatcagagactgaactcaaagcgttggtgaaagctggcaaggtaatgaagtga

SEQ ID NO: 208391 - DNA, 309 bp, Klebsiella oxytoca
atgaaaaaaacaaaaacattgtttgagcaattaaaggatagagctaatcagctttcagcgggtgaagcaataatagtgcttgacgagatcaacaaaaaagaagggtttgagaatgctgttatctttctcaacagtagaatgaaacatatcagggaggcaattcttaaagacacgttcaccctacaggggtgtaggaacgtcaatcatgagctggcaagcgagcttatcgctatagttcagcaggaacacctatcagccaccatacaggccacaaccaataatgaagctactaccagaaagcgtctgtaa

SEQ ID NO: 208392 - DNA, 375 bp, Klebsiella oxytoca
atgctcaaatacaaaagcttgaaagattttcttgatgaacagaaacagcaagagctatataaaaaaaggcttgctgaaaagctctattacactgttaaaaagggaacatcagaagagatattatcagttttcaagcagtgttctgaaagtggtttagatttcaaacaggttaaacatgactacttacttgaatactttgatacgttcagatctggatataacaaaccctcaattcttatcactcgcctaattatcagttatcaaaaaaacatttccgtaaaagctatccagtcgttttataacaacatatattacaggcatcttcttgatgatgaagagttaatagagttaacttctcttatcattaaagattaa

SEQ ID NO: 208393 - DNA, 282 bp, Klebsiella oxytoca
atgaaaagtaatgataactggaatggaacaacaaaaaaagaagatgaaatatcattagatgactcgactatcacaatatctttatcaaaagaagatgaagagacagaaaagaaacagtctttaagaaagagatttaatatagaaaatcatttagagaatgcggcaatgtctggaggtgttattgtaatgatcttaggcatgattatctaccttcctgttatccttgtgatgatgacagggttgatgataagagagttgatagacacggtgagagaatggtga

SEQ ID NO: 208394 - DNA, 198 bp, Klebsiella oxytoca; identical to SEQ ID NO: 94790

SEQ ID NO: 208395 - DNA, 198 bp, Klebsiella oxytoca; identical to SEQ ID NO: 94790

SEQ ID NO: 208396 - DNA, 264 bp, Klebsiella oxytoca
atgttaagtattgtttatcaggatataaacacatcagatatggatataacattatcaacagaaagaggctatgtatgcgctgaattttgcggcggcgtctatgaggtcagcataagaacagacataggcgcaggacgctacgaagcatctgtaggtaatgagctggttatgtttaacagattggatgatgcggttgaaagcttctttgactgtatagaagaagctgtaaaagaggtaataagaagagaggggggagataactaa

SEQ ID NO: 208397 - DNA, 198 bp, Klebsiella oxytoca; identical to SEQ ID NO: 94790

SEQ ID NO: 208398 - DNA, 150 bp, Klebsiella oxytoca
atgatggatttatccaaaaaagaacgcgtcgaagacgccaataaaacacaagaaatattaattaagctttcattattaaggcagcgcttcgtgattggacgaaacaatcactcgctgacagtagttattaaggaatataatatcctctga

SEQ ID NO: 208399 - DNA, 198 bp, Klebsiella oxytoca; identical to SEQ ID NO: 94790

SEQ ID NO: 208400 - DNA, 138 bp, Klebsiella oxytoca
atgaaaacccatgttaatatccatataaatcttgaaaaagaccatgttgtaaaagccatcactgcaatttcaattactgcaaaaataactaaagtcctcagtatttctttgagttcaaaccaaaaagttttacgataa

SEQ ID NO: 208401 - DNA, 198 bp, Klebsiella oxytoca; identical to SEQ ID NO: 94790

SEQ ID NO: 208402 - DNA, 498 bp, Klebsiella oxytoca
atgcttgatttagatattaaaagagaattgctgtttgctgaaacagccgaagaagtagatatattggtaaaggccggagctgatgtaaacggtcttatgggtagtgtttttcctttagctttagctgaaaacttagaagtggcaaaggcattaattgctaatggtgctgatgttaactttaccaataagaaaggtgagacagctatcttctataacaaaaacattgctgttatcaaatttttgatttcacaaggcgcaaacattaaccatttaaacaacgatggtgaaacagcattgtttaaaacatctgacattgaaatgattaaagcacttatcaagttgggttgtagtccattccttaaaaacaagaatggagatcgccacgatactaaaatcaagcctgcggataaagaagaataccaaagctttatgaataagcttaaagaaatgatcaggaacgcacttgagcaaaaaaagcagatactacaagtagcgtaa

SEQ ID NO: 208403 - DNA, 198 bp, Klebsiella oxytoca; identical to SEQ ID NO: 94790

SEQ ID NO: 208404 - DNA, 162 bp, Klebsiella oxytoca
atgtggcacatatacaccatggaatactatgcagccataaaaaaggatgagttcatgtcctttgcagggacatggatgaagctggaaaccatcattctcagcaaactaacacaggaacagaaaaccaaacaccgcatgttctcactcataagtgggagctga

SEQ ID NO: 208405 - DNA, 198 bp, Klebsiella oxytoca; identical to SEQ ID NO: 94790

SEQ ID NO: 208406 - DNA, 198 bp, Klebsiella oxytoca; identical to SEQ ID NO: 94790

SEQ ID NO: 208407 - DNA, 735 bp, Klebsiella oxytoca
atgactgagcgcgggatgatttttaacggggaaatggtgcgggcgctgctggatggtcggaagacgcaaacgcgacggacagtgaaactgcagcctgatgaagacggtctggcaaaagtaattaacggaccctgggttgataccagcgaacggaattaccgctgcccattcggtgatgtaggcgatcgcatctgggtgcgtgagacgtggggagtcgtcacccacgaactggatgaggacggtcgaatccaatcatggactccagatcggcctgctacagccattcacgaaatgccgtttggcaatggctattactctggccacgccatttatgcagttgatggtgattttacctggggtgatgacgatggttatgaagatggtcgttcgtgctggaagccatccattcatatgccgaaagcagcaagccgcattctgctggaaatcaccgacgtgcgggttgagcggctgaacgctatcagcgaagaggatgcacaaagtgagggagtgcataccgaggtatgggaccagacagtagtcgcaagaaattacgcagtccgtgatgagtttttccagttttggtccgatgacatgccccactacgtagaaatgaatcaactatatcggtcctcattcagaagcctgtgggaatccatctacggcgaggaaagctggaaggccagcagttgggtttgggtcatttcgttcaagcgcgttgaaggaggtgaagcatga

SEQ ID NO: 208408 - DNA, 285 bp, Klebsiella oxytoca
atgaacgcataccgcgcatatgacgtgatcgaagagcgtaagtgggccgagcaaacgctcaccgaagagaagcaaaagtggattgacgaccgggcgcaggaaattatcagcgcgctgccggatgagccgattcaactgttttatttaagttttcagactggccctcacccgtacgaagggcttcgcagtgataaagccggtgaaacgtataacgacttcatctcggcagtagcttacgcccaggcggaatacgactgggatcaccgcaccggctgtccgttttaa

SEQ ID NO: 208409 - DNA, 693 bp, Klebsiella oxytoca
atgattaacacccaatacctccagtatgttcgccagcagctgatagtggccacggccgatctgagtggtgcgacgaaagggcaactggtagctttcgccgaaaacgcgcaattcactgctacggcgcgcagccggggaaggaaaaaggtattcgacaaggataagcagcgcatggtgaacccggacggcccaccaatggccggcagccagtcccgcgcgaaaggctccgcaattgccctcgttctgcccgttgagtattcgacggcgagctggcgccgcgcactgctgtcactggaagaacatcagaaatcctggctgctctggaactacagcgacaatatccgctgggagcaccaggagacaatcacccggtgggcatgggagcaattcagcgagaagctggccggtgtgcgcattgcaaagaaaacggtcgatcgtttgcgtcagcttatctggttggcggcgcaggatgcgaaagcggggctggctgggctggatgagcaggaacaccaaaaactcgccgcgctggcaggggtaagtaagtcgacctggtcagagacgtatctaccgcactggcaggtgatgaggtcggtattttttgaactcgaccgagactctcttcttttggtctctcgatcacgttcacaacaaaaggcgacaaatttacagcaagatattgcaaaaacgaactga

SEQ ID NO: 208410 - DNA, 507 bp, Klebsiella oxytoca
atgaaaactataagcatccctctggaagaggttcgtcgaattttcgaattagaccctaagtctccatccggattgaggtggatggttgccccaaaccacagaataaaatgtgggatgccagctggtagcaaagctggaaacggttattaccaagttaaaattgctggtattagctatggagctcatagagtggtttggtctattgcaaatggcgaaataccgcaaggcatgactatcgatcacattgatagaaatccaggaaacaatgaaatatcaaacttgcgacttgctgacaaatacttgcaagcaaggaacaggaagccatacaaaagagttggtatggctggaaaaagcaaggggaatattcatctgagaaagagcggtcgatatgatgccacggtgggcatcaatggaacgatttactattctagcggcagggataagtcagttctgcaagcctggatacaggaaatgcttgataagcatcaggcgcagcctaataaatag

SEQ ID NO: 208411 - DNA, 318 bp, Klebsiella oxytoca
atggctaaacgtatgcaagataaagaaagcattgccggagtgtcatggctgattgtccttgctctgtcatgctggggcggccttgtccgataccttattgacgttaagcagaacaaagccacctggagctggatcaatgcgctggcgcaaattgcagtgtccggctttaccggtctcattggtggactgatcagcgttgaaagcgggcttagcctttacatgatcctggttacttctggtatcagcggggcgatggggtccgtggcactgacgtacttctgggaacgaatgacggggatgaagaatgcaaaccagtga

SEQ ID NO: 208412 - DNA, 444 bp, Klebsiella oxytoca
atgcaaaccagtgataaaggcattgccctgatcaaagagttcgaaggttgcaagctcactgcctaccaggacagcgtcggcgtatggacgatcggctatggctggactcagccagtcgacgggaaaccaattcgcgccgggatgacgattaagcaggagacagcagagcgtctgctgaagacgggcctcgtcagttatgaggtcgatgtatcaagaatgctcaaggttggcgtaactcaatgccagttcgatgcgttggtttctttctgctacaacctcggcgctaaggcgctcagtacatcaactctgatgcgaaaacttaatgcgggagatacatccggcgctgccgatgaattccttcgctggaataaagcgggcggcaaagtgcttgctggcctaactcgtcggcgagaggcggagcggtctctgtttctgtcatgttga

SEQ ID NO: 208413 - DNA, 477 bp, Klebsiella oxytoca
atgttgatcgcactgctcaagcgatactggttacaactggcagtgctggcaattatcgcggcgatggccttggctattaaccactaccgcgacaatgccatcacctacgaagaccagcgcgataaagccactgagaaactcagcctggctaacgccaccatcgcagacatgcagacgcgccagcgtgatgtcgctgcgctggatgccaaatacacgaaggaattagccgatgaaaaagctaaaaatgatgctctgcagcgcaagcttgataatggtggtcgggtgctcgtcaaaggcaagtgtccagtgtcagccgcaaccaaagcccccggcgccgccagcatgggcgatgatgccaccgtcgaactctctgcagttgctggacgaaacgttctcggtatccggtccggaatcctcagcgaccaaacagccctgagagctctgcaggaatacatcaccacgcagtgcctgaaataa

SEQ ID NO: 208414 - DNA, 174 bp, Klebsiella oxytoca
atgattatttattatctaattgttggttttatcttgttttttacagcctacatctttgatgttatcaagacagaaaatcatgtggataggttcatagctgttatggtcatggtactgctttggcccttgataatcctagccatggttaaatgcatggctaggcatttcttttga

SEQ ID NO: 208415 - DNA, 1389 bp, Klebsiella oxytoca
atgaataatatatttcgtggtttctatatgcctaaagaaaaagaaatccaagaaatgtggggtaatgaaaaaactctttttatttttgatacaaatacaattctcaacttatacagatgcgaagagcaaaccaaggatgatatactgtcaataatgagacaattgggtaataaatcatggttaccttttcaagtatatttggagtatcaaagaaatagaataaaagtcatttcacaaagtatatccagtcttgatgctctaaaaaaatccatgcagagctctatcaatatgactgacaatgcgctgtcaaaatctcaagtaagaaagaacttgaataccaatctttcaaatgaactgtcagcactaaagctatcactatctactcaagtagaagattttatcactaatcatctaacacctcgaatagaagccaaaaaaaatctatcagcacatgattctatcagaaaagaaatagacaatatcattgggaataatcatgggcactctcctacccaagatgagattacaaaaataaatgcagagggaaaggaacgatatgaaaataacattccaccaggttatatggatgcaaaaaacaaagaagggttgaggtatttttttgatggggttgagtttaaaggtgagtatggagatttgtatttatggaaagaaataatcaacaaatcaaaagaactaaaagattacaatataatattcattaccgatgattcaaagaaagattggtggtacattcacgacgatcaaacaataggcccatcagagtatttgcagacggaaatctatcaaaacactgaaatagcttcttttcgcatacttactcaatcaaatttcctatatgaagccaataaatatataaaaggttcaaaaataaaagaatcaacagttaaagaaatagaaaatataacaatggaaaatcaaagagtagctgagtcaagattgtatttattgaataatataagtagcaagtcagttgaattaaatgatattaatatagaaaatgattacgcagttactctatcaaggagtgaagccttggctttaataaacaactacagggaaaacgctgcaatgttaagtgaaaggcttaatagcagttacgctatatttaccaaaaaaaacaaaaaaaatagctatatggaatcaatatctaattctttaacaaattccttttctttagcaaaacaacaattaagtgaattaaaactagagttatcagcatttgatgcaagattcttttcagaaaattcccaggatatatccacccaactatatagatcattaaaaaaaattgaaaatcacttaaactctgcagcaaatcacatatacgacatcagtttttacatgtccgcatttaaagtcaatcgttaa

SEQ ID NO: 208416 - DNA, 240 bp, Klebsiella oxytoca
atgccgcgtttatacgaaatcgaaacagcctgcagggcggcgatagtcatcgagccaaacggcaggcgcaccatcaccactaggcgattcctgcaggagctggagaagtataactggcactggtcgccacggcaggtaaaccagtggatagagcattatgtgacgacgttcagggatgtctcaacgaaagagggggacgagcgaacattccagctttataacccgaacggagggctgtaa

SEQ ID NO: 208417 - DNA, 1068 bp, Klebsiella oxytoca
atgcagctgaacggcatcgccgggaaactcaagttcaaagccctgcaggagcgcgccagagagaaaatcggccatatcgccgcaagccgcgcgctgaccgtggaagagctggaggaccgcctcgcgccggatctgggactcaacgacgacggaaccttgaccctcgatttcggcccgcggcgctttatcattagctttgatgaagccctcaggccttacgtgcgcgatgaaaacggcagccgccttaaggacctgccgaagccgaataaaagcgatgataaggcgctggctaccgaggccgttaatcgctacaaagccctgaaaaaagacgcccgcacgattgccgcccagcaaatcgcgtgcatggagtccgccatgtgccagcgtcgccgctggacggcggaaaacttccggcagtttctggttaatcatcccctggtctgccacctcacccgccgcctggtatggggagtctacgacgccgaaaacaggctgctggcctgcttccgcgtggcggaagacaacagctacggtaacgccgatgacgatctgttcaccctgccgcaaggcgcggtccaaatcggtcttccgcatctgctggaaatgcccgcggaagacgccgccgccttcggtcagctgttcgccgattatgagctgctgccgccgttccgccagcttgaccgcagctgctacaccctgacgaccgccgaactggcggccaccgagctgacccgctgggccgggcgcaaatgcccgagcgggcgggtaatagggctggcgaataaaggctggctgcgcggcgaaccgcaggatgcaggctggattggctggatgcttaaaccgctgggccagtggacgctggtgatggaaatcgacgaaggctttgccgtcgggttgctgccggatgaactcagcgccgagcagctgctgagcaaaatatggctgtgtgccgaaaatgcgcaccagtacggctggggcggcaacggcaaacagcaggccacgttttcggtgctggataacgtcaccctcagcgaattgattaacgatatcgacgggctgtttgagtaa

SEQ ID NO: 208418 - DNA, 738 bp, Klebsiella oxytoca
atgacgcagaccgctattattcccgactaccttaaaccctcgatagaacgcctcgaaacggccagagaagcgcatctcaccaatgcccgacgtatggacgaaaccacgacggcaatccgccaggtgcaaacccaaaaaaatgagctggagcaggaaaacggcactgattccggcgcatggcgtaccgcctttcgtgccggaggtgctgtcattaccgatgagctgaaacaacgccatatagagcgcgtgacacggcgtgaactggcgcaggaatgtgacaacatggctgaggtgctttctttcgagctggatagcctccgggtagcctgtgaccgcacggccagagcataccgtcaggcacatcacggtgccctcagtcagtatgcagagcatgaactcgatgttgccctgcgtgaaagctgcagtgccctcgtcagagcaatgaaactcagcattctggttaaagaaaatccgcttgccaacaccatcggtcatcagggctatgtcgagccagagcatgccgttatgcagcaggtgaaaacgtggcttgagcaggcggtgaggggctgcaatatccgtctgactgatgaacccgtgctgtttaaaacaggtctgtcggcctccaccctgccgcatatggagcatgacgttgcgaccacgcccggccagcgcaaagtctggcaggaaaaaatgcgggaacgtgaggccgacctgaaagcacggggattactgtcatga

SEQ ID NO: 208419 - DNA, 507 bp, Klebsiella oxytoca
atgataccagaaaatactagccacgctctagatccaaaatatatcgccgtgattatttcttctataatcgcggtttttggatggctaatttcatcttatatcaacacacgaacttttaagcgaaacgaaacatctaaactcaaagataaaatttcctccatgattgaaagcttctttgattcccttgaggaaaaaataaaatcaaggggtattaaggaaacggaacttgatgatttaattgcaggaaaacttactttaatcgaactacatctgaatcatttagacagaaagataaacatcaagctaatttctgatgagcatataaacaaaatcagaagtgaaccatatgattacttaacatcatcgaacggtgattatagaaaaaaactaaatgagttgaagttcaacacactagaacttatagaggaaaactatacggaatggtatttcagaaactcaactaaatatcactggttgaaattcaaatcgttaatctttcaaaaataa

SEQ ID NO: 208420 - DNA, 336 bp, Klebsiella oxytoca
atgaacttgaaaaaaattagtatcgtcaatgacttcagcaagagcccctacggccgatatccttctgatggcaagtggaatggtcaggtttttcgtcaggaaatcttggtaccagccctgaatagctatgataaggttatagtagacttgacgggttataatagatacgggcgttcatttattgatgaagcctttggcggacttattcgtgaagaaaacttcactaaatccgatttagacaaaaaactcgagtatcaccataatgatctaaagagttttgagttattaattacggaacgtatcgagaaagccgcaaatgataccagaaaatactag

SEQ ID NO: 208421 - DNA, 1113 bp, Klebsiella oxytoca
atgaaaagaaacaatgagttaataagagctgcaatcgctaaaaagcgttggcaaaatgaggtgttgcgtaaggacatagaatattgtccttatcgtcctaagaaaaagaacaagtcaaaaaaaacagttgaatacattagatttcctgctaatttcagtatctattctgctgataaaaacaaacattataaagacaccatgaacatcatatatgctatttctcgcatggcagatatggaaactaaaaaggttcatcttgatttttctcaaacggaatatattaaagccgcatctatattaattctttatgctactattgaacaagctataaaatcgggagtaaattttagaattgttgctttcccgaaagattttaaagccacaagaataataaaacgttcaggcttagaagtattatgtaaagaaaacacacaccaacctaattttgacggggatttcataccggttataagtggtagcggtggtgattttcgcgatgaaatcgtagattttattcaacataaaatttacaaaaacaagatgacacctgatactgaaagtaaatatggcggcgcagtgcaggaggctattaacaatgttgcatatcatgcatacccagaaatccctgaatctgacctgaaaaaatggtgggtgaaatgcgatcttgcagtcgatcaattatttttagcaatatatgataaaggtgtaggcatacctaaaaccgtcatgaacagaacatggtttgaggaaattcttcaaagcacctacccagctttagtatctcaaattaagcgagaattagaaaaagaaggcattgcaaaaaaagatttacttagttacaaatttggcattatcagcgatgcgatgaaaatagccatttctatggttggcgatgttacaggtacagaagagagcaagcatggacaaggaagtaaaagcattaaagctttagttacagaaaatgaccaaggaactctgtggatttacagtaacaatggattatataagctaaactctggtatagttgaaacatatgatttgcaaaagccgatgccaggcacattgctacagtggaacattaaggttgatctagatgaacttgaaaaaaattag

SEQ ID NO: 208422 - DNA, 270 bp, Klebsiella oxytoca
atgagtttcacgattaagaagaaagtcacacctatcaaggtctaccactccttgctgggggcggctattgcaggtgaaagcgaagagataagcgtgacctatgaggtaacgacgattctatcgctttcaggcctgcttggcgtggcagaatatacggtaacacctgaaggggcagcaatgagcggaaaaggcgaaatcccgtttgtttactcaggaacaggaaacccgctggaagaggccgaaagggaacttaaagaaagtctgccctaa

SEQ ID NO: 208423 - DNA, 1665 bp, Klebsiella oxytoca
atgtccgaaaataattatggtgcgctgatgatgaaatcgacactcagcgccagtgttgatattgatagtgtggttttgcccggcatatatcccgtttcgccgggcaacccttcttcccctgacccagaaggcggacttttaaccgttcactcggactcaataaaacaccgtacattctcttctaaatcagaagctttaggcatttcaacatacaacgtttcaagagctaaatggaatgactggtacttttctgttatgcccgctgatttactttctgatgaagaaggtaaaggcggggacatgacgtcattcacacgtagaaagattaactcacaagtatctaacattaaccaggctttaagcactcacgctgtaagtatctgggaatatgcagataaaatagaagattccgacaaagaagacccttccaaccctcttacatgggattgggcacccgcttttaatgccgcgcacgccgacaatacccgtgtaaatctaatggataaggaagtttacacactaaaaacacctgttatatttgaattcacggcagacggttattctgattactcacgactgccccaatgtttaaatggtctggcagtgattgattattccgccttgggaaatggcggcgctggatttgatttttcccggactgtttatgataaaacacagcctgcttatgagtcggcctttactataaaagggttaagcggacatgtgattcttcaagcgtttgatgggattgcattcaaagggaatgaaaacacctccgcaattaagctaattggcactgatggggtcaaaatttacggctgcatatttgcccgtaatcgctatggtgttgtattcaataatggcgaaagtgaaggaacatacactgaactcggaacccttgaatactgccgctggcgtggtagctgcctggcctctatagcgtatgagaaagggaatggcgacacttcatttcacggtagtggtcttggcgaaggatgttacgtaaccgtaccttccggtcgctctcccgttattattggcgaaggttgccaaccgtacaatgcaccaatgaatgctaatttctggactagtggtgtctccgcaccgattattactaatttaagtagtcttccttcacatttctatggacatctaaaatcggaaggctcttttaacacaaccctttcttctggcgggcttgtatatttctatggcactatttctcactggtcaggaatcgacaaaggaactttacgccaagctctacgcggggggccaactggccccacaggtggaaatctacctttttctggaattttaactcctgttataacccattatgaaatagcaagcatgggtacacaggttgtatttatggattataatgaagacgcgacagtttcaataagtggcgacacctacttttccgtatttaaagtccagacagcacgtagacttaataataacccaacaaataccccacttctgctcacgaatggtaatgttaaccccttaactaaatttaacattactcgcacagcacaagggttacgtatgacaacaatagaagacaacaccgaaattgttgtgtggagacagcgcggcttgcctgataaagcatcaggattcaattacacaacagcagaccactggattaatttatga

SEQ ID NO: 208424 - DNA, 126 bp, Klebsiella oxytoca
atgctgtttacccacatggcccttagccgggccgttgccggtgctgcctccggggagttgatcttatttaattgttcaggcataaaacatcgctcccgcctgaataaccccggtaagcttgattga

SEQ ID NO: 208425 - DNA, 717 bp, Klebsiella oxytoca
gtgaatataacgctgagtattaatgggctgaatgttgatgcctggtacagtgatgacgaaattgagaatgtacataaacctttactgcgccgttttacccgattacatgccctgacgccgaatcgacggaccattattttcctcagcgcgccgccggggacagggaaatcgacgctcacgacattttggcaatatttagcgtctcaggacccccatctgacgcggatccagacgctacccatggatggttttcaccgctataacgcctggctggaagaacatgggctgcgggcctcgaaaggggcgccggagacgttcgatatcgcgaagctggcggaaaatcttcgccagatccgcgaaggcgagggggactggccgcaatacgatcggcaaaaacatgatccggttgaaggctctattaatgtgaacgcttctgtcgttatcgttgagggaaactggctgctgctggatgatgaacagtggcgcgagcttgcgcagttttgcgatttttccctgtttatcaaagccccagccagcgcactgcgggaaagactggtcaggcggaagctggccggagggttatcgcaggcggaagccgaggcgttttacgaacgcaccgatggtcctaacgttcgccgggtgcttgaaaacagccgggctgcaaacatgacgttagagatgacggctgacggtgcgtatcgaattgcttgcccctga

SEQ ID NO: 208426 - DNA, 510 bp, Klebsiella oxytoca
atgacgacgctgacagaagatgacgtgctggagcaactggacgctcagcaagatttgctttcctttatggcaacggcaaataccctcttgttgcaggctattaagcgttttctgccctcgttgttcgttaataatgatgaagagatcgtggaatatgcagtgaagccgttactcgcgcaaagcggcccgcttgacgatattgatgtagcgttgcgactgatatatgcgctggggaaaatggataaatggctttatgccgatatcacccacttttcacagttttatcagtacttgaccgaacaatgcgatcttcccggatttgcggacgaggtaacctgggattttatttgtaatgtaaatagcattacggataacactgcattatatgacgcgttgaaatcgatgaaattcgccgatttcgcttcctggtcagaaattcgcttcactaatatggtgaaaaccgcgctggcgctggcgataacgacgatattaaaggaattaacgccgtga

SEQ ID NO: 208427 - DNA, 972 bp, Klebsiella oxytoca
atgatgtcactgacgtggccgctgctacggacaacggaacagggagcgcttgctgcctggcccgaaacgggctgcggcgataaaaataaaattgatggcctggcggtgagcgcaatgcgacaggcgctcaatgagcttaattttcaggggcggatcgtcattggggagggggaaatcgaccatgcgccaatgctctggattggcgagcaggttgggcgtggagaggggccagctattgatattgccgttgatccgatagaaggcaccagaatggtggcgatggggcaaagtaatgcgctggcggttatggcttttgctccggcaggctcgctgctgcatgcgcctgatatgtatatgaagaagattgtcgttagccgccgggcgaaaggggcgattgatctgcggcgctcgttaagcaaaaacttgcttagcgtagcaaaggcgctggataaaccgctgacgtcgttgcgtatggtcaccctggataagccgcggctgcgcccggcaattgatgaagcgacaaagcttggggtgaaagtgtttgctctgccggatggcgatgtcgccgccagcgtgcagacctgcatggcggacaacgcttatgatgtgatgttcaccattggcggcgcgccggaaggcgtgatatccgcatgcgcggtgaccgctttaggcggggacatgcaggcggagcttatcgatttttgtgaggcgaaaggcgattctcctgaacatcggcagatagcgcaggacgagcggcgccgctgcggtgagatgggcgttgaggtcaatcgtgtgtatcaacttgacgatatcgtgagccatcgcgatgtgctgttcgcggcgaccggcgtcacggggggagaactgctacgtggaattcaacacaccggaggcggaattcgtacacaaacaatcctgatcagtggcatagaccaaacgtgtaatatagtagactctctgcattcctggtga

SEQ ID NO: 208428 - DNA, 1278 bp, Klebsiella oxytoca
atgaaaaccaaagttgctgctatctatggcaagcaggatgtccgtattcgtgaattcgaacttccacccattactgataatgaattactggtgagcgtaatatccgacagcgtgtgtttatccacctggaaagccgccgctttaggcagcgaacataagcgcgttcctgatgatttagaaaaccatccggttattactggccatgaatgcgcgggcattattgtcgaagtggggaaaaacctgaccgacaaatataaaaaaggtcagcgatttgttttgcaaccggctatggggctgcccagcggatattcagctggctatagctatgaatattttggcggtaacgcgacctatatgattatccccgaggtagcgattaatctgggatgcgtattgccataccatggctcttattttgctgcggcgtcgctcgcggaaccgatgtgctgcattattggcgcttataatgccaatttccacacctcgccttacgtctacgagcatcggatgggaattaagcctgggggcaatctggcgctgctggcatgcgccgggccgatggggattggcgcgatagattacgccatcaacggcaatatcgctccggagcgggtggtggtggtcgatattgatgaaaagcggctggcccaggcgcaaaaactcctgcctgtggagctggcggccagtaaaggcattgagctggtttatgtcaatacgcgagacgttgcggacccggtacaggcgttgagggcgctgaccaatgacgaagggtttgacgatgtcttcgtatacgccgccgtcccagccatcgtcgaaatggcggatgagctgttggcggaagacggatgcctgaacttctttgccggtccgacggataaaaactttaaagtaccgtttaatttctacaacgtgcattacaacagtactcatgtcgtgggcacttccggcggttcaacgggcgacatgctggaggcgatcgccctgagcgcaaccggacaacttcagccttcatttatggtgacgcatatcggcgggctggatgcggttccggatacggtactgaatctgcccaatattcctggcggtaagaaactgatttataacggcgtcaccatgccgctcacggcaattgctgattttgccgagaaaggtaaaaccgatccgctgtttaagcaactggcgaagctggtagaagagacgcacgggatctggaatgagcaagccgagaaatatcttctggcgcactttggcgttgatatcggcgaggtagcggaatga

SEQ ID NO: 208429 - DNA, 1377 bp, Klebsiella oxytoca
atggaaaacaagtctgctcgtgcaaaggtccaggcttttggtgggtttttgactgccatggtcatccccaatatcggcgcatttattgcctggggttttattaccgcattatttattcctaccggctggatgcccaatgagcattttgccaaaattgtcggcccaatgattacctatttattacccgtgatgatcggttcaaccggtggccatttagttggcggcaagcgcggggcggtaatgggcggtatcggttcgattggcgttattgttggcgctgatattccgatgttccttggctccatgattatgggaccgctcggcggcctggtgattaaacatattgaccgcctgctggaaaaacgcattcctgccggttttgaaatggtcattaataacttctctctcggtattgccggcatgatcttgtgcctgctgggatttgaagttatcggcccggcggttcttgtcgctaacaattttgtgaaggaatgtattgaggcgctggtacatgcgggatatctgccgctgttatcggttatcaatgaacccgcgaaaatcctctttttgaataatgccatcgatcagggcgtgtattatccgttgggtatgcagcaggccgcagagacgggaaaatcgattttctttatggtggcttctaaccctggcccagggctgggcttactgcttgggtttgccgtttttggcaaaggaatgagtaagaaatccgcaccgggcgccatgattatccatttccttggcggtatccatgagctttatttcccctatgtgctgatgaagccgctaacgctgattgccatgatcggcggtggaatgacgggaacctggatctttaatttattaggtggcggcctggttgccggaccgagccctggttcaatcttcgcctacctggcattaacgccgaaaggatcgtttatcgccactatcgcaggcgtgacggcgggagcgctggtgacctttatcatcacctcttttattctgaagatggataaaagcatcgaagttgaaaaagaagacacgtttgctgaatctgctaaagcagtaaaagcgatgaagcgcgaaggttctttttcttataagcaggttaaacgcgtcgcttttgtttgcgatgccggaatgggctccagcgcgatgggggcaacaactttccgtaaacgtctggaaaaagcgggactggctattaccgtcacccattatgctatcgaaaatgtaccggatgacgcggatattattgtcactcacgccagcctggaaggtcgcgtgaaacgcgtaagcgataaaccattagtcctgattaaaaactatattggcgacccgaatctggacgagttgtttaaaaatctcagcgcctga

SEQ ID NO: 208430 - DNA, 444 bp, Klebsiella oxytoca
atgcgactaattgattatttcccagaagcatcaatatcgataaaagattcagcagcaaactggcaagaagcagttgatttttcaatgtcgtctttattatctaacaattatgtaagctcacagtatgttcaggcaattaaggattcaacgttaactaacggcccttattatattctggcgcccgaagtggcaatgcctcatgcgcgtcctgaatacggcgcgttaaaaacggggatgtcattaacgctcttacgcaatcatgtcagctttggtgatgacaatgagccagttaaattattgattggactctctgctgctgattcagattcgcatattggcgcgattcaggcattaagtgaattattgtgtgaagaggaaaatctggctgctctattagctgctgaatcagaaaagcaattagcggatgttatttctcgcgcataa

SEQ ID NO: 208431 - DNA, 144 bp, Klebsiella oxytoca
atgtcctgtttgataaaaaaatccccggagcaggcacactcaggggaaaacttcattacattattgctgcgtgagtctttgcgcggagtatatcttctgagaaaattcctgatgtttccagatatttctggtctgaacagttaa

SEQ ID NO: 208432 - DNA, 2409 bp, Klebsiella oxytoca
atgcttaaaaaattcgaccatattaaaaagttgggtgtgtttgataattttatttgggatcaacaagtcttaaataaaggaggcgcagttcaaagctttgttgatattaatataatatatggtagaaattactcaggaaaaacaactctttctcgtattattcgttccttagaaaaaggaaatatctcagataaatacggcaccccttcatttaatttaaagtttgcagataatgttgaagtaactaatgctaatatagatactcatgataaaaaaatccgtgtatttaatgaggattttatccgagacaatctgcgtttcatcagtaaccctgaagagagtgttgagtctttcgctatccttggcgatgataacaataagatagaagtagagttagcagaattaaatttagaattaggaatgaatgacgaagggaaagaaactggtttatatgcaagtaaaaaaacggcaactatagattacaacaatgcttcttcgaaacataaaattgctagcgataatttggataagcaattgacaaataaagccacaggtaaagatattggaataaaatataaacctgagcgttatggtgatcagaattacacgatagtaaagcttaaaaatgaaatttcagaggtaaataaaagcagttataaaccgctaagcgatgaagagttagatcaatatgataagttgatcgctgagagagtgttgccaaacttacctaaatttaaaattccagaccttaatttcaaatcatttgaggaagatgctgagaaactcattactaaaaaaattagtgcatccgacaagattgatgagttagtcaaggatgcaatcttaaatagatgggttaatgaggggcgaagacatcatagagataagcatgataaatgtgcattttgtgacaatacaatatcatcagaaagatggatcaagcttgataaacattttgatgaagagtcagagcagttagacagggatattaacttacttattgcaaagatcacgaacgaaaaaacgacaataagtaatttattatcagtaaataaatctttattttacacgaaatttcataatgaactggatgatttgattttaaatttaaacgctgcctataaaaattatgaactgtcgctagatagcctgattcagcaactcaatgctagacagcaagatacattaaactctaaggattttgttataccttttgactctacaaatgaattgaaaaatatttggagtcaatatttggaaatttgcattaaatcggatgtgtttactaactctttaagcactgaacaagctaaatcgaggaagtttctaagatataatgaagtttataactatctaattacaatagattataaaaacttgagtggttctgtaactgagctgaaaattaaatctgataactcatataatgagcttgcgcgtattactaggacgatcgctcagaagcaattattaattactgaaaagaaacgtgagctaaatgatgaagcgaaaggagcacagaaagttaatgaatatttgaataacttctttggtcatagattcttatctcttgaaactttaaaaaaacagactgacgatactaaccgtactcagattcgatttgaagttatgagggacggaaaaaaagcttaccatctaagtgaaggtgaatgcagtcttctggcattttgttatttccttgctaaattggacgatatcgaaacacgagattcgaagccaattatttggattgacgatccaatttcttcattggatggtaatcacatattttttatttacagtttattgaatgcagaggttgtatcttctgggaagtttaagcagttatttatttcaacgcacaaccttgacttcctaaagtatcttaaaagattgaaggataactttatagatgaaaataataagaaggttagcttccaaaaggcattttttgttgttgtaagaaatgatagggaatcgattattcaagttatgccatcgtatttaaaggattatgttacagagttcaattatctctttcatcagatttataaatgctccagtattaattttgtagatgatactaattatattaccttttataatttcgcaaataatgcgagaaagttttttgaaatatatttatattataaatacccagatcaagggatgaatgaaagtacgctcaggctgttttttggtgaggataaaattcctgccatcttatccgacagaattaataatgagtattcacatttatgtggcgtatttgaacgcggagcgaccccggtggaagtgcccgagatgcaaacagctgcgcgacaaatcattgaaagactcaaagaggatgaggatcaatatacggcattattaaacagcgttggtgagcatgtggaagctgccatgtag

SEQ ID NO: 208433 - DNA, 1986 bp, Klebsiella oxytoca
atggcaagcatttcaagcatcgtaaaatctacacgtaatatcatgaggcaagatactggcaccggtagtgatgagttgcgtattctgcaactgggctggatgttgttcctgaaaattttcagcgacaaggacaaagagctggagctgatggatgacaactacagctcgcccattcccgcagggtttcattgggacgaatgggcaggcgacgacgaaggcatgactggcgatgagctgttgcagtttgtcgatcgtaagctgttcccgtccctttctgaaattgatctctcgaccgccaaacgccgagccgtgctattgcatgaggtgtttgcgaacaactacaactacatgaaatctggtattcatctacgccaagttattaacaagctcaacgagatcgactttaacaacagtaaagatatccatctattcggccggatctacgagactttcttgagtgagctgcaaagtgcgggcaccttaggtgagttctatactccccgcgccgttacccagtttatgaccgagatggtcaaccccattcatggcgaaaccgtgcttgacccagcatgtggtactggcggttttctcaccgccgttatcgagcatctcaaagccagcgccggtaatgtcgcagagcgtgaagctatcggtcaaaatgtgcaaggatgggagtacaagccgttgccatacatgctggccaataccaaccttatcttgcacgacataaccacccccaatatccgctttggtgactccctacaacgcccattgagcgaatacagccggcaagaccgggtgaatgttattatcgccaacccgccctttggcggtgtggtctccaacaacaatgaaaacaattttccgcattcatatcgaaccaaagaatcggcagatctgtttttgattttgatgatccatttactcaaggacggcggccgggcagcaattattttgcctgatgggtcgttcaccggtgacggagtcaaacaacgcatccgccagaaactgttggaagactgcaatgttcatacgattattaggcttccaaattcagtattcaaaccatacgcaacggttgccacaaatcttgtattctttaccaaaggaagtccaacaaaaaaaatttggtattaccagcacgtttgcccgccagacattaaggcttattcaaagaccaaacctattgattacaatgactttgaggctattagaggttggtggtccaatcgcgtcaatagcgactactcatggtgtgtctccattgatgagataaaagaaaggcaatatgaccttgatattaagaatccaaatcgacagaaagtcgacgagggtatggtggcaaaggattatattaggacgattgatgaggatctaagggagatatctgaagaggtgaaagatattttcgagtcatattttgaattgtccgattacacgattgtggagttgggtgacatatgtaggattgagaaaggacagattggtattacaaaggctataccgggagaatacccattagttacaactggcgaagataggaagtctcataatgaatgccagtttgacggtgaggccgtatgcatacctcttgtctcatcgacgggacacggtcatgcatcaattaagagaattcaatatcaagatggaaaattcgcgcttggtaatatattggcggcagcaattccatatgatatgtcagttgtctcggcgaaatatttatatttctatctgaataattttaaagatgatgttgttgtgccgttaatgaagggtatggccaatgtgacattgtctattgcgagtataaaaaaaattaagattgttttaccggcaatagaggatcaagaaaagttggtggttttgatggataagtgcgagagattaagaaatacacttttgaagtctgtagatgattcagagtcaatgattaaggctgttcttggggaaattattacgtctgaatggatggacgatatttcatag

SEQ ID NO: 208434 - DNA, 2388 bp, Klebsiella oxytoca
atgacaaataaaaaagacctatcagagcgtgacatttgcaccatgttcatcacccctgcacttgagcgcgcgggatgggatatgaaaaagcaagtgcgtgaagaagtcggcttcaccgatggccgtatctatgtaaaaggtaatttgaccacacgcggcaagcgtaagcgtgcagattacattctctactacaagcccaatattccagtcgcggtgattgaagctaaggacaataaacactcagtgatggctggtatccaacagggacttgattacgctactatattggatatcccttcagttttcagtagcaacggagacagcttttatgagcatgaccgaactgctagcagtggcaaggttgagagtgaatttccactgcatcaatttccgtcacccgaagagttgtggcaacgctacaagcgttacaaaggtatagaaaacccagaggccgagcgtatcagtgcccaggattatttctttgacggcaccggccgcagcccccgttactatcagcaaatcgcgattaaccgcaccgtggaggctattgctaaagggcagcagcgcattctacttaccatggccaccggcaccggtaaaacatacactgcgtttcaaatcatccaccgcttgtggaaagccggtgccaaaaaacgcattctttttttggcagaccgtaatgccctaatagaccagacccggcgcggtgatttccgtcatttcaaagacaagatgacggtcatcaagcagaaaaaaatcgacaagtcttacgagatctacctagccctatatcagggattgacaaactatgacgaagacaaagatgcctaccgtgaattcagtcgcgatttttttgatttaattgtgattgacgagtgtcatcgaggtagcgcttcggaagacagcgcttggcgggaaattctcgcttattttcatgctgctactcatatcggtttgacagccacacccaaagaaaccgaggtcgtatccagcaccgagtatttcggggaccctatctatacatactctctcaagcagggcatacaggatggctttctcgcgccttacaaagttttgcgcgtaggattgaacgtcgatctggaaggttggcgaccggaggctggcaaaactgacaaaaatggccgagttgtggatgaccgtatttacaaccgaaaggactacgataaatatttagtgatcgatgagcgcacacagacggtggccaacaagatcactgagtacctgagcaaaaccaaccgatttgataaaaccattgttttttgcgtggacattgagcatgcccagcgcatgcgcgctgccctagccaatgccaatagcgacctaatgtcacaaaacccaaaatatatcatgcagatcacgggagacaatgaggaaggtaagcgcgaactggataatttcatcaatccggaagaaacctatccggtaatcgccatcacctctaaactgatgaccaccggtgttgatgcacaaacttgtaagttgatcgtgctcgacagcaatatcgggtccatgactgagtttaaacagatcatcggtcgcggcactcgtatcaatgaggagtatggtaagacctttttcactattcttgacttccgcaatgtcactgacttatttgccgattcagattttgatggcgaccctgtacgcgtaaaagagctgcgtgaagaggacgaatttgaagcgccgaaagacgagttggctgagggcaaaactataaccgatgacgaaggtgaagaaatcatattcgatccgcccatcaagtcacctgccattatcgacggtggcgacatcatcagcgaagcaagccataagttctacgtcaatggtgtcaatgtcgccgtgctcaacgaacgcatccagtatatggatagtaacggcaaattgattaccggcagcctgaaggattatacccgccagaaagtctgtgaacagtatcagaccttggatgacttcttgaacaaatggcaccgagccgataaaaagcaggccattatcgacgagcttgccgagcaaggtattgtgctggaaaatctcaaagcagctactggcaaggaaatggacattttcgacttgatttgccacgccgcttttgaccagccacctctgactcgtgccgagcgtgccaagcaggcacaaaagcgcgatgtgttcacccaatacggtgaaggagcgcgcaaggtgctggaggccctactagacaaatatgccgacgaagggattgaaaaccttgaggacatcaaaatcctcaaggttaccccttttgatcagttcggcactccgaccgaaattattcaacttttcggtggtaaacagcaatacattcaggcattgattcaattagaacacgccatctatcaggccgcttaa

SEQ ID NO: 208435 - DNA, 441 bp, Klebsiella oxytoca
atgaacttcgcttgctcctggggcgtagccatggctaaacatttgaccagcaaggatatcaacatcctaattaacctgattgacaactgggaaggaaagttggggtgggaagctctgtgcgacgcggtggtgcctctcattggtgtgaggccgacccgccagactcttaactcgcacgcgcaaatcaaagctgcattcgggcacaagaaaaaacagcagaaaactggttttgtctcgacgaaaagaccaccgagtttgaacattgcagagcaacgcatcaaacgtttggaaaacgaaaatgaccgccttaaagccgagaatgccagtctattggagagatttctgagatggcaatacaacgcttataagcacggagttaacaaagacaagcttgatgccttgttacctgatattgatcgagacacatcagaaatgagctaa

SEQ ID NO: 208436 - DNA, 2016 bp, Klebsiella oxytoca
gtggctaatatccttctgtttacaccgaaatatcaactcgattccagagccaacctcaatgatttcattgtgatgtgtcgtgatcgcctcaccgtgtttggggtcgatctcgattgggacagcgacacatggcctggggttggtaattttacggtcataggtgcgccagctcgcggtttcactgatagtcaattgttagactctgagattattccttttgctaaatcctatgtgcgatatcaacaggggcataaccccagcaaactcaagaatgagttcaaggcgattcgctgtatcgagaaagcacttttgcaagtcaaagggagggctgatatcacccttacggatatcaacgtgctggagatggcagcccaggttgcgcgagagtacaaggcgacggcatatcaggcggggagaagccttgtgaggctcgttgaatttcttcatgaaagtaagatcattccgcacgcgtttgtctggaaaaattcgatctcaaaacctaaggaattgaatcggacagatgctgcaacgaaagccaaacgggatgcaaagattccagaagagcgctggctggaatatatggctgaaatgttcgccaataatttatatgaacctcgtgatcgtttcaccacatcaatattcgcattgctgatgtgcgcaccttctcgcgttactgaggtgcaagacctaccggcaaactgcctgcatgtagagagtgacagtaaaggtgtcgagcggctgggattgcggttttatgccggaaagggttatggctcggatatcaaatggatttcaacgccgtttaaggagatcgcctttaaggctgtgcagcggctgacagagttatctgtagaaggtcgtaaactggctaagtggtatgaagagagtaccgataaattctatcgccatgccgattgtccgaatgtactagatgatgcccctttgtctgacgagcaagcatgtcgggcgctcggcctctctgaagaacaggctgcgtcctccctggcagcatattttaaaggttatccactatttcaatcactcagagcaagacgaggatgtttaaccttggctttcctgaatgggttttgtcgtagccaactgccaaaaaattggccttggctaaacaaagagcgacatatcaagtattccgaagcgctcttctgttttcggcgccatgagctacgtttggatatgaataccagccccgtacttctctcaaagcccggaaaaagtacattcacgactgatctaaactacatcaaaggccaagagcgaagcatctggagccgcaacggatacaagaatccggacggatctgaaatttcgatgacgtcccatcaattgcgtcattaccttaatactgccgcgcagcgtggcaatctgggtcagcttgatatcgccaaatggtctggtcgagcgaatattaaccagaatgccacatacaaccacatggtcgatgatgagtacgttgatctggctcggcaggctggagtgggtagcttgcttgagaagatcaaggtcaatgcgccggtcacgtttgctgacttagaggccgtgggcgagggcattgctcacgttacagagtacggattttgtgttcatgatttttccatgttgccatgccagaagcatcgagactgcttgaactgcactgaacaagtttgcatcaagggtgatgatgaaaaactggaacgcttgaaaaaacagcgggatggcatttacttacagcttggtaaagctcaagaagcctctgaagaaggtgtctacggtgcagatcgctggagccagcatcaacgtaggactctggacagagtcgggcagcttatcgatattctggagtctccaagcactgcgaatggttcggtaatccgtttgggcattgatcaggagttcagtccactgaagcgcgagattacagctcgctcaggtattacaaagctcgctgcatcatcgacatcagtggagcctgaacttgatgaacttcgcttgctcctggggcgtagccatggctaa

SEQ ID NO: 208437 - DNA, 1509 bp, Klebsiella oxytoca
atgctggctgtgcgggtgaatgctgttgaagagttttactcacgggatggctatcggatcagatttgatgatgagcgatggaagctgagcaaggatattgatatccctatgtttgcactggccgaggctatgaatgcccatatatatctgtctttccggcatgtactcgccttttatgcaaagacaagtgcgccatctcacgccaggaatctatttgaacgttgcaagcactacctagaatcgactgttgggatgcccttattcagtgtcgagtccctgatttcgtaccgctctatgctggataagaaaacggaatggtatttggggacactgcgcggattcattaggcaatgggcttacctcgggtatgcgggtatttccagtgacactttgagtctgttggataaatggactctcaaaggaaatgagaagggctacgcagttcaatccatgtgccctgacagtgggccgctgactgatatcgaaatggaaggtgttatcgcagcagtcgtcactgcgtacggtgaggggcgcctcgagctaattgatgcttgttacgcaatgatcttggccatgaccgggcgacgacctagtcagatcgcgggattgaagttgatagacctgatccagcagtcggataggtatttcatcaatttccctcgcgccaaacagcgcaatcagctctggcgtaccgcattcaacaagtttgcggtagtcgaggacctatggctgcttttgcagcagcaagcagttgcggttaggctagcatttgccgataggctggggggggaagttccagtgaagctggttcccgaactgccgctatttccagtattggaagctgtcgatgttcatttcgatctgaaggggcaactccgtggggatcgattgcatgtaccaagtgcctccgtaaaggacgctattgatcgggtagcgaaaacgataaaagtgattagcgagcgcacggggataccggttcgtctcaatccaacccgttttcgctatacgctaggcactaatcttgcgcgcgagggcaaaggtgaatacgtcatcgcggaagcgcttgatcattcggatacgcaaaataccggcgtatacgtgcgaaatattccggaaattgtcgagcgaattgacaaggctatggccttgcagttggcgcccattgcgcaggcgttccatggtgtactcgttgtgtccgagcgtgacgcaagacgaggtggtgaccgaaatagccggatttccaacggttcggcgaacctcggtacctgtggtagctacggtttttgcggtgcattggctcctgtggcttgttacacctgtaatcattttcaaccttggctggatggcccccatgaagcggttctggactgcttgattcaggagcgcgacagcgtactggagcaaaccgaggatagaaaaattgccgctattaacgatcgcctaattctggccgtcagcgatgtggttaaccgttgtagagctatgaaaaacgaggtggcctgtggctaa

SEQ ID NO: 208438 - DNA, 1212 bp, Klebsiella oxytoca
gtggaactgtcgatacgtagaattaagtcctcaagcggtgagcgatttgtcgttctcgtcgacagtgtaggtatgccattgttctacccagcactgtacgtcactgtgcacatgcgcggacgctcactggcagtaaacactatccagaatacgcttaacgcgatcaaggccctgtacgcttggcagagtttctactgtattgatatcgaatcgcgcttttcgtgctgcgagctgcttcaaactcatgaagtgcattctatgcgcgatttcatgcagaaaccgttggttgacaagaataacggcaaggccgtttcgatttcccgtcgagacagaacggtcagcgtacgcaaccaatatgcacgcatgtcagtgattgccgattacctcggcttcctcgcaggtcagcttcaaaagccatctacacagggcaatgaaaatatcaagcgaatggtttcgcagatcaaagcaaaccgtcccaagaagccgaccaaatccatcatagatagggatgaaaagcgccttgatgactcagatcttgatgcgcttgaaaaggcattgaagccaggttcgaataacaatcctgcgcatgaatatgcggtacaggtgcgcaacgctttgattttctccattctgcgcgtcacaggtctccggcgcggcgagctgctgaatctaaaaatagaagatatcgactttgcgaaaaacacactaaaagtagtcaggcgcccagattcaactggcgacgcaagggtctatcagccagtggtaaaaacgcgagagcgcacattcccgttgatgcctgaacttgtcgatcaagttcgtgggtatgtgctcggatatcgcaataaagtaccgggcgcaaaaaagcatggttatctctttgtaacacacaaatcgggtacttcggaggggctaccgttttcgaattccgggtttggcaagttcatgggcgaattaaagcatatcgtcgaaggctattgctttattcatgcccattcgttgcgccatcactggaactattcattctcaaaaacctgtgaaaatcagggtatgacgcctgagcgtgaagaaaagctccgttcatacctcatgggctggagtgagacttcaggaacggcggcgacctacaatcgtaggtacattaaagagcaggctggcaaggcagtacttgagttgcaaaacaagcatcttggtaaagtgcggaaggggatgtaa

SEQ ID NO: 208439 - DNA, 861 bp, Klebsiella oxytoca
gtggataaagctttctgtactattgatgaaaaagaatggattgcagatgcattttacgcattgcctcttgccgagatccaactgaagagacggagtttgctttgtactgaatgtaagggggatgcatggttcagacgatcaagttacggaaatgactcaccgcatttttgcgcccatcaccacgaaaactgctcactggggacttcatatgaggctgtaggggagggggatgaaaataaaggattgcctgcatcagatgccgacagcggcatagtactagatttgggattaacgcaaggctatgacattaatgtcaaaacagcggcagataacactgagactacaccccaggggcaaaagttcacgggtgaaaaaactgctgatggtgggagtttaaaatatccagctcattttactttaaaaaacctactttataagttagtgcagtcaaaaggactatgctacgccgataaaaaggtggggtttaaagatcaatcctttaacgatttaccggaccgtgggggagaactgtttgtcgagtttattaatgttgcaccatggatggacggtgctcgtagaatattttggggatttattagtgatgttggacaaacaagagatggcaaaatttggttaaatgcaggtaatatcaagtccgggttaagtatttgtattaatagtgaaatatcaagtgagtttaaagagcagtttaaggttaaaaatagtcttgatgaattagatggatgtcatgcactaattattggtacttgtacatatgctacaacaggtaaaccaatactgtggtgtggtgatcttagttatatagtgctgagaagatataaattagatcaagatttataa

SEQ ID NO: 208440 - DNA, 333 bp, Klebsiella oxytoca
atgaaaactttacctgcaacaactccgcagacggcgaagctatgtctgacgtccgcggatacctggcaaatgttactgacacgtctgctagaacagcattatggcctgacactgaacgacacgccgttcagtgatgaaactgttattaaggaacatattgatgcagggatccccctggccgatgcagttaactttctggtggataagtacgcactggttcgtatcgatcgcagaggattgagttggcaggagcaatcatcctatctccggcttgtcgatactcagcgaaccattaaggttattgagttgtggctatttggtgtaatgatgtag

SEQ ID NO: 208441 - DNA, 192 bp, Klebsiella oxytoca
atgaacaaaaaagagtcagatgaaggaagccatgattgggaaaaagcacgtgttgcgaaagagctgattaggcttgaaaagcaggctgcagaaaaacgtgcgcgattaaaaaataagctaaaatggttaggtaaagagcctcgggcatcctttttttattttttttcctcgctctttatttcgaaaaactaa

SEQ ID NO: 208442 - DNA, 144 bp, Klebsiella oxytoca
atgatgccaagatttagatatgtagaactcaatgttgtagatacaaaatttgacagcatcttaggaaagtccgcgggcgatcatcccccctttttttacgtgactaccggtacgtatgccggagcgggcagcagtcattcataa

SEQ ID NO: 208443 - DNA, 1563 bp, Klebsiella oxytoca
atgcctgtaattactcggttgatactacaaaattttaaaaagtttccgcgcctggacctgtttttcaatgctgatcgaaacatattcatcggtgataatgaatcgggtaaaagtagcatcttactagctcttgatttggttttgagtgacagtagacatcgtgttgaaactctgggcgttgaatcccttatttcacaatctgcggtggagaattttctggcgggtgaacgtcgggctgatctgctaccagtacttatcgctgacgtctttcttcatcaaggtaacaatcctgatctcaatggccgacagaatctggctggcatagatgccgatggcctcagaatgcgaattgcaccaatgcttgacgaatatggcgaagacattcgacaagttttgcagcaggatccgacaaatttccccttcgaatactacgcggttaaattcacaactttttctggaagccattttgcgagcttcaggcgctacctgcggcatctgcttcttgaaaacgcacgtatcgatagtgatcatgcagcactggactatactcgcacagtttatggtgtgaatgtgtctgtcgcggaacggtaccgccttgaaaacagttatcgtcaacagaaaaacctcttctgtaaccagcaattgtccgctgttaacagcacgttggaagattatcagtttggtatccgttcgggagctaaatcgggactcgaagctaacctggatattactgaaggtgggatctctatccgtaatagaggtaaaggtcggcaatgctttatcaaaacggagtttgccctacgaaggcatcagcaacagggtgagcttcattcattattgcttgaggagccggaaaaccatcttagtcacgtgagtatgaaaaagctggttaatcagcttgccgctgagcaacagaaacaacttttcatcgcaacacatagcagccatatttcatcccgtcttgatctgcgtaaagcaatcctctttggggaatcccgacccgttttattaaatgagctttcagatgaaacggcagcattctttatgaaggcaccagataataatgttcttgaatttgctttggcgagacgagtattactggtagaaggtgatgccgaatatatcctaatcgagtctttttaccgtcagctcttcaatgccgcccctgaagatgatggtgttcatattatcgctattggcggtactagtttccgccgttatcttgaactggcacttttactggggaatcgagtagctgctttacgagacaacgatggcaactatcaacagaattgctctgaacgttatgctgatattatcggcgatcacatcaatgttttcgccgatcacaacgatgagcgatcaacgtttgaaatctgtctgtatcaggacaatatggcgttatgtgagctgctgtttggggaaggccggcgaacattgacagtgcaagactatatgctggccaataaggcagaagctgcatttaagctgttacaacatgatggagaagagctctgcgttcctgactacattcaggaggctctggcatggctaagagggtga

SEQ ID NO: 208444 - DNA, 1023 bp, Klebsiella oxytoca
atggctaagagggtgatttttgccgttgctggctcaggtaaaaccacactactgatagacagactcacggtaaacagtcgtacactaattctgacgcataccatcaataacgagacacatctgcgatccaagatcataagtttgtttgggtttatgcctgaaggaattcgtgtaatgacttggtttgaatttcttcacggtttctgttttcgtccctttctccaggaacatttggcttctcgaggcctgagtttttcccaaccgccacagaggatcccacgcactaatagactgcattatcaggataatagcggccgcatatatcatcggcggcttgctcaattattaatggctagaggtatgctgccggatatatgcgatcgccttgaacgatattacgacgaactattagtcgatgaagtgcaggattttgccggaaacgattttaatttcttattggctctttgcgaggcagaaatatcagtcctttttgccggtgatttttatcagcatacctatgatacgagcagagatggcaatgttaactccacgcttcacgacgatattacccgatatgaagcccgcttcactgctgctggattggtggtggatcgtgagacgctcagtagaacgtggcgttgctcaagcacaatatgtgaatttattactgagaaactggatatccgcatcgatgcacatgactttcgtgaaacatctattgacatcgtaaccgatactgagcgtgtggccaccttacattcagacgatagcgtcattaagcttttctatagtgagcaccatcgttatggttgttactctctaaattggggagccagtaaaggactggatcactttcaggacatatgcattgtgatgggagctacgcactggcgtcttctaaataaatcgaatctacagacacttccaccttcgtcgcgcaataaactttatgtagcttgctcccgggctcggggaaacatttatttcgtttctgaagcgaatttcaggaattacaaaaaatga

SEQ ID NO: 208445 - DNA, 1773 bp, Klebsiella oxytoca
atgaccgttgagaagctgatcaccgaccatattgatatttggtcttctgcactgcaaacccgctccacggcgggacgcggcagtaacggtaaaatcgacctctatggcattaagaaactgcgcgagctgatactggaactggcggtgcgcggcaaactggtgccgcaggacccgaatgatgaaccggcgtctgagttgttgaagcgtattgctgccgagaaagcggagctggtgaagcagggtaaaattaaaaagcagaagccgctgccggagattagtgaggataagaagccgtttgaattacctgtggggtgggagtggtcttcagttcaaaatctatgtctgcttgagaatggtgatagaagcaagaattatcctaataaatccactcttactgagactggtgtcccattcgttaatgcgggacatttgttgaatggaaaaatagatgaaaaagaaatgacttttattaaagaaagtcattttgaaactttgcgttcaggaaaatttttgcccggtgacattttgttttgcttacgaggttctctggggaaatctgcattagtcgagaatatctctggtgcaattgcgtcttcgttagttatagtgcgagtctatccgctggtaaataacaagtatgttcatttttatttcgatagtcctatttcttatcaattcataaaaaagtatgacaacggtactgcacaacctaatcttgcagcaaatgatttagctcggtttctgattcctgttccaccaattgacgaacaaattagaattcttggcaaaattgataacttaatgtctctctgcgacaaactggagcagcaatcgctaaccagtctggacgcgcatcagcaactggtggaaactctgctggcaacgctgaccgacagtcaaaatgccgaagaactcgccgaaaactgggcgcgaatcagccagcatttcgacacactgtttaccaccgaatcgagcatcgatgcgcttaagcaaaccattctgcaactggcggttatgggtaaactggtgccgcaagatcctaacgacgaaccggcttccgaattgcttaaacgtattgaggaggaaaaagcgcaactggtgaaagaaggaaaaatcaaaaaacaaaagccgttgcccccagtgagtgatgaggaaaaaccgtttgagttgccacaggggtgggaatggtgtcgtatcggtgattgtagtttgtctaccgaatatggaatatctcataaaacatctaaatcttcgcaaggagtacccgttttaaagatgggggatattcaaagcggggaggtaaagttaggtgggcagcaagttatagattctgatattgaagaattaccatatttgtatttggaacatagagatattttatataatcgaacaaacagtgcagagcttgttggaaaggctggcatctacttaggtaaggataatacttacacttatgcctcttatttaattagaattcgcacggataaaaatggaagcatgccagaatttatcaatttgaatatgcaggcaccattttttagacttactcaaataaatccatatgttaagcagcaatgtgggcaagctaacgttaatggcacaataatgaaaaatatgcttgtagctattcctccgttcgctgaacagaagagaatactgcttaaagtcgtgcaacttagtgatatttgcagccatctcaaatcccgcctgcaatctgcccagcaaacccagctccgcctggcagatgcccttaccgacgcagcattaaactaa

SEQ ID NO: 208446 - DNA, 3018 bp, Klebsiella oxytoca
atgattattagccttgaagagcttggccttgcctaccgaaaagcaaaagtcgatctgtactattcatcccatgtttcgctggaagcaattgcgtcttacgaagagtccctacatacgaatctgatggttctgcaggaaaaaatacaaggtgacgacgaatcatgggtggaagagaatgagttcactggcaactggtttctggccacaaaatctgtagacatgtcttgctgggaacagcagcgagaaccgcaagctaacggtctcatattttcctcacctgctgaaaagtgggcatatgcttgcaactcaatggctgataaaaacgaacaaaaaaaaatcaaagccgagtttcgagtaatggctcaatgcagtctggattttcatgttctctcgactctttggatgttaaaagtcgggcatctttttgatgccaaattatctacctgtgcttacggtaaccgcctgcgccgtactctagatggaaaagacatcaatgcactttcaattggttcttttcaaccttacctcagaccttttcgtgattggcgtgacaatggcattaacgccatgcggagcgcgctaagtgaaagcaaaaaaatcgtggcactcactgctgatgttagttctttctatcacgaactgaatcccgggtttatgcttgatccaaacttcgtcaaagatattttggagttggaactcactgctgaacaaagcaagcttaatcgattattcattaatgcgttaaaagcatgggcaattgagactccgttgaagaaagggttaccagtaggtctccctgcttcagctgttgttgccaacgtagccctaatcgagctggatcgcgttattgagcagcaagtcgcacctatatattacggacggtatgtagatgacatcattctggtcatggaaaatggtgcgaatttccgttccatggcagagctatggcaatggttgttcgcccgttcttccggcaaactggactgggtaaagggcgaggaaaacaaacagatcagttttcaaccaaactacctgcatgacagccagattcgttttgcaaatgcgaagaataaagtgtttatccttgcgggtgactccggaaaaaccttagtggaagctattgctcatcagatttatgaacgagccagcgagtggcgagccatgcctcggttaccgcattcctcgaacaatgttggaactgatttgcttgctgcaactcaaagtaatggcgaagtcgctgacaatttgcgtaaagcagatgcactgactatgcgtagggctggttttgccatcaaactacgcgactttgaagcctatgagcgtgacctgcaaccgggcacatggaaaggccatcgccaggcattttttcgggcatttattgatcatgttgtggtgctgccacaattctttgatttatcagtctacctaccccgagtgatccgactggccacggcctgtgaggactttgtcgaactgcgcaaacttatcttagcgctcgagaatatttgcgatgaagttcgagaaaattgcctccttaccatcaaggcgtgtcctgatgataacctcccttttgaagcagagattattggcaaatggagggctcagctttttagcagtgtgcttgaagctatcgttgcggcatttcctccgcgtatttccaaggtgggtaagcaagcttggaatgaccatttaaaaaactggcacgcccggtgtgggctagacattcaatattcgggtcgtgatttttcattaaagggctaccaagaacagcaggcgagattattctctttcgacttagcgcacatgccattccgctttattggtctaccaaaagagatgattgctcaacggggcatacccgctccgaaaacagtagcccactgtgcggaagcagcagaattactgcctgatattgtcgttttgggtaatcaggttgtagcaaaatggtgcaaatttaaaatcattccacatggactgctatttgccacccggcctttcagcctgccggaactctttatcctaaacaatgaggcttatacagcttcagctcagcaagaaatgcgagctattattttcgctgttcgcggttttgtactcggtaataaaacaccttgtatcgataaacaaggcatattgcaaatccctgacggccaatctgctggaaaatatggggttgccatatctagctggaaaacgtccatgtcaagctggactgcggcggtcatgcgttcagccgatccggatgcaaaccgttacgctcgcttatgtcgcttgcttgatggtgtgatagcccaaccacataacagtcgttacttaattctgccggagctctcactccctgcgcactggtttattagaattgcccgtaagttacaaggtcgcgggatttcacttgtcaccggcattgaatatttacatgccagtaaagcaagagtacgcaatcaggtatgggcttccttgtctcatgatggattgggttttccttcactaatgatttaccgtcaggacaaacaacgcccagcactgcatgaagagcaggaattacaacgaatagcagggctagaaatgaaaccagaaaagaaatggacaacgcctcccatcattcaacacggtgattttcgtttttccttgttgatttgtagtgagctgaccaatattagttatcgcgcagcgctgcgtggcaacgttgacgcgctgtttgtgccagaatggaatcaggatactgaaactttcaatgccttggtcgagtctgctgcgctagatatccatgcttacatcatccaatgcaatgaccgccagtatggcgatagccgcatccgaggccctttcaaagatagctggaagcgtgatgtattgcgagtcaaaggtggtattacagattattgtgtaataggcgaaattgacgtacattctttacgacaatttcaaagtagctatcgttctcctggtaaaccctttaagccggttccggatggatttgagatagagcactctcgaaaaatgttgccagaagcataa

SEQ ID NO: 208447 - DNA, 675 bp, Klebsiella oxytoca
atgtcgatacggaatatagatatcagatgtggccacagtaggacttctatagtactctctgttattggtgcgtcgttatttactgtcgcagtatggatatttatttttttccttatatttagaccaagttaccttaaattttttggatttgctccaaaatactttctcactaacccattaaaaaacccagactccgctcaaagtgaacacttattagagttaatttctaacggaacaattcttagcttagataacctttggactatgcaaacagggctttaccaaactataatcactgtcttgatagcgattaatgccattctttgtgcattatcttttgtgctcatcagaaactcaactaattcagtagcccgcgaagaagccagaaaagaaacaattacggaagtttccatacatcttagtagtgccgagtttaacaaaagattaaaaaaaatagttaaagataaaataaaagatgccgattttgatatcggagatataatgcaatcaattgaatatttgagcaactcaattgaagatcttcagaagcaaaatcagttattacaagctcaagtcgatatatttaacaaaaaatcaccttcaaataaatccgaaaataaaactataagtgatgatgaacttggtaatgatttgatcattagtgaaggaaaataa

SEQ ID NO: 208448 - DNA, 549 bp, Klebsiella oxytoca
atgatggcttttatcagaaaaaaaacacaagagaagaaagcaccttcttccactgatacatcaatgaaaacaccagagcagcttttacaattcgcacaaaaaaacaatattgacttatatcccttagatgtttcccgactaactattctgctaggaataaaaatgcgactggaacctttaaaaggtgaagactcaggctgcttatacaaggataataaaagccaagagtggattatgcttgtgaattctttacatcacccaaatcgacaaagatttacaatcgctcatgagatcgcacattatttgatgcatagcaagcaattagatttctttaaagatgaagttttctttaggaacggagagtctaatataattgaaatagaagcgaatcgtttcgctgccgaattattaatgccacccgaagcatttagtgtatttcttaaacaaaaatctacacttgtagcagatattgccaattacttcggtgtttcagctatggctgtaaggataagagctcagcaactaggatatcaaggacataatttatga

SEQ ID NO: 208449 - DNA, 1029 bp, Klebsiella oxytoca
atgagtaattttacttattttccgataataaaaacccgtgacgccgagctcaaagcaatgactcatctaaaagatgatgtttttgataaaatattacctatttatgaactaaccaaatcaagaaaaacaaaaaccactccagatggagacatacatagacgtatgaaagagttaaaagaaattcaaaaaggcagacctttcatactcgacatttgcataaatgaaaattacatgaatgctcaacttgagcaacttctatccccggataatggctattttgaatggcaatactttatcaacacatataacgaactcaatataatacctatggttcacattgatgacaatgactctctccacaatatggaaagtttcatcctatcacaaagtaagaagggtcgctctatagcagcaagatttccaataaatattaacaatatagacgaatacataaaaaaattaacttcaaccatggctgtcaaccaaaagctcttcatcatattggattcggagcagataactgaatctaatattgatgaagttatagcaaacctccagttaaatatggaaaaaataaaaccaatattgaatgaaaacatcaatgccattattgcaggaacttcattccctaaaacggtatccgactatggcgacaaagaaggcgatattcctattctagaggaatatatatatgaaaaattccaagaaccttatgttctatatggggattacgcttcaattaatattgaacaaatcgaaataaaaggtggaacatttgttccaaggatagatgtctcgttggaaaagattattttttataagagatatagaagaaatgcaggcagttatcaaaaatgtgcggaatatattttaaaagataaaagatatgcggcaatggacatttggcctgataaagaaatagcaaaagcaaaaggcaacgaaccttctggcattagcccttccttttggatatctgtacgaatgaatcatttcatgaacacaagagtaaaattaagaagcaaaggttaa

SEQ ID NO: 208450 - DNA, 618 bp, Klebsiella oxytoca
atgaaagagtatgaagtcaaaataaagctaactgagtatattttggcaaatattaaaaaaaatattataggctcagagtttagatttgatttcggagccagaagagctgacataataacaatatgtgatggaatagcaacagcatttgaaattaaaacatcaggtgataatgtaactcggctaccgcagcaaatttatggatataaaaaatattttgatttttgctttattgtttgtgagccaggcaatattgataatgttagaaaggttatttcaaaagagattggtttaattatggtagatgatatgcaagtgactttaataagaaagtctaaacaatttaaggctcatgataagctaatgttagcaagcactttgaatattaaagaaattagaggtcttgttaaggttggtaagttatcaaaaatggaactatgtcagaaaatttctgacacctttaaccttgagaaaattagatccatttcaagatattctttagagaaaagaatgaagactccgtttgaaaccttcataaatgaaaaaggggatagtataactcgagatgatttaatgactttaaatagaatgccatcacatagattaacctttgcttcttaa

SEQ ID NO: 208451 - DNA, 2634 bp, Klebsiella oxytoca
atgagtgataaaaacctgcgtctgcaggtcgtgttaaatgcggttgataaactcacccgacctttaaaagttgcacaggctggatctaaggaactggcctctgctgtccggcagacccgcgagcagcttaaacggctcaacgatgcgggaggtcagttaaaatccttcgatcagctgtcccggagcctgagccggaccagtaccgaactggaccaggcgcggctgcgtgcgcagatgatgacccgcgaaatgtcagccctcgaatcccccaccaaaaagcagacagcggcgcttgaaacgcaatggcgggccgtgtcgaggctggagcaaaagcaggagcaggaaacgcggcagatggcggcagccagggcggaactgtaccgcctcggcatctctgcgggaggcggtgcccgtgaaacggcacgcattacccgtgaaacggatcgctataacaaacagctggcagagcaggagcggcgcttgcgtgacgttggcgagcgccagcgcaagctgaatgcgatcagggcaaaagccgataagatgcgcgatgtgcgcaatagccttgccgggaacggcgcaggaatggtggctgcaggtgtggcaacgggggcaacgctgatggcacccattcgcgcctactcggaatcagaaaacgccgctaaccagctggcaggctcgatgatggggcctggcggaaaggttgcgccggagtttgagaagctaaacaagctggcaatcgccctgggtgaccggctgcctggcaccacggcagactttcaaaacatgatgaccatgttacgccgccagggtatgtctgcgcaggtcatcctgggagggctgggtgagtcggcggcgtatctcggcgtgcagctgcagatggccccgacggatgcggcagagtttgccgcgaaactgcaggacgccacgcagaccaccgaaaaagacatgatgagcctgatggacgtgatccagcggggttattacgcgggggttgatccgggaaatatgctgcagggttttgcaaatatcagcagcgctatggacattatcaagcagaagggcctggatgctgcgaaaacatttagtccacttctcgtcatggccgatcaggcagggatggccggagagtcagcgggtaatgcctatcgtaaaatttttcaggccacgctggatgccaaaaatattaagagcgtaaacgacgggctgaaaggaaaaggtatcaggtttgatttttccgacgggaaaggcggatttggcggcctggaaaagatgtacgcgcagttagaaaagcttgaaaaattaaatgatgaaacaaaacttgcaacgcagaaagccctgtttggtaacgataacgaggtgctaaaagcgctgaataccatgacgtcaaaaggcatcgagggctaccgtgaaaccgtcgccaaactggagaaccaggcgactctgcgcgagcgcgtcgatgcgtctcttaataccctgggcaacaaatgggaggcggcaacggggtcttttactaatgcgatggcaagcattggggaaactgtctcgccagtgcttaaaacgctatctgactggctggggaatctggcttccgggctggatgggttggttaaacggcacccgcggctgactgctgcaatgtttacagtcgctgcagtattcgcggttgctgcgacagctgcgggcgtggtgtcactggcgctggcatctattctgggaccgatggccgtagtgcgggtaagtgcaggcatcctccagcttaaatttgcttctgtgtttggtctggtcacaaaagttattggcgcagcaggccaggctatcctgtggctgggcaggctgatgtttgctaacccaatattggcggttattggcttgatcgctatgggagccatttatatctggcagaactgggaaacactggggccaaaatttaaagcgatgtgggatgctatctcatcgggagtgactggtgcatgggcggttattaagcagaccatcagtcagaaatggactgaaatactgagtgatgttgccgcgctgcccgcgaagtttaaagcggtgggaggcgcaatcattgacggcatcctgagcggtatcaatgagaagtgggagacgctcaagagcaagctggcatcggtgaaaagctatctgccggactggatgaccggtggcgacaaatcaccgggaaccccacaggcaaaaggtgtgggtggattttttgccgggatgtatgacagcggcggatatattccgcgcgggcagtttggcattgctggtgagaatggacccgagatcgttaacgggcctgcatacataacgagcaggagacgaacagcagccattgccgctgccacctggctgactctgggagggctggcaccggagacagaggctaaaccactccacccatacagcctgcctgtctccgcatataagagtcagcaacaaaagcccgctatagtcacgcaagccctgcctgcgtcgatagggacagttgaaatccatattcaccagcaaccagggcaaagcccgtcagatgtggcagatgaagtgatgagacgtattgaagcaaaacagagaaaactggcagcccgttcacgtagtaactttagcgaccaggggggatacgatgtatag

SEQ ID NO: 208452 - DNA, 135 bp, Klebsiella oxytoca; identical to SEQ ID NO: 168788

SEQ ID NO: 208453 - DNA, 312 bp, Klebsiella oxytoca
atgagtgaacttcttactgagaaaacggaatccattgtcattctggatacacctgtgcagcgtggcgcaacctctatccgggaagtcgtgctgcgtaaacctcagtctggtgcgctgcggggactccgactgcaggccgtaatggaaatggatgtggcctcgatgatgacgattatcccccgtatttccagcccggaactgactccgcaggaaatggcagagctggacccggcagacctggcttccatgtcgctggaggtggttctttttttgctaccgaagtcggcaacatcagctttccaaccgggctga

SEQ ID NO: 208454 - DNA, 273 bp, Klebsiella oxytoca
atggcacttaaatgtcccgaatgcggtacgacggcacacgccagaacctccgcctatgaagcaccatcggttaaacgctcatggtatcagtgccagaatcttgaatgttcctgcacatttaccgcactggaaagtgtggatacgataattatgaaaccccggcgcaatgaacaggaatcagatgaaccggaagaccatgaaaaacaaaagaaaacgctcaatcgttatggctctgcatcaaaactgtcaaaccgccagcaaatccctgtctga

SEQ ID NO: 208455 - DNA, 744 bp, Klebsiella oxytoca
atgaacaacaccgcagagaataacaacctttccacttttccggctgtaacgcagcaggcaatggaaaccctgaacacagccagaagcgcatggcttgaagcacgtcgtcggcagaaagcggcagcggataatattgcaactatccgccagcgccgtgctgaaattgaagccacgacgaacgcactgaatgatgagtggcgcacgctgtttcgtgaaagtcagggcgtaatctcaaaggaaatgaaaaaactacgcacggaaattgcgctgggacgagaaacgcttgaggattttgatgagctgctggcggctcaggagagcgaaaatgcacttttgccacaggagactgcggaattagccggaaagtatatccacgcgcacgaggcacttgtgggtattcgcgcaaaacaaatctgggaagattttatgcaatcgcatggtaaggctctcatccagacattgagcctgctcaaatctacaatgggccgcgaagccagcgcagttgtcggtgtggtacattcagttaatgacccggacacactgctgaaagactttattcacaaacatatcaccaaaccggctcttgctaacactgcgatgccggaacaggaccctgtgtttaaactggcgggcgttgcgccggattattcggcccgtctggatctcagtaaacagctctctccagcagctattcataaaatgaaagttcgtcaggaacaggctgagaaggtgaaatcagtatga

SEQ ID NO: 208456 - DNA, 2673 bp, Klebsiella oxytoca
atgacaacacagacggttacgcagatttcagccgcagcgcgggggaaatggcccgtcattctgcagatgctgcgtattgatgtacctgaaaacggcaggcacggtccctgcccgaaatgtgggggcaaggatcgcttccgcctcgatgacctcgacgggcgcgggacgtggatttgcagccagtgcggcaatggtgatggtctggatctggttaagctcataaccggttacggcgtcagaaaggcagcgcaggaggtggcgcaggtgcttaatgtgccggatgtgcaggaactgcccgttaagcccgccaggcaaaaagcccctaaacgtgatatgagccttaccgtggcggccctgatgaaagagagtcacacgggagaaagcccctatctgacaggaaaagggttcgccggatacccggcctccctgaccgggagcgtgcagcatatcagcggtaaggatttccctgccggttccctgctgttaccgctcacgacgaacgccggagccgtgaccggtgcacagcttatcgccccgacgggtgaaaaaagcatactgcccggcagcacgatgaaaggcgcgtttgtggcgctcagcccgttaccgtctgaaccgccggtacaggtggtgattaccgaaggttacgccacggcgctgacggtaagccagctcaccgccggatgcgtagtggccgccatatctgcgggcaacctgcccaacgtcgcacaggcgctgcgggcacgctggcctgaggtaaaaattatcatcgccggtgataacgattttcaggacgggggcgagaatcccggcagatcctttgctgaacgggcggcaaaatcagtcggtggctgggtgacgctgccaccgggagaaattaaagctgactggaatgacttccaccgtgagcacggtattacccgtgcccgtgaagcctttcgtaacggtcttgtactgtgcggagaaggccgcacgcagctgccgcacgggttccgtcttacccaggaatatctctggtatgaaaaacaggtacagcgcaacggtgagacggagatccagaacgtcaaaatatgcaacccgttgcgcgtgacggcaatcacctgcgatgccgatggcggtaatttcgggcgactgctggagtgggaagatacatggggagagcgccgccgctgggcgatgccgatggaaatgctcagtggtagcggtgaggaactacgccgggtactgctggttaacgggctgtcctatatcagcaccaccggtgaggcccgcgcccgcctgatggaatatatctcgctgtgtaaaccggaacgccgcgtgacctgcgtcagccgcactggctggcatggtcaggtttacgtcctgcaggatgaggtcagcggtgaaggtgcagagggtgtcattctccagaccacttccgtgcaggggcgcgatttccgtgtgtcaggtacaacggaggaatggcgggagcacgtttcccgttactgcaccggtaactctcgcgtggcgtttgccgtcagtctggcctttgctgcccccctgttacggctggttggtatggacggcggcggctaccacctcaagggggaatcgacggacggtaagaccaccaccatgaaagcggcaacctctgtctgtggcgggcctgattactggcagacgtggcgggcaaccggcaacgcgctggagggatgcgccagccgccgcaacgatgccgccatgatgcttgatgagatccgggaggtggacggacgcgaggcaggcaatatcgcctacatgctggcaaacggtcagggcaagggccgtgccggtacggacggtgagctgcgcacccgtaagcagtggcggctgctgttcttttcaaccggcgagctgtcactgactgaacatgcggcaaaagccggtgagcgtacctttgccgggatggaagtcaggatgatccagatccccagcgattccgggaaatttggcgtatttgaggagctgcacggcttcgacagcggcaaggctctggcggaacatctggagtgggccacgtccagctactacggttcgccgttcagggagtggctgaaagccctgaccgctgaccttaacgggctgacggcacaggcaaagtcactgatgaaggaatatacagccgccctgaccccgaaagatgcgggtaatcaggtaggccgggctgtgaaccgctttgcactggtggcgatggcgggcgagctggcaacccggctgggtatcaccggctggcctgagggtgaagcgctgcgggcaacccgcgtctgcctgaacgcatggctgaaagatcgcgggcacaccgccaatcaggaagatattgccgcactggagcaggtacgcagcttctttaccgcgaatcagtacagccgctttgctgactggcacgacgagcgtaaccgccccggcaatatggtgggctggcgcagggtggagaaaggcaataccgcgcagggcacggaggccgtcaccacgttctacgtcatgccgtccggctggaaagaaatctgccggggatttgacccgcgcaaggtggcgcgtctgtgcgcggatcgtggatacctgctgccctccaccgatggcaagctgcagacaaccattcgcccgccagagatgaatccccgcagactctatgtcttcaacagcgaggtgccgggttaa

SEQ ID NO: 208457 - DNA, 384 bp, Klebsiella oxytoca
atgaaccagccgcaggtttctatttttccggcagaaatgaccactgcgctttaccggcgggctattgcatcggcctggcgccagaaagcgctgaccgaaactggctgcgatcactatggtccgcacagtctgactgttgaacgtattgaaatggccattgccctgcatatcgagtgtgcactgattaacgaatatggcgaagcacagggagcagcggctgcactggcgctgctgactgacatgctggagccatcattgctgaccgcgccgccggtactgaccgtgcgcggctgtgaagtgatggcggagctgtaccgcacacttccggcggcatttgatgacttctgcagctcgggtgtatcgctgtatcagggggaagtatga

SEQ ID NO: 208458 - DNA, 285 bp, Klebsiella oxytoca
atgaatatttcaaacgggcacaacggtgctcagggcctcgctttgcctgaaaaacacaataccggtgcttttgcctatgggttgtcagaggacggtttcggaaagctggcccgcgccagaaaggcctgcgacatgctgcagcttctcttttctgaatacccctcgcagggcggaacgctggatgcaggatgtgcgccaggcatcgccgcgctgatggagtacctgcgggcagatttgacggatattgcgcacagttgcgaactgattgaaggaggcacccaatga

SEQ ID NO: 208459 - DNA, 360 bp, Klebsiella oxytoca
atgcgtaattatccgcaacccggcgaacgctggcagcatgaacgtggctggaccgtcacaatcatccgattaattgaagcctcgccctccgtggcgctggttaatcctgaattcagctgtgaagtgctgatacgtcatgacagcgacaaccagctttcttcctgccctctggcatggtttgaacagcggtatacgcgcctgtttgatgcgccgctctttaaaccttcaccagctccggcgggcggtagtggctccggcccgctgacgctgcatccgtcggtggtatttacccgctggcgggagcgcaacatacggcgttctgctgaacttgacgacagtcactattcaaagtttctctga

SEQ ID NO: 208460 - DNA, 681 bp, Klebsiella oxytoca
atgcctctcgtggtgaacggcatgaaaatcactaataaaaaagcccgacaaaatgagtttgtgggcttaaaaatattttcgcttactgaaattagcatggaatctgagagaacgtctattcgcttctctattcagcttacttgctctggcttatttttcctgcgctgccggcgtttaatctcgccttttacagcggtaacaataaattgcgctttcgtttccccatcttcaaggttgctttctaattctgcaactacatcatgtgggaaacgagcattaagttgctgcgacttgttgttagttgaacccgttgccattactggatctccttgcgttaggtgcgattcagtatacgcaaaaaaaatgataataaaagacttgaagtgcgattcacttaagggtagctttaaaagtaaaggtgcgattcaccttgtgagtgcgaagcccgacagtgcagcaacactaaccgggcttctgaccaaaccgctatatgagacaacgaagatggctaaacagaagtgtacctggttattcgcggcgatcaaccgcagtcaacgcaatgcccgtcctgtgatgttaaggatcaccgcagataacgagcgctcagcgcggcgcagactggccccggactacgtgctgagctttgccggtcgcattccctgcggaggtgaacatgcgtaa

SEQ ID NO: 208461 - DNA, 231 bp, Klebsiella oxytoca
atggaatatgcaaacaacctttcagagaatcagacccttatctcagcaaaagaggtgttaagacgcgttcagcgtagcaaggcatggctttacaaacagctttcaaacaatacatttccccgcccggtgaaaataggaactcgtgcaatttcatttgttgaaagcgaagtcgatcactggattcaagagcaaatatatgcctctcgtggtgaacggcatgaaaatcactaa

SEQ ID NO: 208462 - DNA, 639 bp, Klebsiella oxytoca
atgaataacactcaatctgataataatttgttttattttaatcggttaacgtacattacgccgcacgaagtggcgcttgctatgaatggttttgactatgataccgaaaatgatgaattgactgatattcaattaaaagaggttattcggttaagaaaggcaataaccagaaatctacaattgattaatgaatataaaaacatatccgccacgcaaaaagtggaggcgaatttagtattaactgccgcttatatctttcagagggaagatattgtacctgtggagattaaggaaagaattgagaacgcattgcaacaacaggtaaaaaataaagattggggcgatattttaatgatgctaggaggaaatgaattatatgaaattggtaaaaaattaaggagtaatggcagagggcagtatagaaaagatgacgaggataattatagttgtaaattaatttacctgctaattgaattacttaagaaacatggaaaggtaaattatagcgataatagtgttatatataatgatattatttctttttgtaatgaaaatgagattctattgaaaggaattaaaaaagctacgttttataagaaaataaagttgggtaaagatattataaaatacggagagtga

SEQ ID NO: 208463 - DNA, 1350 bp, Klebsiella oxytoca
atggtctttgttggtctcttgtggtctacccccttttgggggcataatcgggggcatgtcaattcgatcaggatttgtgcccccaaaatgaaactcaacgctcgccagatagagactgcaaagccgaaagagaaagcctataaaatggctgatggaggcggcttgtatcttgaagtctcccctaaaggttccaaatactggcgcatgaagtatcgccgcccgtctgacaaaaaggaagatcggctcgcttttggtgtatacccgacgatcactttggctgaggctcggggtaagcgtgatgcagcaaagaaattgttgtctcagggcattgaccccaaagctgagcaaaagggggcacaagctgaaattgagggggcatatttatttgaaactatcgcaaggcaatggcacgcaagtaatctaacttggagcgaagatcatagccatcgcgttctgctgacgcttgagcagtatattttcccctcgataggtcaaattgacgccagaacgttgagaaccagccagcttctcaatccgatcaaagctgttgatgcggcaggtaaacatgatgttgcgcagcgactgatgcagcgcgtaaccgcaattatgcgtttcggtgtgcagaatgaccttcttgaatcaaatcctgccagtgatatggctggagcgcttttaagcgttaaggcaacccatcacccagcactacccccaaaaagaatccctgagtttcttgaaagactatcacgctataaagggcgactaatgacacggcttgccgttgaattaacgctactcacatttattcgttcaagtgagatgcgttttgctcgctggagtgaggttaactttgaacgaagcgagtggacgatacccggaattcgtaaacctattcccggcgtaaaacactctgagcgtgggatgaagatgaaaactgaacatattgttccgcttagcaaacaagcatttgatatttttaaacgtttacatgccttgagcggtaaaggcgaggttatatttcccagcgatcatgatcctaaaaaagtaatgagtgaaaatactgtaaatagcgccttacgtgtaatgggatatgatacgaagacagaagtatgtgggcatggttttagaactatggcgcgtggtgcgctaagtgagtcgaaactatggaatgatgatgccattgaaagacagctaagtcacgttgaacgaaaaaacgtgaaaggttcatatatgcatacttctgaatatcttgaagaaagaaaattaatgctgcaatggtgggctgattacattgatgctaacaagaatggatctatcacaccatatgattttgcgcgtgtgcatggaaaataa

SEQ ID NO: 208464 - DNA, 237 bp, Klebsiella oxytoca
atgtgttcacttaacaaaattcgcgtgatgaatatcacaaaaacgccagcgatgctgaagcggaacccgctgagtagaaaagagaaaaatgtgatgaaggtagttttttacgtcagcttacccacctgcaagggcctgcggaacggtttggggtttgggagtatttttcagtttgccatgccgggcgaggcgtcagccgccgcccggcagaaatacctaaaatctaaaaacgattaa

SEQ ID NO: 208465 - DNA, 786 bp, Klebsiella oxytoca
atggctaaagattcgaaagtggtatacggcgccagtggcaagacaaacgttttaacgttcgagcctgaaaaccttcatctggttaccgacaaaactcatccgctttacgatgaacgggtccaccttcctatcgacgaaggaatggttctgaacatcaaagagttgggtgtacttgagccgatcatcgtctggaaagaccctgaaacggggctcacctgcgtagttgttggccgtcagcgcgttaaacataccttggaggcaaataaactccgtctgaaagaaggcaaagagccactgcttgttcctggagtcgttaagcgcgggtcagcaaatcagatggctaaatacatggtcagcgaaaacgaaattcgccgacctgatacaccgcttggccgggctaaaaaaatgtcagacgcgctcgaccgcgggctcgatgaggacgacattgcggtgttgtttggctgcagcgttcaaaccgttcgtgcaacgctctcccttctcgatgccacccaggccgtcagggaagcggtggaggctggcacagttaccgttacccaggcacgtcaacttggcgcgctcccacctgaagagcagcgggcaaaagtggcagaaatcgagctggcgacagctggtaccaaaggccatgaaaaatcccgtcggcagcgtcaggttctcggtgaggcaaagccgcgcatcaaatcgcgtaaggaaatcactaaagcccttgaagatgccagcggcgaatatgccgaggctctgctctgggtacttggggaggcgaaatga

SEQ ID NO: 208466 - DNA, 372 bp, Klebsiella oxytoca
ttggtagacctggttaagcggcgcctgctgcatgcctatctcccggtagaaacaccggcaaccgatgatgttctggtagccatgggtgatgccgttttgctggagcaactggaatgcggcggaaaggccatcataagccagtcaaacattattggcctgcaggctaatcgcattgccgagctggagtcccgcaccgtcaccgtgaagctgccggatgatgaagatggccaagcatacggattcggaaagtgggtaaatggaaaactcccagcgacaacaggaaccatgacaatttcatattgcgaagatgcgtggcgggctgcctttgaggtgttctcgtctgccgctggcatcaagtgggaggctgagtag

SEQ ID NO: 208467 - DNA, 423 bp, Klebsiella oxytoca
atggcactgaccaaaaaacagcgcaccgagctgcgcatgaagtttggcggacgctgcgcttactgcgggtgcgagctccctgaaaagggctggcacgccgaccacgtacagcctgtggcgagaatctctgagcaggatatgaaggccgccgaaaaaggaattttcaagctgaaagctaccggagaggtacggaatatctacgccgacaccctggaaaatcaatatccggcttgcgctccctgcaacctgttcaaaacctcttactcgctggagatgttcagaaaacaaatctctctacaggttgagcgggggagaaagagcagtgttaacttccgcacagctgaacgtttcggcctcgttgaaatcattgcaaaaccggtagtgttctggtttgaaaagtatcagtcagaaggagccaactaa

SEQ ID NO: 208468 - DNA, 210 bp, Klebsiella oxytoca
atgactgcattaatttctgaagtgttcggacgcatcaacgaagaagggactgttgacatcctgtatgttgaagacgggtaccccgtaacccagcttgatgccagcaacgtctaccctgtaaattccagcctgagcgttagttatgaccacgctgaaggcataaagctgacaaaggaagatgcacgtctcatcggtatcgatatcgagtaa

SEQ ID NO: 208469 - DNA, 351 bp, Klebsiella oxytoca
atgtctcgtgaaatttcccgtaatccctcttttactccttctcccaaactaagggagcatcttaatagccaccatgagggagtaactgaacgcttaaataatatgtttgatcgttacgagcatctgactcgtagtagtgccatagcgctcgagcctgatgaaaaacaagtgctgctgaatgttctctccggttcttacgtagatccatccttcattgaatatttagcgcaagaagtagttgattccgatgactacatggagaataacccggcagcgaaatcattgtatgagaaatgcaaaaatgcttcatacgctgaattgctctcaaccatcgagcgtctgggaaaataa

SEQ ID NO: 208470 - DNA, 822 bp, Klebsiella oxytoca
atgcgtatccactggctacgcggaggtatcattgatgcaacttgcggattagttcatatccaaaactcaatcagaccagtcatagccgcacctggagatatcattattttagaggggtgctgcaatgtgagcggtagagccgtttcttggtccatggcgaacaatgtctcttttttcattacatcgtcaggggcaaccaaattgttttactggctgccagtggctcgctcatgggagaggctcgctcagcaagcgattgcatgtaataccccacacattatcaatgaagtggctcgctggatgttgcaaaaaagattccaccagacactgcatccggcccatggagttaatgtcgtgcgcggacgtgaaggtgcggagatccgcaggatatataaacacctttctgctgagtttggtattccctgggaaggacggcaaaaaagtggtaaatggaaccagctcactccactcaataaaacaattagtttgtgcaatgcagctctttacgggctgacggaaatagcgatccttcacgccggttattctccgttttttgggtttctacacggacgctcaggtaaggcgctggtttacgatattgccgatatggtcaaatttgagcatatcacgccgattgcatttcgtaccgtagccgatggaagacccaacccggagtggcgagcaagagctgcgtgtattcggctattccgtcggagccccctactccgcgaattaatatctctcacagaggagacaatggatgtcgcaattaaatcactcaccgaaaagccatctagtaggcgccggaaaagtttatcctga

SEQ ID NO: 208471 - DNA, 906 bp, Klebsiella oxytoca
atgtcgcaattaaatcactcaccgaaaagccatctagtaggcgccggaaaagtttatcctgatatatggcgaaaaattgacgaaatacgtgccagtgctacatggccagcatggtgtttcgcccccatgtcagagatattcaggtgcattcatgcagactgggttggtcggtctgatatccacaatatgactgccgacgtcgcgcgtctggctagtctggttgcgtggcgtgctacgcaaggcatttaccagttcgaccctgatttgtacgcagcgctcgttaccacaccagtagaccgtcttccggcagaggttctgacattattacctgaatggggggtatatattgagaccccagataatgaccagtttatcggctttttcgctcactgcgattatgatccacgcaacaaatcccctgagttgcgtttactcctggatacagaggacaaccttattcctgtcgctatcccaataattaacggcatgttatccgacgcgattgacattgcaatgccagggttcgggagtcaactagccattacatgtcagccgcttgtttcgctcgtgctgtatatttgcagtgtatccgctgatttcgggcattattctgcgtacagacggctgccaacgaaaacaaaaaaaggcttgcgcatcttccctccagacaagccgacaattatcaatacaggcggtaaaattggggccatattgcgcgccagtcgcttttaccataatgcacccatcctggatggtccgaccggaagaagattgcttcctcacgtcaggcgggcgcactggcacggctactggctgggaaaacctaaacgattcgaaattcgctggatgcctccgatacttgttaaaacaaattcacctacagagtacgtcaggcaagtaagataa

SEQ ID NO: 208472 - DNA, 735 bp, Klebsiella oxytoca
atgagttttgaaggaaaaatcgcgctggttaccggtgcaagtcgcgggattggccgcgcaatcgctgaaacgctcgttgcccgtggcgcgaaagttatcgggactgcgaccagcgaaagcggcgcgcaggcgatcagcgattatttaggtgctaacggtaaaggtctgctgctgaatgtgaccgatcctgcatctattgaatctgttctgggaaatattcgcgcagaatttggtgaagttgatatcctggtgaacaatgccgggatcactcgtgataacctgttaatgcgcatgaaagatgatgagtggaacgatattatcgaaaccaacctgtcatctgttttccgtctgtcaaaagcggtaatgcgcgctatgatgaaaaagcgtcatggacgtattatcactatcggttctgtggttggtaccatgggaaatgcgggtcaggccaactacgctgcggcgaaagcgggtctgattggcttcagtaaatcactggctcgcgaagttgcgtcccgcggtattactgtaaacgttgttgctccgggctttattgaaacggacatgacgcgtgcgctgaccgatgagcagcgtgcgggtacgctggcggtagttcctgtggggcgcctcggctctccaaatgaaatcgccagtgcggtggcatttttagcctctgacgaagcgagttacatcaccggtgaaactctgcacgtcaacggcggaatgtatatggtctga

SEQ ID NO: 208473 - DNA, 291 bp, Klebsiella oxytoca
atgcgccgtaaaggctggtgtttactgctgtttcctctgccgctgctggctgcggaacgcgatccctttcagcctccggtcgatagttgccggactgcgcagcttaatcaatggcgctacggtggggcgataggcgatccgcgagagttgattggcatcctgcaggatagcgccgggaaatggcgccgcgtgagggatgcggagacgctgcctacaggctggcgggggacgcttctgacatctgaaaaaatggctatatcaatcggcgccgggtgtgaacccgcgcagtga

SEQ ID NO: 208474 - DNA, 171 bp, Klebsiella oxytoca
atgatgattctgatgactctgatgactctgatgactctgatgattctgatgactctgatgattctgatgactctgatgactctgatgactctgatgattctgatgattctgatgattctgatgattctgatgattctgatgattctgacagctccgatgattcttctgtaa

SEQ ID NO: 208475 - DNA, 540 bp, Klebsiella oxytoca
atgtgccgggctagaggtcggaatcctgactattgcatatgcagcgatgtacgtataaaactagccgacattaatataatcattttcattcagaggctccctgtgaaaactttattccccttaatactgtttatcgtaacttctaccgtatgcgccaaagaagttaaatatgactttcctccagatggggaaatggcaaaatcactcaaaccagaaattgttggcgtggctaattatgaaatggtcaatagaagcgtgcgcttaaaagctttagatgttggtgaaaaagatgtttctctcctggtagtcataggtgctaccgacaccagaaaacccgttactcaagctaacatccctgacaaacaatcaatctcattaactaaacagcaaattgtgaacaaatattgtgcaccattcgggtatggcaattggtactttgatgccttcaaacagcggggtgtaaaactgcactattacttttactcggcagtagacaccccgttatttacattcacggtaaataaatctgattgcgattaa

SEQ ID NO: 208476 - DNA, 258 bp, Klebsiella oxytoca
atgcatgtcagagtcgaccaaaaaggggagttgctttgcagattgtttatatcgcgcccgtcagtgggctcttgggcagacaacgacaaccgaacggaaagcggcaaagaacaaaccggggcgagctggtggagttcatcccggcttgttctgacttctgctatgcaaatcaaatctacctggcggggtaagtttatgaaaaaccataccagaactttcgattacaaatcaagcgcaggtgactatgagaccctctga

SEQ ID NO: 208477 - DNA, 450 bp, Klebsiella oxytoca
atgaacgacaaagtaacgctgaccgtatacaaaaacagcccgcacatttggtctggcgggctggagggggaagatcttgcgaagtggcttatcggtaaggccaatgcaatccgttgtcaggattcatgtcaggcaaagatgatttttcaccgcgagagtctgcgcgagctacaggaaagtagcgatctcatgaaggcttacgtaagcctagggctatctcacaaagtgacggatcccattcctcgtctaagtgaggaggccattcaatttgatatgaacactggattaattgctgcaactcagcctgaacgtaagcgggatagagtaactcctcccctgggatattcactactaccagatcttgctgaagcaagagcaaagcatcatctagcgaaagctgggatatctgctctgggctccatccagtgcgtagatgcaaaaaatgcgtaa

SEQ ID NO: 208478 - DNA, 279 bp, Klebsiella oxytoca
atggctaataatttgtttgttacctatgatctgattaaaaccaaagattatcccgccgtgcatgaagctatcaaagcattagggacgtgggcaaaagtcacagagtctaactggtatgtaaattcgatttattctgcacaagacgctgctaaaaaagttagagctgctatggacagtgacgataagttaatagttgttgatgctacaaataactcagccagttggtataacttaccagtagcagtagaaaatcaaattaaagatcaatggaataaatga

SEQ ID NO: 208479 - DNA, 204 bp, Klebsiella oxytoca
gtgcaggataacgatagccatcacctgaacgtgcgccagctgtacgtcgagatgggcaatttcgccgatttttccgggccgttcaggaacgcctccatctgggcgggcaagcgtttcgaccgcgataacttcgatatccattttaccgatagcgatattatgttcctcggcggtaccggcggcgggatcaatgacgtcaactga

SEQ ID NO: 208480 - DNA, 234 bp, Klebsiella oxytoca
atgcgtctcactgtattagatgacgatccaggcaggaagattaatctcggtgtagagcgatacgctgtttttctcgatggtattgaggttaagcatgtcttcactgatgacgatgagaagggcgaagtaatcgcagccgttcctgatgagcgtggttatatgacgacagagaaaggtgaagtgaagcggcatacgctttacggttccgtgaggattgaaccatgccagcgttaa

SEQ ID NO: 208481 - DNA, 477 bp, Klebsiella oxytoca
gtgacggaataccagaaagaaaatcacttcaccttcctgacagcggaagggcaggagtttgccgttaaccacctggcaaacacacagtttggcaacgggttcaaaattgatcgcagcggtaaagtattcatcaacgacgcattcattggtggtgaaatttacgcttcggaactcgaagcgcctcagtcggtgaccaatatctacaacatcagctttggtgttcgcaatgataagcctgtgcagaacaaggtaaccatcagcgccgataagttcgaagttaaatctgatatttattccaatctcgaagtggtacttgaaaacacgctgaaaaaagctgctaagagcgcggcaatggatgttgtaaagcaagtggcagcagaccagaaagcgctggatgaactggcagaccacattcgcaaagctattcacaatgaatgcttagcgggtggaattatttggcaaagattcagccgatag

SEQ ID NO: 208482 - DNA, 153 bp, Klebsiella oxytoca
atgagtaataaaaccttacgctatctggcgctgctacagacgtgctctatgcgctgttttaccgtggtgcattgctatctggtgacctgccgtccaagtcgggtgccgccgaactacgcgaactgggctttgctgaaaccaggcgcacagtga

SEQ ID NO: 208483 - DNA, 534 bp, Klebsiella oxytoca
atgagtctagaaaaattattaatcaaagacaggaagtgcggtacctgttctgtttgttgccattcgttacgaatcgagcaacctaatcttaagaagctcgccgatgtgccatgccagtaccttagaccacaaggaggatgctcgatttataatgcacggccagatgtatgccgtacctggtattgcggatggcgaataatggatgttggcccagaaatgagacccgaccggagtggggttctgatccgtttcgatggctccgcactctgttttcaacccgtagataaagatcgtgtatcgtctttgctcgattcagagccgctgcgcgttttaggtgcctccatagccaatggaatgaaggttgaaatatcagtccccacgaaggaagggtattgctcagccaatttggacgttactgaacttatgtcagaggtcgttaaaagtagagagtatgaaaaaatgcggtccgcactgcttgcggctatccagtttgcgtcacattcaaagacagaccctgtagaaccactggagtga

SEQ ID NO: 208484 - DNA, 276 bp, Klebsiella oxytoca
atgggaatcgaagctatcgcggggctggtggtcgttatcctgagcgctatcgctggcgcgtttggcatcggtcatgctcgcggaacaagtaaggcggaagccaaagccgaacagcagcgtaccgaagaaaacgccgctgctattgtcgccgcggcagaacgccgtgctgaagtcacgaaaggggcctgtgatgtacaggaagacgttaagcgtatgggcgatgactatgttgatcgcgagctgcgcgaaagatttacccgccccggtagtcgttga

SEQ ID NO: 208485 - DNA, 228 bp, Klebsiella oxytoca
atgacaacaaccgagctggaggcctattttggctccccaattcaggcatcaaatttttttgggctctcgcctgaagccttttatcaatggcgtaagcgtccgggtggattaattcccaaaggccgggcagcggaagctgcgtatcggacaaatggtgagttggtttatcgccctgagctttacgagaagactagcaaccgtaatcgaatgactaaaccacagaaataa

SEQ ID NO: 208486 - DNA, 645 bp, Klebsiella oxytoca
gtgaacacttttggatcacggcttcagagcctacggaaggaccgaaaactaactcagaaacagcttgggaaaatagtaggcgtaagtgatgtaaccgtaggctactgggaaaagaaccaaaatacgcccggaggggtatccctaactaaactggctcgctatttcggggtttctgaagatttccttttaaccggaaaagatcaggtatctaacgtcgctccatcctttggtggagggatgcaggtgccagttatcagttgggttcaagctggaacatggacatcagaaagtgacgcacgcaatttggaaggtgctgtggattacgttctaacaacggggcgtcattctttagggacgtttgcgctcaaggtccgcggtaagtcaatggagccggaatttaaagaaggagatacgcttatcgttgatcctgagctttgcccctctcctggagatttcgttatagccaaaaatggcagtgagtacgctacgttcaaaaaataccgctcccggggcgttaatgaaaatggtgaagacgtttttgagcttgtcccattgaatcctgattttgccactttgaactctcttaacgagaagattttaatcattggtgtagtgatcgagcatcgccgccaaatgcgtaagtaa

SEQ ID NO: 208487 - DNA, 237 bp, Klebsiella oxytoca
atgagtggttcaggaaaaaggtttgagtttttggtgaatggcgctccgtttgcgctgctcaacaccgagaccgctgtagccgcagactatctgttgttcttggacggagttatcaaagccctcctgaatgatagggagagactcgaacgagaagccaataaaagtggtcgcaccatcaatggacacggatttggctttatcggttcagtagatatcccacaggtcgcggatgaataa

SEQ ID NO: 208488 - DNA, 237 bp, Klebsiella oxytoca
atgaccagatcagatgtcattcttcgatgcttacaaaattccggctgtaatctgaccagagacgatattaaggagcgaataaagctcgttttctctgagtcattcccaacaaaaaacttttccagctgggatatcgaaataaatgaagacaccggaaggcaaataatcaaaaccgttggtcgcgcctcagagatcagggttgacttattcatccgcgacctgtgggatatctactga

SEQ ID NO: 208489 - DNA, 429 bp, Klebsiella oxytoca
atgttgaaaaaacagccttctgtttgtgccggagattattccgaggaagagatttatgagtggatgcggcaaaaagcccattttcttgaacagctcaaatctgctcgtgctcatcgagaattactgcagagtgaattgaatagtatggatgagcggatttctgaattaacttcagctgccgcaattgaatattacaccgactacaaagtgatcgcgcagccaggcgttgatgagagaaccgcacgtgatgttcctgtaataattcacctgctcaggaaaccaactggcaataaagttaaagacgctgaaaacgccgctctggctgagaagtacagcgccgcgctggaaagtggaaccatcttcgggtttgtgtctgatgacgccccttttgtccaggaggcgcggagagcgcttggtcagattagttaa

SEQ ID NO: 208490 - DNA, 291 bp, Klebsiella oxytoca
atgattacgacgctccatgtcgatgcaagcgccgttgctggtcaaacgcgagttgtcgaagcggttagtaggcggtatgcgccattagtggaaaagattccttgtgagcgagtcgaggtaattgtcggcaagctgatcgtcgaactgagagctctcatcttcagttacaacgtgaccacagttatcgcagacggcacccgcaaaactgtcagaaccttccgctaccgcggcgacatcaaagatttcaccactgcattctggacaagagaactttacttcactcattgctaa

SEQ ID NO: 208491 - DNA, 555 bp, Klebsiella oxytoca
gtgaaccatttaatgatcgacctcgaaactatgggtaataaaccaaacgcccctatcgtctccatcggtgcggtattttttgaaccctcaactggtgaacttggagaagaattttatcgcgttgtgagccttaaaagcgcagtttgcggtggcgcggttcctgatgccgataccatcatgtggtggatgcagcaaagcgaggaagccagagcggctatttgcgataaggatgcgataacaatttcagccgcactgattaagctgaacacctttattcgcgagaacgccgactctggcaaggttcaggtatgggggaacggagctaccttcgataacgtaattctgcgggccagctatgaccgtgaatctatcccatgcgtctggcattttgccaatgatcgtgatgtgcgaaccatcgttgagttaggccgtgccattggcatcaacccgcgccgtgatattccgtttgaaggtgatatgcataatgcgctggctgacgctaaacaccaggctaaatacgtctcagcaatttggcagcgtttgattcctgcgtaa

SEQ ID NO: 208492 - DNA, 783 bp, Klebsiella oxytoca
ttgaatcttgctaccctgtcatcgctgacggtggaggggcgcgatggacaaaaaattccccttggcgcggtagccacgccggtctggggagtggacgatccggtactctggcgtcggcaaaggttgccgttcatcaccgtacaaaccgacctcgcgccggggatgcgggcagaaggcgtatcggacggtttgcgcccgacggtggataaactgcgcgcgggtctacccaccggttacagcattgttgaaggcggggtggtcgcggagtccgaaaaaggcaacagctcggtatttgatattttacccgtcaccctcggggtgatgctgttactgctgatgctccagctgcggcgctattcccgtatgctgctggctctgttcatggccccgttcggcttgccggggatcgtcatggccatgctgccgagcgatacgcccatgggatttgtggctctgctcggcgcgatcgcgctggcggggatgattattcgcaatgccgtgatactgatcagtgaggtcgacaataatctcgctcagggcatggaaagcgacgccgccattattgccgccgcggagcaccgggccaggccaatatttctgaccgcctgcgccgcaatcctgggcatgatccccatctctcaccaggccttctgggggccaatggcgtatgccatcattggcgggctgatcgtcgccacgctcgtcacgttaaccgtactgccggcgtcttttagcatgttgctggggatggggagatactggaaaaggcgtcacgcggcttga

SEQ ID NO: 208493 - DNA, 813 bp, Klebsiella oxytoca; identical to SEQ ID NO: 164668

SEQ ID NO: 208494 - DNA, 1194 bp, Klebsiella oxytoca; identical to SEQ ID NO: 164667

SEQ ID NO: 208495 - DNA, 615 bp, Klebsiella oxytoca; identical to SEQ ID NO: 164666

SEQ ID NO: 208496 - DNA, 192 bp, Klebsiella oxytoca
atgtctaatcactggctcgttagaaatgtctattgggtgccaagttttaatattataaaaaaagatttagatgtgatgactgggaatgtgcaacgaaggttaagagttaccatttttttcgtatcaggatttgatgcttatatcaagctggtaactctgaatcatttaaaccaacaatttgacaggttttaa

SEQ ID NO: 208497 - DNA, 123 bp, Klebsiella oxytoca
atgatgtccctctgggatgcgctccggatgaatatgatgatctcatatcaggaacttgttcgcaccttccttagctgtttgctgtccgaaatacccagagtttattttcccgtcaaagagtaa

SEQ ID NO: 208498 - DNA, 249 bp, Klebsiella oxytoca
atggcgaacgcaaaagatgaaatcctgacacttgacgatgttgtcgcctatctgaaagcaggcaaacgaacggtttacaggctggctgcgtccaagaaaatacctgccttcaaagttggtggatcctggcggttttcacgcacagaaattgacctctggatcaaacagcaatcaacggaggggcttgccatcggagatgacgtggatggtaatcccgttgatcaattgaatgatgaggaacggaagtaa

SEQ ID NO: 208499 - DNA, 2766 bp, Klebsiella oxytoca
atgcttggactgactctgcgggatgaatttcggggcaagcgcctcaaagggacagccattgagctctccaacgactccaacaccggtgcaacacagattgccgcgcagcagttcctggagatcacgtatccgacccatgaccttttgaagggtatcgaagcagtcggccccaatcaggggcgcccggtagttgtaatcggcgaacgtgggttgggtaaatcgcacttgatggctgcgctgtaccacgctgtcaatgatgccgcatcgactggcgcatggcttaattcttgggcagccacgctgggtgacaccagcatcagcaagatcgctttgcgcgatggaatgctggtcattggtgagagcttgcaccgccagcgctacaaattcctgtgggatttgctgttcgaacgtcatcctcgcggcgagttcatcaagggcaaatgggaaggcatgggcgcagccaagacagacatcccctccgataagctcatcatcgagctcctggagcacacgccaacgatgctgctgctggatgaattccagacctggttcgacggcctgaccaataccaagcagtatccgtggaagaactgggcgttcaactttatccagatcctttcggagattgccaaagaacggcctgatttgttggtgctcgtgatatccgtgcgcaatggcggcagcgatgcctaccagcaggttcaccgcgtcaacccggtggccatcgacttcaaggcggggggtaatgccgagcgtatacagcaggatcggcgccggatgttgttgcaccgtctgttcgacaaccgcttgcagattgccgatggcaccattgaatcactagttgcccagcacgtctcagaatacttccgcctgcttgatgtgccgcccgccgagcaggatcgcaagcgtcgcgagttcaccgagtcttggccttatgcaccgcacctgttacgtctgcttgaggaacaggtgctgatcgccactgacgcgcaggaaacgcgcgacatgattcgcatcttggctaatctttacaagagccgtggcgaagccgtgcctgtgctcaccgccgccgacttccggctggatgacgatgcatcgggcatcggcgcactgctggattcggtttctaatgagcaccatcgcaccctgcgagaaaaagcgcagcacaacatcatctcggtgaccgaggcggtatacaaccacgccaaccttgcaccacacctgcaagagatcgtgggggcactgtggctgcggtcgattgccgtcggcaacctcgcgggagccgatcccgccacgctgcaggtggacatcactcgaaacaagcctgtggatggcaatgctttccaggtcgagctggcaacgattgtcgagaacagcttcaacatccatcaggatggcccgcgtatggtctttcgtgaggaagaaaaccctcgtgccaaattgatggtttgtgcccgtaacgacaagctatttaccgatggctccgatctggcacagttggccaaacaggctcgctatgtcatcggcggcagcgatgaggtcgcaaaaaatttccgcgtgattgcactgcctagatcttggcagacagacccatggacatcactagatgaagccgagcagccagagcgctgggatgaccgtttgcctgtcctggtactgccggaagaaccggaaaaaatcgatcagacactgggccgttggctcaaagatcacctgcaaaagcgccgcaatacagttcgcttcctgttgccccgatctggttccaccaatgcattcctggatcgcgatctgctcatcctcgcgcgcgctgaaatgaaggcgcaggaatggagcggccataattccacaaatccggcggaatacaaaaagctccacaaagagttcgaaggcaccctgcgtgacaacctgaagaagcgctttgaccgtttcgctgtcttgcaccgctacgatcaccaaaacccgcagcaatctctattcagtgtcgagcacttgaaaaagcaaggtgcacaaattcccgagggcatcgaggaaacgctgaccaacgatctcttcgtgcccgaagacttcgaagagctcgtgctcgaagcggcatctgagaacgcatccctcggcaagctgctgcgcgaactgcaggagccacgcccggcaggccaggattgcatcccttggctgggcgaaactgcgatgaaggagcgcatcctccgtctgtgcgcgcgcggcaagatcgccatcaacctgcgtaatctggagcatctgcaaacccacgcaggcgaggacgaggaatctgcgtggcggcgcttgcggcccaaactctcctataccgggcgtcagcttgatgaagtgttccttatggaaccctcggctgtgcctgccactggcggcactactccacccgtgccgcagccacctgcaggcacccccaataatggatcgggcggcgatatctttggcggtggcacgaccacaccacccgcacctgttggtggcgataacactcccggcaccggtacgtcgcagaatggaggtgacatttttggtggcggcacaagcagcaccaccaaaccgcgcatcccgctctctaacccgccaacctcgccgctaaacctgatcggcaagctcgaaggctggggtattggcccggccacgcctgtggcagaagtctcaatcaaggtgtctgccgccaccggcgcgcagctcaaggaactgctcaagaagctgcccgatggcatgactttcgagctgagtcttgagaaggaggacaactga

SEQ ID NO: 208500 - DNA, 1020 bp, Klebsiella oxytoca
atggcgcttgatgcaggaatattgcagcgtctgactcaaggcaccgcagcggatgcgtggagtttcatcatcgaacgcacgctcgatatcgcctcacgaccattggccgagggcaatgccccgggcgaggtcgtaaagcgcgaccgcgagatcggcgagctcgatctgttccttgcgtccagtggttgggatctgtggcgatgcttcggacaatccgagatcagcggcgtggaacgcacctcagaccgtcttgcgcgttggtgggccgagccgagttatggcaacagtgctgcccgcgccgtgctggttctggatgccctgagcctgcgcgaactgccttggttgctgcagggagcgaaagaacgtggattcaccctgcagggcgtcacagcgaccgcctccgaattacccggcgaaaccaacgagtttgcccgagcgctgggcttgtccagccgaagccagttgcaggccaacggcggtggattggcacacaaacttcaacccgcgcagaccgaaaccatcgatctgccgtggaaggattgcgaaggtttggtgggcagtgcatctggcgcgaagaactgggtgttctggcatcactggccagacgccaagctgcacgactacggcgcaggccaaggtctggagctgctgaccaaggatgctgcgcagcaactttctagtgacgacttttgggcctttgttgagcgcctcgccactgggcggcgcttggtcattacctcggatcacggctacgccgccacgggttacttccccgatgccgatggtgaggttgtcgcccacctcaagcaaacgttctcaagcgggcgtagcaaggctggtaacggtgacactggcccctttgtgcctcccgttgcgttgcaaattgacagtccgcacggtgcgcacctgttggcgctgggccgcagaaagtggcgcagtcagggcggttacccgacattgacgcacggcggcctctcgctgctggaagtgctgtcgcccttcgttgaactatcgaagtag

SEQ ID NO: 208501 - DNA, 1077 bp, Klebsiella oxytoca
atgacagccgccgacttgccagacgattttttcgcagatatccaagggttttttcgcaaaaccccggtgctgcttgtcggctctggcttttcctgcggctatggccttcccggcatgggtgccttggcggagcacttggcaaccgctgtgcacgatgctctgtccaccgatggggcaaggaatacctgggcgcaatcagtcgacgcaatcaaggcaaatctcgaagctgggctgaatggcattccgcttggcatggcggaatggggagagatcgtgtcagccctacgcggagaaaccgcgaagttgattcttgatagagccatcgccgcagaggcaaaaattcttggcgaaaaggttgccggtggtcatgcgccgtcacgcctcctgaatcgtttgtttagtggctcaccgcagaacacggacagcatccatgtcattacgactaactacgatacgttgttggaattgttttgcgatctcgcggaaatccctctggacacaggattcacagggttccgtcggcgtaagccgcgcccccggccactcttccagacgcaatacagccgtgttctggtggccgagaaacgccagcagcaggtcgatcaccgcatctgtaaaacagttcgtctgtataagcctcatggctcaatcagttggctgacaacggatgaggggccagtggaagttctcaacgatgtttccgtcgcggaacgagccatcgttgtgcccggcccctcgaagtaccaagacgcattggtcaatatcttgtttgacgaaatgcgtacagcgatgaatgcggcgcttgctgatgctcaggcgctgttatgtatcgggtttggcttcaacgacgatcatttgcaaggcgtcatcaagcgccgcctggccgcaggcatgcccgcaatcattgtcacgcgcaacccgactccgaacattgaacaactacttggcgaacaccctcacgtgattgccgtgttcaaagatggggacggggccgtttgtcgctggaaagggaatgcactgcggtcaccagagccgctctggcagctagatgactttttgaaaaaatttgtggagtga

SEQ ID NO: 208502 - DNA, 1794 bp, Klebsiella oxytoca
atgagcattttcaatttcaccgacgagcagtcattgggcgaagtccgcagtgttgaaacctcgcggatcaccgtgcgggtgacggatggccaacgcctgcaaaaggcgcgcgtcggtcgattggttgccatccagtcgatgggcgatgaatggctgatcggcatcatcgaacgagtttggcggcatccggtggagctgccgacgctacctgaagttgatccgccagcggatctggctggcgtgcctcaagaggaaaacggcgtgtcgatcagcttggtcggcacctatcgtgctcgggatgggcagcgcaaggacaccttcacacgtgccgttttcatcctgccggagatcaaccggcccgtgtttcccattgaagaaaagtcgctcgaagacttcatggggattttgagcgcttcatccaaggcggatgcggcagccccactcaaggtcggtacctataccttggatggcaaggccagtgcctacatcgatggcgacaagcttttccagcgccatgccgcgctgctgggcagcacgggctcgggaaaatctttcaccgtcgcctccatccttgagcagtcagcacaactgcctcaagcgaatatcgtcgtgctcgatttgcatggcgagtattcgagcatgaaattcgcctcgcattaccgcatcgcaggcattggcgatatcaagaccaagaaagacggcgcgatcttcctgcctttctggctgctgacatatgacgagatgcaatccgtttttgtggatcgctccggtgacaatgcgcccaatcaggcgcttgccctgatggattcggtcgttgaaatgaaacgcgctgccatcaatgcgctaggcaagccggagttgctggaagggtttacggtcgacacaccggttccctacaagttgaatgacttggtggaatccctcgaccgaaaaaacgacgaggtcattcccacaggcgaggaatacgtcagcggtgcgaagaagggacagcccaaaaccgaaaaaggcccgttgaacggcaagctctctcgcttcctcattcgcttgaaaaccaaaatgaacgaccgccgctatgcgttcatgtatcaggcaccggaggactacgagacctacgaggcactacacgatctcgccaagaaactgctcggtacaggcaacgtcaacgatggcgtcaatccgggcatcaaaatcatcgacttttccgaggtgccctcggacatcttgccagtggttgtgggcttggtcgggcggctgatctaccaaatccagttctggagcagcccgggcgaagacggcgatgcgcgccacccgattgtcatcgtttgcgatgaggcgcatctctacctgccaagcagcgccgcctccactggcccgctggaaaagcgcgccttggaaaactacgagcgcatcgccaaagagggccgcaagtacggagttgggctgatggtggtcagtcagcgcccctcggatgtcagcacgaccattctcagccagtgcagcaacatcatcagcctgcgcctggccaacaagaccgaccaggcggtggtcaagcagctcttgccagaaagcctggaggggctgatggaggtgctgccgacgctggacgtaggcgaggctgtagtggttggcgacgccaccctgctgccgacccgcatcaagatggccaagccaaaacatgaaccgcgcagtgcaacgatccccttctggacccgctgggccacgcccaaggccgaagtcgatttggttgccgccgtagaaaacatgcgccgccaatcccgcgcacaagaagattaa

SEQ ID NO: 208503 - DNA, 3216 bp, Klebsiella oxytoca
atggccaccaaaaaagaactactggcgcaagaagtcgccaaagccgtcggcgcaggcaagacggtcgcgcttgaaactgtcgatttcaacgatccgaatcgtcccaagacttgcctggaggtggacttcccgatcctgcccgtcaatcaggtggcgatcatcgaaggcaacgcgggcaagccgatttaccagatgtcgaagtggtgggcgcggcggcgctccagcgtgttccgctcaatgttgatcgcggcggcgaccaaagccccggaagacaaatcgcacgcagccaagctagtgtgggacaactactatgccaatcaccagaaaaaaggtgcgttcaaggacctgaaggtggccgacatcttcatgggcggcggcaccacactggtggaaggctcgcgccttggaatgcagatggtcggcaacgacctgaatcccgtcgcgtggtttgtggtcaagcaggaactggccaatgtcgatctagagcaagtgaaaaagctgctggccgacattgaggccgaggtcaagccgcagatcatgccgtactactactgcgatggcccggaaggtgagaaaggctcgtggacgcacttaccgaccaagaaggtgatgcccgccgatttcgacccgctgaccatccctcgtgacgagcgcaaggattaccgttacgaaggcccggagattatctacacattctgggccaagcacggcccttgtcaggtaacgggctgcggtcaccgcacgccgatcatgacaagcccggtgatggcggtgaaaacgctcagcgtcaaacactgggagcattcgtgcagtaagtgcggcggcgacttccatgttgaggaagatatggcgcggatggccccagatgcgccactgtatgtggcaccttccgaacatccgttttctgtgctcgaccgccggaagggcgtgatctgcccgcattgtggccatacggcgatggttaacctcggcaagggcaagaacaagaaggtggaactgagcctgctggtgcatccgcaatggctggcgggttcgcctaagcaggatacgaatagccagccttacggcggctcggcgcaggatgatgtggctgcaaccacgcggtgggacaatgaacgcgcatccaagattcggctgctggaggtgcgcggcgcgctgccggaggaagtgacgtgcccagaaacaaaggtcatttttgctccgcaaaatggcacggtaccgaaaaaatcccattacgtctgcgcagcctgcggcacaactcaggacgtactgaccaccatcaaagccacaggcaagaccgggcctatggctgcctatgcggtacatggttacgcccccaagcgcgatgccgcaggcaaaccctatagtgggcgttttttcgccgcatatgatgcaattcacgcatgccaatacgatgccgcgctcgttgaatgggaagcacgaaaggataccgatctcaaagactattggcctcgttcagaggtgcctttcggtttcatgacacacatgaataacggcggcattccaaaccacggctatacgcactggtggacgatgttcaaccctcgtcagttgctggcacaagcccagctgctgagaggaattctcaccattggcgattacccttggagtgttagagaggctcttctaggtgctttccagcagagtattcgctatagaaatatgttctgtttctgggatatcaattatgacaagttggtgccccacatgagtaataacaactatcaccccaagacaaatgttgtcgaagggtcttgcttcggtattatgggtagtgggcgctggtcatcttgtgctgatggtgtcatagaagggattgaatggggtaagaatccttacgaacttgtcagtccccaatctgtatctcgggttcgcagtgatggtgttgaaaaatcaagtagcgaaaaggtattccccggtgatgcagttgtagacgtggaagtgcatcagggctcgtctacagatctgtcacaacttgaaagcggtagcctagatctggtgattaccgatcctccgttcggtggcttactgcactattcggagctgtccgatttcttctacgtatggcttcgcctggcgctcaagaacaaatacccagcaatctttggctccgagtacaccccaaagtctctggaggcagtagccaatcgggctcgcgagccggaagatccagatggtttctatcagcggctgcttacccagtgctggcgtgaggcgcatcgactcttgaagcccggtggtatcttggctttcaccttccaccatagtgcggatgagccttgggtggcggtattggagtcgctgttcgatgccgggtattaccttgaagcaacttacccaattcgctcggatgagacaaaaggtgatggagcaaagccaggtaccttcggttctcaaactatcgaatacgacatcatccatgtctgccgcaagcgcacggaagagccaaagccggtgagttgggggcggatgcgtcgtgaggtgatggctgatgtgcgtcaattgcaaggaatgttggagaatcatgctcaatcaggtttgcccgctgcagatattcaggttattcgccgtggtaaagcattggaatacttctctcgccattacggcaaagtgtacgttgatgaagggcgtacgatttcagttagggaggctctggttggtattaaccaactgattgatgaggatgcagataaaggcaacgaagcaccaccagtgaacgctgagcccatgacccgacaatttttgcgcacttttggttcggttaacgagatgaagcgcgatcaattgcaaaagtatttgcgtggaactgtgactaccccagatgattttgttcagcgtaactggtgttcggaggcgaagaaggttttcactcggactaatccactcgatttttcccgtgattggcaacgaaaacatcgacgtaagctaacctccgatctcgaccaagcgctggtattgatcggagcgtgctttgatggcagtggaattagtgcctcggatacgctgaataacgataatttcaagccgcatgttgcgctgcgttcactgctggaatggttgcaccgtaatggtccggatcaagctacccgcaatgcagcgtccctcgcagtccatatttaccgaaattggcaggcaagtttggcaccattaccggtgcagggctccttatttgacgatgatgaggagtgggcataa

SEQ ID NO: 208504 - DNA, 501 bp, Klebsiella oxytoca
atgcgacagactgtagataccgtgtggcaacgacgaggcaccagttggttgtgggacgaagaggctcgcaatcaagtctgtgtcgcaagtgaggtctggagtttgcggcagtttctacaatcgcaaggacgttggcccgatgatctccctagcaatgacaaccagacattagttgtcgccgggcttgatggttgtctcgatctgttagctcctgaacagggagaaatctggctgggagaaacgattaaaagcgccattctctcgtttcaggattattacggtggtgaagctgcgttgatcttctggttacctcaaggtcacagtcgacttaaacaactggttactaatgatgctgttttatggttatgcgaggcgccttatcgtgagaatcagattgattttggtcgcctgctatggggggaggctaatgagtatccacaggaaattttgctgcgtgaaggcgccaaagtagctggactgtttcatttacgaattacctga

SEQ ID NO: 208505 - DNA, 327 bp, Klebsiella oxytoca
ttgcacaggaaagggggccagctcccggacgagaaatgtgacgccctgccactgcgggcagaaaaactgtctctgccgcagagcggggattcagacctggaggtggcgcaacgggcaaccggggtcatccggctggctaccctgtgtgctcagtcgcagaaaagaatcctggagctggaaagggagcttgcctcgcaaagtgaggagctcgttgacctgcaggcacatcccttttttaacctgcgggataaataccgcggccagatcctgttctggggatgggggatgggttttctgtgctttatctactggatgttggtgtcatga

SEQ ID NO: 208506 - DNA, 618 bp, Klebsiella oxytoca
atgataatgtcatcccttccggctgtttctcaccagggacattccttacagctgccagtggccatcgattatcccgcggccctcgccctgcgccagatggcccttgttcaggacgaactgccgaaatacctgctggcgccggaaatcagcgccctgctccactatgtgcccgatctgcatcgcaagatgctgctggcgacgctctggaacaccggcgcgcgcattaacgaagcgctggcgctgacgcggggggatttttcactggcaccgccgtatccgtttgtgcagctggccacgctcaaacagcgtgcggaaaaagcggcgagaacggccgggagagcgcccgccggcaatcaggcccatcgtctggttccgctatccgatcaccagtacgtcagccagctgcagatgatggtggccacgctgaaaattcctctcgagcgtcgcaacaagcggaccggccgaaccgagaaggcccgcatctgggagattaccgaccgtaccgtacgcacctggctgaatgaagccgttgatgcagctgctgctgatggcgtcacattctcgataccggtgacaccgcacacgttccggcacagttacgccatgcacggggtttga

SEQ ID NO: 208507 - DNA, 417 bp, Klebsiella oxytoca
atgaagaaaacctggatgctcgacactaacatctgctcgttcatcatgcgcgagcagccggaatccgtgctgaagcgcctggaacaggcgatgctgcgcggtgaccgcatcgtggtctcggccgtgacgtacgccgagatgcgcttcggcgccacaggcccgaaggcctcgccgcgccatattcaactggtagacgcgttatgcgcgcgcctcgatgctgtcctgcccttggaacactccgcggtggatgccacgacggacatcaaagtggcgctgcgcctcgtcgggacgccgatcggcccaaacgataccgcgatagccggacacgccatcgcggccggcgccatcctggtgacgaataatgtacgggagtttgagcgcgtgccgggcctgatactggaagactgggtgaaataa

SEQ ID NO: 208508 - DNA, 231 bp, Klebsiella oxytoca
atgcacacagtttcgatatttaaaaacggcaataaccgcgccatccgtctgccccgggacctggattttgagggggtcagcgagctggagatcgtccgggaagggaacagcatcatcctgcgtcccgtccggccaacctggagctcgctcgccagcctggaaaaagctgacgctgattttctgaaagagcgtgaggatgtggtcagcgatgaaggacgctttgagccatga

SEQ ID NO: 208509 - DNA, 639 bp, Klebsiella oxytoca
atgaaacgttttctgtgtatggctgcaacgttacttgtaagtacaacggtatttgctgcgggtgagcttgaaattaatgattctccgctgacacgagttttgaatgaccataatcaggcacgggtgtcttcctgtaatgattttatttctctgcgtaaagcgggtgaaatcgtgaaagatctacccggtctttcagatcctgattaccacactgctgaagatgctttattttcatgctggctgaaagcctatacggttgagcacaacatgatcccgtttaatgaaacaaaaccaacgctgggtgaactacttacgcattttcctgccagttcggcctataccgtaagccatgaggaacatgaaaacatagagcagcactatgcgggtaaaacaattaccgaatataccccggacctgaaggccagggacgacagaatggaatccgccgccagctcaaccggttatgttctggatgattactattctttcactgataaagaaggggatcatctctacattgtcgctctgactggttactccgttggtggcacggtcagtaacaaagtatattatcgcattgataatatgaacaaccgtgtctggaagataaccagacttaatgaaaacagcccgttatga

SEQ ID NO: 208510 - DNA, 1293 bp, Klebsiella oxytoca
atgaaaaaactcacgaaatattgttcttatatcgccggcgtgtcgcgggcgatatcaggaaagcaacgggcagagatgacgggcgaacggcgggatgatatcagagtaaaacacggaatcatgttttctctcgcgtcgttgctgttgttgtcactgctcccgggaagggcgtttgccgcaatagattgcgcctcgaacatgtcagggcgcaccacttatgtggattatcatgtgccactccttcttgacggtattcaggtttcagcattaagaaacagtccggttggtacggtgctctggagccaaagtattaagaatccggataatggggattttctcggcgttacagactgtattcgtaccgatggtgatcaaagcacgataacgcttaccttgcaccataatatagaaggtagtctgccagctattgtaggtacgtggaggaacagaaatatttatgatacaagcattcccggattaggtcttgtgattgcctctgcaaacctcaagacttatccctttatccagaactggggggggggaaatggaacgagctctggctggggtggtatagcgtcttatatgggacagtatcttaccgtggatatttttctggtcaagactggtgatatacctgccgggacgtggtctgttcccatctctgttccgccagtaactctgcatatggagtttcttgagaatgcgtcagggcctgaagtgacccgagactatggtcctcgtttaattatagagtccggctccattaatgtagtctcaggtacctgccagacacccgatgtcaatgtggccatggggaggcataatgtgtcagacaatatggaaaatacaccgtgggtggattttgccattgagttgaataattgcccgccgatgtttggtttctacaaagcgatagccaatcaatttccttcttttagctgggatggtgatgataatattgttttgggttccgtgactccaaacaccgtcaacgtactgtttaatccagtttatgggtttagtgaaatgccgagcggagaacattgcgctaatatcgcacccacgactgatgcggcgagcggtgtgtgcctggaaattcaggataaatcgaatatcggtgtactggaaaaagcggtctctggtctggcggtggacagcggcctgaatttattgaacagcgtcgctaactattctattcctctgagagcccgctatgtcaggactgccggaagtaccacaatgacggcgggcagagcggattctgcggtggagtttacgataaactactactaa

SEQ ID NO: 208511 - DNA, 321 bp, Klebsiella oxytoca
atgcgtatgtctgttttatttgctctgacgtgtttgttcagcgcgtttaatcttgtatttatgccattccatcccgtcatgatgttgtgggctttcggcctctctgccgccttcgttattgtcaatataattgccgacagactgcgtctgtggtccggtattgcatggggaatagctgccgccgtcatcgtcgcttctatgcttaacggtgcacagcccgatgaagaaaaccgggtgctcatcagttcattcgcctgtctcgtctcagcatggtatgccggggttcagttcagaaaagagaagagagagtctctgtcctga

SEQ ID NO: 208512 - DNA, 777 bp, Klebsiella oxytoca
atgcgaccacaacaaaatacgtccccggcttttccgatgaataaagttcctgaagtcacactctttttctggctgataaaaatgatgtccactaccgtgggtgaaacagcggcagacttcctgaatatggatctcaactgggggctgactaatacctctctgcttaccggcatattgtttgccgtggtactgacctttcagttacgtgcgaatcgctatattccggctctttactggtcaactgtactattaatcagcgtgttcggaacgctgatcactgacaacatgaccgaccactttggagtgccgctcgcgctgtcaacatcggtatttggcggattgctggttctgacattcggactctggtacgcgaaggaaaaaaccttatctattcacagcatcaacagcctgaagcgggaaacgtattactggatcgccattttgttcaccttctcgctgggaactgccgcaggagactgggcagcggaaagtctggggcttggttatctgaatgcagccattgtgtttggtgcgctgattgcgctgaccgcggtcagtcgctatctgttcaaagcgaacagcgtactgtgtttctggattgcgtatattttaacccggcctctgggagcctcttgtggtgatttgttatctcaaccccttaccagcggtggtctggggcttggcacaacaggaaccagcattttgttcctgctgaccatcaccagtcttatcggttacctcacctataaaatgaaactcgaagaaatcaacagataa

SEQ ID NO: 208513 - DNA, 639 bp, Klebsiella oxytoca; identical to SEQ ID NO: 149237

SEQ ID NO: 208514 - DNA, 1368 bp, Klebsiella oxytoca; identical to SEQ ID NO: 149236

SEQ ID NO: 208515 - DNA, 168 bp, Klebsiella oxytoca; identical to SEQ ID NO: 149235

SEQ ID NO: 208516 - DNA, 369 bp, Klebsiella oxytoca; identical to SEQ ID NO: 149234

SEQ ID NO: 208517 - DNA, 669 bp, Klebsiella oxytoca
atgtccatggggataggctacgccggcagtagtgtattatttcttttgctgttcgctgttgctgttgccttccagataaaatcaacagaatttaatcagtataagtactgggttaccgtgatcgccacaacgaccgcaggcacaacgctggcggacctggccgacaggacgcttggcctcggttatgccggtggtgtggtacttttaataacgctgctggcattttcattttatatctggttcagaatctccggagcagtgtctgctcattccattaaaacgccttcttctgaagcattttactggttaacaatcacgttctcacagacgttagggactgcattgggtgactggactgcagatactgcaggtctgggttacaccggaagtatgtatatattcggggcactgttattacttctgacatgtttttatttttttacgcaagtatccaggacagtacttttctggagtgcatttatcctgacacgcccacttggtgctgtggtgggtgattttattgataaacctctcagcgccggaggacttgaattaagtcgatattcagcatcatttttccttatggtatttgtcattgcatgtctggtcattttcccacagtgttcagcaagtaaaaaaacaactgaaagatttaacagagaatactaa

SEQ ID NO: 208518 - DNA, 345 bp, Klebsiella oxytoca; identical to SEQ ID NO: 165267

SEQ ID NO: 208519 - DNA, 561 bp, Klebsiella oxytoca
atggcactctacggctatgcccgcgtttcaaccagtgatcaggatcttaccctgcagacacaaattctccgcgctgccggttgcgaaatcattcgtgcagaaaaagccagtggaagcagccggaccggaaggagcgagttgcagttgttactggagttcctgcgccccggcgatacgctgatggtgacacgcgtggatcgactggcccgcagcattaaggacctgcaggatatcgtgtatgccctgaatcagcagggtgtaacgctcagggcgacagaacagcctgtagaaacgtgttcagcagcaggcaaagccttcctcgatatgctgggcgttttcgctgagtttgaaaccaatctgcgacgtgaacgccagatggaggggattgccgcggcgaaagcacggggcgtgtaccgtggaagaaagccctcaatagacccagcagaagtctggcgcctgtacaccatggagaaaatgggggccacggccatcgcccgtcagctcgggatcgggagagcgtcagtgtaccgggcgctggaaaattatgagcagtcggcgtag

SEQ ID NO: 208520 - DNA, 1665 bp, Klebsiella oxytoca
atgagcagtcggcgtagcgccatcccggctgattccctgttgcaactacggcaacggctcgaccgcctgccgccaaaaagccctgaacgtgccacccagattgccgctgccgctctgttgtatggtatttcagtcacgacggtctatcgcgcccttcgtctggtcctcagaccccgcacagcacaccgcagcgatcatggtcagccacggatactccccccatctgaactggaacattactgtgaactgattgccgcgctaaaattgcgaacgacgaataaatccggtcgccatctgtcaaccggacgggcaatacagttactggaagagcacggcgtggagaccgttcagggattgataaaaagtcccaaaggcttgcttagtaagcagaccgtcaatcgctggctttcccgctggcgtctcgaccagccccgcctgttacgggagcccccggcagtaagatttcaggctgaaaacagcaatgactgctggcaatttgatatgtcaccgtccgatctaaaacatattgaacggcctgattgggttgaccctgcccggggcgaacccacgctgatgttgttcagcgtggtggatgatcggagcggtgttgcttaccaggaataccggtgtgtgtacggtgaggatgcggaatcagcgctacgttttctctttaacgccatggcaccaaaagccaggtctgattttcctttccagggccgccctaaaatgctgtacctcgataacggaccgctggccaaaagccatgtattccagaatgtgatgcagtccctgaaagttgactggctgacgcatacaccggcaggtaaggatggcacccggacaacggcacggtccaaaggtaaagtagagcgtcctttcaggaccgttaaagaggcacatgaaaccctgtaccatttccataaaccggagacggagctgcaggccaacgaatggctctggaactatctgagtcgttacaatgcgcagcaacaccgcagcgagaaacactcgcgcctggaggactggctggcaaatatcccccgggacggcgtgagagatatgtgcagctgggaacaatacggtcggttcgcccgggagccggaatcccgcaaggtgggtgttgatgcgcgggtaacgatagacggcaccgcatgggaagttgaaccggatatggcgggggaaatcgtcattctgctgtgggggttgtttgacgaagagatgtatgtggagtttaccggtgaaacatgggggccttattatccggtatcggggcctgtgccactacaccgttatcggacgttcaggcgtggcaaagcggctgaacgggccgatcgtattcatgctctggccagacagctgaacatccccatcagcgcgttgtccggaagcgatctccgcgtggtcagtgatgacacccagcagcgcattgatgaattgccacatcagccctttgatgcccgaaaatttgaataccactttcccaccgttattgcggcaaaactggctattgccgacgatctggccattccgctggccagaatgccggatgaagaccgggcgtttatcgacagtattctggctgagacgctaaaccgtaatgaagtactcgcccgcatcagagactattttcgtaacagacaaccaggagaagaccatgcgggttga

SEQ ID NO: 208521 - DNA, 603 bp, Klebsiella oxytoca
atgagtaaagtgaccgccgcgactttggtcaacaaaatagtttaccgaacagatttaaatagtctgaaaaaagttagaaatgatatgaggaagttgcaaaaggatttcagcaaaacagagggaactatagccaaagcaaaaatgcaggcagataaacaggcgtacactgcacaaatgcagcagcagaggcaagttcaacaacaacagaaacaggcagctaaacaagctgctgtagacgctaaagcaaaagctaacgagcagaaaaagctggcagcagcccagagcagagcggctaaaatccagatgcagcagcaagctaaaacagccaaaatcagcgaaaatgcgcgtttggcagagcggaaagcgctgtttgatatcggcagattgcaggggctgcatggtgctgaacgtttccatgctatcaaacacgctcagtcacttgttaatcagtaccagaaaggggctatctcccttcgagatatgaatcaacaaatggctatccatatgacccagcaaaaggctctggcaaggaatcagcggaagcaggctaaacagtcaggactgaatcgccacgggtttaacagacacctcagagtcatttaa

SEQ ID NO: 208522 - DNA, 276 bp, Klebsiella oxytoca
atgattgattttgaacagcataaaaatattatagaagagtttgtagaacagtattaccccctggcgcatagcctgatgattgatagttataaagatgcagaggtttattactcaaactatcaaatattgctgaaggcgatgaataatctccctgagcatccagattattttcttgaatggttggtagaatatgacgcagctttgtatattaatttgatggaattggtcgtcatcaccagaactgttcacaacgtctttgaacaagtcacaccataa

SEQ ID NO: 208523 - DNA, 1470 bp, Klebsiella oxytoca
atgcaaaaaacggaacaatccctaaaagtaaaaatcgttaacgccatctgtggcagtggaaaaagttacaaactcaaacaatatataaaaaccaatcctgataaaaaggcgctgatcgccgtcccaactcacgatttagcttctcaaacacaatcagacttccagaaactcggcatccctgcatatcataatcaggtagataagggggagagcgcaacacgatcattaataaacgcgctggatgatgattttgggcgaaacattgttattgtgactcacgaatgtttgctacatttttgtctatatgcgtatcgtgatgagaaaacccagaataaattaagtctgtttgacatctatattgatgagatcccctcagcctggtatggggctgagattgattataaaaatgaggaatatcgagattccaactttccatttcttggatggttagaggaacgggacgggttatattttattcgtgatgaggacagagaaaaatttgtagcctattacgattcagaacacgccaatagcaaactgctgaaacaggctctattttcaatgctaacagggcagggaatgctcctggaagaggacaaatattttttctcatttaccgctaatccaatcctgtatagcgccctgtgggccaaatcgttcaccgtgttaggcgctaacgttgggattagtgagtttgtattcgctgctaaaaccatcctgaatgcagaaatctcgttggctgatgatgagttgaagcctgacctgatgcgccgtgtccatactgacacaaaacgaattgaactgatccctgtgtttagtcagaaatgcaccaaaaaactactgagtgaacattacagcgatatcctgaacgggacacgcagagcactgagggacgaatttatctataccagcaacaacgatgagcagtacagcaacggtttttattacgcctcacatgctgatgacgtgttagaaggtggtgaacgtatttcaatggcttcctatggtttgaaccattaccagcacctgcataaggcggcgtttctggggtgtgcaaaccttgatgggacaactattggtcactggcgcacatattgcgatctgaatggctgggactggcgggagttagaagagaaacggcaagctgcattgaactatgaaaaggtgtatcagttcgtttcccgttgttctgtccgtgtaaggggaaatagcaacaaacaggtttatatcgtccctgatgtcggttgtgctgaatatctcaaacaacattattttccagatgcagtgatcaaaccagcgatgataaaagctgaaaggaaaaagagagatacatctaaaggagattcgaaacttcagttaatcaagggactattggatgaaggttataaacagagtcagattattgcaatcacaggttttaaagaaaattcagttaagagatacttaaaaagaatccgaaaagcagcataa

SEQ ID NO: 208524 - DNA, 573 bp, Klebsiella oxytoca
atgaaattgattatagtttttttattatcagttatagccttcaatatcaatgctaaagaaaaaggtttcacaggagtatgcagtgaaggaaaagagttaacaggtaagattcttaacgactttgataacgcagcatcatgtgaaaatgatgattctttttccagagagtttaagcgagttcgagattattatccaacttacacagcatcagaattacataagatagttaaagaaaatgaatttactttgcagaaaaatattaaaacaagagcttattttcttattgtaaaggtaagaaagattgaaaaaactcaattcggtgaaaaatatgttgtgtataatggtgaacgaaacccctacgctgattcatttgttttcacagcatcacaagattttgatttaaccttcgggaagacattctttggcggacttatgaaaaactctcgtgaaaatgacttgccaacaatagggaagggagatgttcttacattcatttgccctagtaccactccgaaatctgtaggttatttatcagaaaaatacactgggtgtttttatttctcgaagaaataa

SEQ ID NO: 208525 - DNA, 231 bp, Klebsiella oxytoca
atgtcagaagaaaagaactatggccaggggccgctaatccctgtattcgcgatcaaaattgaatcagtaacgaatgtcgtgaatgggcaggccatcattacgccggagcccggacaggaaatcacagaccctattacagtcacagcggcatttgtggagaagttcagcccgcaggctggcgggtattatattatgtgcgagggtggtgtgggtttgtactcagatagctaa

SEQ ID NO: 208526 - DNA, 1728 bp, Klebsiella oxytoca
gtgggccagtgtccgaatctcgccgcactgcgagctatctctttctcatttgtcgggcaacaaatctttcttagtgagcacacatccggacagggggccggtggtggtattttttactgtcactcgcttatatctgactcaacgtatgctgatgataatggctgtcagataattaatgattacgggcaggttatccgcaggaaagatttctctaaaatatcgctggatatgtttggtggtcgtggtggcgtactcattgacccgatgattgacaatggataccaggcgaccagaacattttgcaaacccactctatggatacccgaattgccaccagaacagggatattttttaaatggtggcttaatttatagcgtcggccagacagaaacggatgggcgcctgccattctttattcgcggcgaaggggacggtgcggattatgccgggccgccgatattccatttcgggaacaatatcggcattaccattcagcgagagccggatgggactacaccccggttctgggtatgcggaggcgttatcggcgttcagttcaacgggacaaaggaagatggttccggagtcaatgagggcgatatcgctacgcctgttcgtatttcagatggctggaatttcaaggcgcattatttcgttagtggatatacaaaaaataactgtgcgctctcagtctataaccggaaaaaatggaccgaaggtactgatattaaattaaattgccgtcagtcgctaacgggcgtgcgctttcaccgaaataaagaggcggggagtactgcaacggattcttttttcaggacaaaagcggatgtcgattttaatgccgggatttcaggcactggcgtgacaggtattgtgctgggcgacggaacagaagcagggaaatgtttcatgtacgggcatgacattaacctgactctctggatgtcgaatggctcctggcataacggcattctctgttccgattacagtcattttgccgaagatgggcaggtcagactgattgctgacggatacggtctttcgcgaaccgtcctcccggcatccgaagtggttcacctcattcgtctgggcggccagaatgcccgcttcagaagccgtgtcattaacgattcagggcaaggtggcgactggacgctggattatcttaacctggtgtttcagtcctgcatgtacacaaaatcccaggtattttacccctctgattatgatgctgtttcgccactgagacccagggggatgcagctttactttaacggaaaattcactgttgatgagcgccattccgggaagatttatacactggacggattaatacccggcatgaggctgctggttgaggtggcaagctggaagggaaacgaccaccactctaactcactgcaaagctggagcattgaggttcgcggaacggacgagccctgcatcgtcacgcctattgccggttcagtaaacctctctacgacaaaagcagcggcgttaacgagcacgggtggtgctactgattcctttgtcaaagacgtatctctgacaaatccgcgtctgtgggtcggcggagatgagccgtacgcccttacggtgaagaatgctaacgacaacaacaatattaactatgcggctaactcggggcgaaaaatccggtttgtactcccgccattttctggcgcgactaccgcttccccttactatgtatctataaaggttgactga

SEQ ID NO: 208527 - DNA, 1059 bp, Klebsiella oxytoca
atggcaaaaactatatcagtttttaataacaaaggtggcgtcggtaaaaccactataatctggaaccttgctgtgtcgctggcagataaaggaaagagtgttttattaatagacttcgacccacagtgtaatctttcgattgcatgtattggtgatgaagagttttcagagttattagtaccttctgatgattttccatttggaaaaactgttaaagcatttgcattaccttacatacagcaaaatactataggtgaagtatatacaactgaaccaaagactaaaacagatgctggggttttgcatattgttcccggcgatttttggctcaacacattttctgatattttaaacgtcggtactgatgttataagtggcgcaggcttatatcgttttattttaccagcattgataactaaaaaagcatccgaaaaaaatgaagttgattatgattatgtcttaatagatttacctccctcattcaatactcttgtcagatcatcattgtactgctcagactactttttagttccatgcacacctgatttattctcttcatattgtgtagggctgattggtgagatgttaccatcatttatacgtgattgggaacagggcaaggaaaggtatctaactggtaatcctcgcgataatgttgtatctcagaaaggaatgcctaaatttggtggctggatattcaatggctttgatacaagaaaacaaaatggtatcaaacaagaggttggtgcagacgccgttcatcatcgctcaataagaaaagctattgaagaaaatatgattcctcagctttcacggatttcatcttatgaagctgttcctgattttactgattatgaaccagttggtaagattgaggacctcaacgttatggctcctgatagtattatccaaaatatacctattcgctatctgtctcgagtcagaccaactaatgctcttcgtggcagaggacaatgggcagttaatcaagtagatcttatgaatgagatggctgatgagtatgataaattggctgatcacataataaataaattttaa

SEQ ID NO: 208528 - DNA, 1434 bp, Klebsiella oxytoca
atgactaaagaactatttgcaactattacaacaaaacttaatttctctctacgtaaaaagattccggtaattttacaatctgaatcggctgaatgcggtattgcctgcctggcaatggtatgcagctactatggactggatattgatttattcaatttccgccaacgctttggtagcccttctcaaggttcgtcccttatgcagctgagtaaaacagcagaacatgctgggttgaaaagtcgtgcactatccttggatctcgacgaaataagacagctcaaattaccctgtatcattcactggggtatgaatcattatgtagttttgaccaaggtcagaaagtccaacttccttgttcatgacccttccttagggaaacgagttattggattgcaggagatgtcgaataactttacaggtattgcgctggagttatggccagatcaaaattttgaacaagagacagcaaagtcacgcttacgtttgttggacttaatgcgtaatatcgttgggttaaaatcggtattactcaaaatatttgctttttctgttgttgtagaggctatcgggttacttttaccgattggtgcacaattagttactgaccatgtcatcatggcccatgatcaaagcctgctttcggtaatatgcattggtttggttttctttactctatttcgtacgtttatcagtatgttaagagcctggacatcattaacgttgaacacgttaactaacatccaatggaaaactaccctgtttgatcatctgactaaattaccccttagtttttttgaaaaacggcatttaggcgatatacaatctcgcttttcatcgcttgataccattcggtcaacttttactaatagtattgtcggtggaattatcgactccattatgactattggtcttttgatcatgctagcactatacggtggttggttagtatgggtggtagtaggttttaccgcttgctatgctattatgcgcctttcgacatatcatttttaccgtcgcgtagcggaagaacaagtggttaaaggagctcggtctagttctcattttatggaatctctttatggcatttctaccattaaggcattaaatttaaaagagcgccgttctcagcactggctaaatattaatattgatgcttgtaatgcagggattaagcagacacgctttgatatgatgtttagtggtgttaatacatttatctcttcgattgatcaggttgccgtcttatggcttggagccattatggttattgataatgagatgaccctaggcatgtttatggcctttaacgcttatcgtggtcaattctctcaacgtgcatcaagcctcattgatttatttatgcagttacgtatgttatctcttgtgagttcaaccgatggacgcaacacacttattgaaccgttctgcgggtga

SEQ ID NO: 208529 - DNA, 1479 bp, Klebsiella oxytoca
atgttgctgtcctcgacgcgtaaggactggctgggtaacgtccgtggtgacgtactggccggtattgttgtcgcgcttgcgcttattcctgaagcgatcgccttttccatcatcgccggcgttgacccgcaagtcgggctctactctgcgttttgtatcccgctgataatcgctatctgcggtgggcgtccaggaatgatttcttcgtcaaccggcgcgatggcactgctgatggtgacgctggtgaaagaccacggcctacagtatctattggccgctactgtgcttactggtgtgattcagcttattgctggttatttaaagcttggcagtctgatgcgttatgtttcgcgctcggtggttaccggttttgtcaatgccttggcgatcctgattttcatggcgcagttgccggagttgaccaacgtcacctggcacgtttacgccatgacggcggccggtctaggcattatttatctgttcccgtacctcaataaaaccatcccctcgccgctggtctgtatcgtcgtgctgaccgggatctccatgtggctgcatctggacgtacgcaccgtcggcgacatgggcaagttgccggacagtctgccggtcttcctgttacccgatgtgccgcttaatttcgataccctatcaatcattctgccttattccgccggccttgctgtggtggggctgcttgagtcgatgatgaccgcgaccattgtggatgacatgaccgatacgccgagcgataaaaaccgggagtgtaaggctcaaggggttgccaacattggcgctgcatttattggcggtatggccggatgcgcgatgatcggccagtcggtgatcaacgtgaaatccggggggcgtgggcgtctctccgcactctccgcaggcgtcgtcctgctttgtatggtggtcttcctgcgtgactgggtttcgcagatcccaatggcggccctggtagcggtgatgatcatggtttctattggcaccttctcctggcgctctattaccaacttgcgcagccacccactgtcaaccagcgtcgtcatgctggctaccgtagtcgtggtggtagcaacgcataatctggcgtatggcgtattgactggtgtgctgatcgcctcactgaactttgccagcaaagtgtcccgtgttatggcggtgtcatccgaactcaaagcgtcaacgcggacatacgccgtaaccggccaggtgtttttcgcctctgccgatcggtttatgagccacttcgatttccgtgaagcggtggagcatgtgatcattgacgtctcgcacgcccacttctgggatattacgtcggtcagcgcactcgacagagtggtcattaagttccgccgtgaaggtacggatgtagaaatccgtggcatgaatcaggctacccgcaccattattgaccgctttggggtgcatgacaaacccgaagaagtggaaaaattaatgggcggccattaa

SEQ ID NO: 208530 - DNA, 852 bp, Klebsiella oxytoca
atgaatgtcattaaacatagtgtagcagcagttctcgtcacatataatagggttgaattattaaaaattgcgattgactcactagaaaagcaaactattgagcttaagaatattgttgttgtgaataataattctacagatggtacagaagattatcttagaagtattgcaagtgataaaatccaatttataactttgaaaaaaaatacaggcggagcaggtggtttctctgctggaattaattatgcgtacaaattagatatcgattatgtctggattatggatgatgatgccattgctagtccttcagcattagaggaattattaagagcaaacgatactttacactcttattcggcaaaaccgggttttttgtgtagtcatgttcttagtgataatgaagattgcatgaatgttcccgagatttctaagaaaaagaactcaactggttattttagttggcctgagtttgcttcaaagggcatagttggagtcgataaggctacttttgtttcagtacttatatcaaaagatattgtgggcgagtttggtttgcctgttaaggaaatgttcatatggggagatgatacagaatatacatggcgaattagcaataaatataattgctattatgtcgctaatagtgtcgtttatcataaaagggtcatggccaaatcattatcacttgcaacagaagataatttaaatagaatgccatggtatggattgctttacagaaataatttttataatgtacggaaacatggaagagcaaaagattatatattatgtattattatcaaagggtttatttcgggtatggtatttaatccaaaaattgatagaccatga

SEQ ID NO: 208531 - DNA, 267 bp, Klebsiella oxytoca
atgattgtgggcgaagattttgtatttcagacttccttaatccatcgaggaatacagtattttgttgcaaatgggttaaaaggtgatgttcctgtagatgaaaatggctatcttgtaatggtcaatgagcgaggggatagagttgcgtttcgtgttcctggtggagagtgggaaaaagacagcaaaacattaacaggttataaccgcaatataccaaattatgtaaacgcgatttctgtaccaatctcttctcttgaaaacaagtaa

SEQ ID NO: 208532 - DNA, 204 bp, Klebsiella oxytoca
atggcactcaccaacaaaaaaggaatgttttgtagcgagtacctcatcgatttatacgccacacaagcaattattcgagcggggtatagggcaaagatagctaaccgcaccacgtccgaaaacctgtcaaaaccagacatccagataagcattgttgaagataaagcgcagcgcaatgatctggtcggcataaatgcgacatag

SEQ ID NO: 208533 - DNA, 129 bp, Klebsiella oxytoca
atgtcgcggcctcagaacagaattgaggaagtcactagggaagcccgcgatgtagaagagagcgttgggcgtatggataataacgatgttggtcgggagctgagcgaaaactttaccagcaaaacctga

SEQ ID NO: 208534 - DNA, 342 bp, Klebsiella oxytoca
atgatcagtatttccggtatgtcctctcacgtccttgaccaggacatcacaactgacggttcgaccacgacctatcaggtttccattaacacattttctgatggcgcgattgcgctgctcgctgtctcactgaccacatcaggaacggcgaactgctcttatctgctgtccgttcacaagcacaacaacatcggaacaggtgttactacagtcagtaaatatgaatatggcggtctgtcgattgcattttcagcgacgtacacaaccatcacgctgaccctcagttctgctgtggtgggcaatctgaaaatatcccctgtattacttaatgcgaaccagtga

SEQ ID NO: 208535 - DNA, 1275 bp, Klebsiella oxytoca
atgactattatcaatgcaacccagtacctcaagcaacttcttagctcttctgaactcaaccggatcggtaaatttaccggtttttgtcagcgactccgggatatccagcctgcgagactactcccggctctgctctcagggcttggttgcgacaaggtggatggtattgctggtttgcatcgccatttcaatgcgttgcagctccatgatactgaccaaatagcgtataaaccctttcacaaccagttacgcaagcagggttttcccttgttcatgcgcgcactggttgaacgagccatcgccttacgcctcaaggagtgtctaccggacgcccacggactggcaggctttgagcaggtactgctgcaggacgggtcgtcattcgcgttacatccgcaattggcagaacatttcccgggccgattcaataagcacagccccgctgcggtagagtgtcatatgaccatgtccttgctggaccagtcgccgatatcgatgagtatcacggcggataccgaatcggagcgcaagcatcttccggccgcaaattcgttaaataacaaactgttattggcggatgccggttacatcagccgcgagtactttgctgatgtgaccaaagccaaaggaagctatctggtcagagggagtcaaaatctcaatcccaaagtacaggcagcttaccgacaggacggcagggaaatgcccaagttactcggaaaaaagctcaaggatatcgatcggagaagctgcagagccgaggttctggatctggatgtgagttcgggaaagtataaatatcgactcataagacgttggtttgcagaggaaaaacggttctgtatatggatgaccaatcttccgcgtgagcgatggccagccgagaaggtgatggcattgtatcgttgccgttggcagatcgaactgttgttcaaagagctgaaatcacataaccggttgaaggcgttcgcgacacgacaaaaagcgatagcggaaggcttgatctgggctagtttgctggccttgctggtcaaacgtcggctggcgctgacgctgattggcagcgcggagttatcgatgctgaagattgccaaaaacagcgcgctttggttaatgccgatattggcgagcatcatccatggtgcgtggcaggaaataacagagaagttggagtgggcaatggtgtatttatccaaaaacggcaaaaagagtaggcagagaaaatccaagcaaaacaacacgttagacggtattattaattcgcttgccgcttaa

SEQ ID NO: 208536 - DNA, 636 bp, Klebsiella oxytoca
atgacgggtgttcgttctggcgacgtccggggtaacacgctgggcggtgcgaaagaagcgattaaagttgaaggcagaaacgggttacttaatccatcaggaatcactatagattcgaacgtgttcacccttgagtcaactgataacgacattaacgccaacattggcggctacactgatggcggcgaaagcggcgctatctctgtcctgaacaatcgctacaacggtcgaaacccgaagcataccatcagcaactttaaccgctcacagagtcgctttttgcctgtaggtcgcatgagcttcacttccagctataccgcagcagccggagcaacaatcagcgtcccgctggtattctacaagccaaatgcgacgagcaatatcgatgtgcttggcggtcaggtggaaatccagatttgttctaatccttcactgctgaccatcgggacggtgagcagtgcattgcgtacagccggaatagagctgagcaatggggcaacaacaaacggcaaaatcctggcaatggcagcgttcggtacgctctcttacaacttcacactgacaacagcagggacagtttaccttaacatccgttcgccatacggcgacggcgtcattcagttaacctggacataa

SEQ ID NO: 208537 - DNA, 390 bp, Klebsiella oxytoca
gtggttttgccgcccttgaccgtcagcgtctcaccgagctttttggtcaccgtgccggtattaccggcgaaggtcagcggagtgttcttcagcgtattaatattggtggtgttggtcgccacgttctggttggtagcgtacagctggctgccgttcaccccgtcggtactggtgctgctcagcgtgcccgccgcgacattagtcaccttcttgctgcccgcgttcacgccggtggtggtcacgctcggcccgccggtaatggtcatcccggaactgttcagggtggtggtgccgccgataatcgccgaggtgaagaccggattctccgccatctgtacgaccagattaccgttcgcgtccaccaccgtattcaggttcttgtctgagtaa

SEQ ID NO: 208538 - DNA, 180 bp, Klebsiella oxytoca
atggagttatcagaaggcagtaccgtaacttgctataacaataccgacatgcaagatattctgacggtaggtaaggagtaccaggttgaaaaaatactggatgctgatttgatcacactggtcggcgtgtcagagccagtttttatctggcgctttgttaatcctgagatgacacaatag

SEQ ID NO: 208539 - DNA, 2154 bp, Klebsiella oxytoca
atgtcggtaccgaaccagacaccctataacatctataccgccaacgggctgaccactgtctttgcctatgagttttacctgatcagcgccagcgacattcaggtgacaatcaacggcaacgaagtaacatccggctataccgtgtctggtgtgggtaatactggtggcggggaggttacttttcttaccgccccggccaatggttctaccgtcatttttgaacgagttacgccgacgtaccgactcaccgattaccaggacaacggcgacctgctggccgatacggttaacaaagattttgaccggctttggatggctatccagcgcgcgtttatttatcttagcgttgcgcttagccgaccgctatttgggggcggtccatttgacgcagatggttatcggattgcaaatctggctgaccccgttaatgatcaggatgcggctactaaaaattatgtcattgagaatggcaaaaataatctggccagaactctacgtgttcccgaggcgagtgttacagcactaccgaatatcaatttacgcaaaaataagatcctggcctttaataaccaagggaacccgatttcggttttacctgagtccggaagtgcagccgacgtcctcatagcacttggctcaagtgaagctggtatgggaagtgctttgtcgatgcaccatacagggaaaaccgttgctgaatatttagatctttaccttgcaaccgtattctttattacccctgagcagtacggtgcaaagggggatactgttcaggatgattctgacgctctggaagatgcgataaacaaagcggtagcgaccagtcttatgtccggtggcgtttataccccggtggtcgtacaactcaacaagccgtaccggataaccagaaccataacgattgatgcttcccgggtgaggcttaacgctatatcgggttgtggagtgtatgttgaccctgatggaacgtacacagataacaaagtattcaacattacgggcaacgggccgaatgccgctgtggcggccagcaaggtgggggcgttgtttgatggcgttttgtttctcaccagtggtgaaaagaaacttgacctttttcatgcagtgcgtgacagcacagccagtaatgataacggtgcgtgtctccataacgtaagcaacatagccgcccgtgggttcagaacgattttcacacacggcgcagggggctggggctggaatttcaccgggtgcctgttcagcggaaacactaacctgatggacatcatcaccgcaggcgacacttacgaaaggcacacgtttgtcggctgtctgtggggtaatggtggttacgcatttaaaatgaataaccctgacgggaaaatttactggataggtggttcagttgattattgtgacggtctggcacaaattacctccgggcatatggaagttaacgggcatcatgaatggactgaaagaacgaaacccctggtagaaattacggggtcgaacgcctctctgacagtctccgggacaatgtttgttcggggtaataccgatacccaatactatatgttccagcaatatcggcaacggcaggtgacgcttaaagacacggtttttattactgacggtgtgaatgccagtaaaggtctgatatccaaccttgaggttgttaaaagtaatctgacattccctaacgatgcagccaaaagcattgcgtataattcatctgatgaaaatctgctgaccagcaataatgccgttgttgatttctcgttatcagcaactgcgaatcatacggtatcagtgactgatggcaaactgacagtgacggctgtcaccggcggcaccacttcgcatctttatatcgatatacccgttatgggaaatacaaaggctggattcaaattagttgcatcgaatacatcttcactgggtgcaatatcgctgaacaaatcgctgctcacattgagtaaaaagcaaatatccgacctgtcgaactcagggacggcatcatggccagccagcgctgccagtgtggcgggcgggtcggtgacgctatttgatatccccagacaggccgcttttctcaggctcgattttaacgtggcaaacctgaccacgggtacgagcttcattattgaatcgctgaaaatgttcacatattaa

SEQ ID NO: 208540 - DNA, 996 bp, Klebsiella oxytoca
gtgactcggattctgacagcgattccgattcggacagcgattctgactctgacagcgattccgactctgacagcgattccgattcggacagcgattccgattctgacagcgactcggattcggacagcgattccgactccgacagcgactccgattccgacagtgactcggatagcgacagcgactcggactctgacagcgattctgactccgacagcgactctgactccgacagcgactcggattcggacagtgattcggactctgacagcgattccgactccgacagcgactcggattcggacagcgactcggactccgactccgacagcgactcggactccgacagtgattcggattccgacagcgactcggactctgacagcgattccgattctgacagcgactccgattctgacagcgactccgattccgacagcgattccgactctgacagcgactcggatgctgacagcgattctgattcggacagcgactccgattccgacagcgattccgactccgacagcgactcagatagcgacagcgattcggactctgacagtgactcggattcggacagcgattcggattctgacagcgactcggactctgacagtgattcggattccgacagcgattcggactctgacagcgactcggactctgacagcgactcggactctgacagcgactcggattcggacagcgactcggactctgacagcgactcggactccgactccgacagcgattcggactctgacagtgattccgactctgacagcgactcggatgctgacagcgattctgattcggacagcgactccgattccgacagcgattcggactccgacagcgattcggattcggacagcgactcggattccgacagcgactcggattccgacagcgattcggattcggatagcgattcggattcggatagcgactcggatatcccgcaagccaacgcggataccaataccgctctga

SEQ ID NO: 208541 - DNA, 696 bp, Klebsiella oxytoca
atgaaagaacgcggaatgatttttaacggggagatggtgcgcgcgttgctcgacgaccggaagacgcagacccggcggcctatcaaatggaagcagactcggttcactgaaattggtgagcgcgaagacggtagcaaatggccgtggagcgaagatgcagagcatgcttgcgacttctggcacccatgcccgttcggcgccgtcggcgaccgcatctgggtaaaagagacattcgcagcacttgaaccgggtagttacgagcaggtaaagcctcaagaggggcattgccaagatttgcgttacgcagcaaccgatcgactggccaagtcagatgctgatattcgcggttacaaatgggttccatcaatccacatgccgcgctgggccagccgcattctgctggaaatcactgacgtgcgggttgagcggttgaatgctatcagcgaagaggatgctattgcggagggtatgcagggtgttatttgcccttgctgtaaaggcgatagcgaatactcaacatcgcaatatgacgccgaaacactagcagtggttgatgaaataccatgccgtgcgtgtgaatccaacagaagcaagttttttaccctatgggactcgatttatgggtatgggcagcactgtattggcgaatgggtctgggttatcgagttcaagcgcgttgaaggcggtgcagcatga

SEQ ID NO: 208542 - DNA, 444 bp, Klebsiella oxytoca
atgaacatctcaacagtaaacgagctcattcagtcgctggagtcggcgggcgagttgtcgatcaaagagcggaagtatctggagctggcgaaagcgtttaagcagttggcggaggagaatgtggcgatgaaggacatcaacgcatggtgcaaaacggatgcattcaaaaacatgtgccgggagtttaaaacggcagagtcgcttggatgctctgatgtggattgcatgcatgatgcaatgctcgtcgcaattatgcatgcgcctgaaacccccgccaccgttcgcatctatgccgggattaaggctgatggggtggaggagttcgcggcttactgcggcgaagaaaattccgtattcgttgaggctaaggcttactaccgctcattgcctgatgctgcatacgagttctgcagcatgctgcgcgagggggcagacaaatgctga

SEQ ID NO: 208543 - DNA, 558 bp, Klebsiella oxytoca
atgacaactgatatcaccgaactggcgcagagagccagaatcaacgctgagtgtggtgagcatctttccccagcggagaccatggagctggtagaggcgctggagagggcgcagcggcgtatcgccgagttggaagaagctgagcaaaaactctgtgctgctaacgtgacgctcgatgctcgcgcggaattggctgagcgccggttggcagagatggagtcccgtaccgtcaccgcagccgccgctgacgtactggcggagcgccagcggcaggttacggcagaggggtggagtcctaagcatgatgaccaatataaaaacaccgaactggcttttgctgcgtcctgctatgcgttccatgccgccgctgcgtcatgggatttggaagatgatggcattccgtacgatagccatcccgtaccaaagcaatggccatgggacccatcgtggtggaagcctacggacgctcgccgcgatctggttaaggctggcgcgttaatcttggccgaaattgatcgtatcgaccgtgccgctggcatcaaggtggaggctgagtga

SEQ ID NO: 208544 - DNA, 237 bp, Klebsiella oxytoca
atgacaacgctcgcctcaactattcagtttctggtcaaagagcgtggaatgtctgtttcggctctggctgacaagatgggggtaaaccggaaaacgctttactcctgcattcatggcaatcccaggctatcaagcctgcaaagcatcgcagatgcgctaaatatcagactgtctgacatcatcgcaattgctgaggatgttgatgatatcgcgcaggagcaaagtaatggccaataa

SEQ ID NO: 208545 - DNA, 183 bp, Klebsiella oxytoca
atggccaataaaccagagtggcaagagcatgctgagaagctgacggaactgcacggaatgagcttcgttattttccgaaacggacaagaacctgagtgtgtcgatcccacacaagtggtgatttcattcactgataaaggtctgggccacaatacgctgccagccgccgcgcagcggaagtga

SEQ ID NO: 208546 - DNA, 237 bp, Klebsiella oxytoca
atgcagtcaaagcgaattttttatcgcaacactggccatgatgatgaaacttatatcttcttagataagttgaccgatggctcttaccaggttagagctggaaattcataccctgtaagccacttcaaatgggatggtgaggaaaccattcaaaccgtggaagaatttctgaactctaacccgtcgtattctgaacgtgtacgcgaacttatgtcagagtttgagtcgcaatcttaa

SEQ ID NO: 208547 - DNA, 279 bp, Klebsiella oxytoca
atgtaccttcatattaccttgaattcaggccggacgatgcatggcggcatgactcagtccactatcgaggttgtagaagcttcatacggggtaaggtctggtcgctatgagggcgaacaaccagcgatatcatggcggacgccacactggaaaccatcgcatcatagcgagatagaaggcttcctcttccttgacgaatcagacgttgcaatcctcaaatcgaatgacggcaaagtgcttcatgagtggcacggtgcaaaacgccagaaacaggcttag

SEQ ID NO: 208548 - DNA, 450 bp, Klebsiella oxytoca
atgaacggaaaaatagccattaactttaattcgatatcgctggcagcagcgcttgtgctggcgctgtcgccgtcacccgacgctcgcgcggaaaaagaggcgctgatacatgttacggcaaattcgaatagtgacgcgtcagggccggcattcttaaattacgctaaagagcagcaggctcagaaagatcgcgcgcctgcgaagtccgttgaagaaaaaaacgctattacgcaaacaacgaataaaaaaaacgaacagaaagtcactgaagtttcacgccaggctgcaataattgctcaaaaagataaaatcattcggcaacttcgacaacagctttcagcaaagccagctagggtttatgccgtacaggacaatcaaaaagatctgacggataaaattcgccagcttgagaaagcattaacggttgccgtagcagaaaacaacgcttaa

SEQ ID NO: 208549 - DNA, 411 bp, Klebsiella oxytoca
atggcgcttggcgacggaggtactaatgttgccatgggggattatttcatatcagacttaaaaaatggcaataccactaaagatgtgccttttaacattgatgtcagcgactgtaccagcgtggcaaaattcacgacaaaaatgaccaccctcaagacaacgggaagtggagcggatctgctgggtaataccctgaatacaaacgcggctaccggtattggcgtaaaaattctttacaataaaacgactcaacttattcccaacaacgccaattctaattacgtggtaagcgacaacaccattccaggcagcaaaactttcaactttatcgcccgtatggaaagagatggtaacccgcttgttgttggtcaatttaaagcaactgccgtttttaacatgacctatgactga

SEQ ID NO: 208550 - DNA, 498 bp, Klebsiella oxytoca
atgaagaaatacttggcttttctactgattcttgcaacgcaagttattgctgcagattccgtacccaaaaacaccgttttacctgaccgatatattttgttatcccgatttgataagttagggattgtaaaatccaatgactggcgcgaaggtaaaattatcgaggggaagccagtattaaccactagagatggtggcgatttgtatatgattaacaacaagtcattatcgtctatgtcaattaccgagggagagaaacctcatgtggaagcaatgcatgcggcatctatttgctttaacattgcgtatgtagctacagataccaagagtaaagatgttactcaagctgtaaccgatataattgaggaagcagccaatgataaaagtggttcctctggagatttaattaatggttattggttcactgttgaaataaagcatatagataaattccccatgttggtctgtgaagttagcggattcactcgatgggattga

SEQ ID NO: 208551 - DNA, 402 bp, Klebsiella oxytoca
atgcaaatagacctggatttaataaaaaaaatgttgaatgtttttatcgactcacccaaagcattcatcaaacttacagagctggatgcagccattaatgacaaagaatccttatatttccatattgggttaatgctcgataacaaattcattacaggcgcagattttgaatcgaaagcaaaatctattggtttgacacatacgagcgccggaatggatatcaggccattgttggtccgactctcgcagcgaggccacgatttcgctgtaatgctcaaccagcagcccatactcgaaaaactaaaagaacaggcaaaacaggctccaatggacgttttagtcgcaatcgggaaagcatggggacgcaagctcatcagtcgtcacctcgatttggatatttag

SEQ ID NO: 208552 - DNA, 177 bp, Klebsiella oxytoca
atggagttatcagaaggcagtaccgtgacttgctataacaataccgacatgaaagatattctgacggcaggaaaggagtaccgggttgagaaaatactggatgccgatttgataacactggtcggcgtgtcagagccggtatttatctggcggtttagggacccgaattcagtgtga

SEQ ID NO: 208553 - DNA, 447 bp, Klebsiella oxytoca; identical to SEQ ID NO: 201940

SEQ ID NO: 208554 - DNA, 333 bp, Klebsiella oxytoca
atggcgattaacggagagaacggtgttagtgcagtcaccgtggatgaactactcaagcaaggccttcggataccgaactatcaacgcccatacagttgggatgtatcgactgctctacaactggtggatgatatcagcgaagctcttcgagataccgaacgaaaagatattccctatgttttgggtgcaatcattcttcacgatgatggtgagtatctcaatgtagtcgacgggcagcagcgcctgctgactttgcgaatgattcttgcggccttagatccgataaatcatctgatcttgaccctccatctccgaacagcttttgtatcttaa

SEQ ID NO: 208555 - DNA, 219 bp, Klebsiella oxytoca
atgaagtacttaattgaaagcaaattgttttataacgctgagtctggtgagcttatttatattgatatcggtgtaacggagaaacaccagttaaccaaaacggctaaccatattctggctatactgatggcgtcacatgggaaggtcgtttctcgacaaagtttcttagagcaagtctgggaatcccgtggacacgaggcatcaaattcatctagataa

SEQ ID NO: 208556 - DNA, 897 bp, Klebsiella oxytoca
atggacatcatcaccgccggagatacatttgaacgccacagcttttttgggtgtctgtgggcgaatggaggttatgcattcaaaatgaataaccctgacggtaaaatatactggcacagtggctcagttgattattctgacggactggcacagattaactcaggtcatatagaagctaacggacataatgaatggactggcagagtgaaacccctggtagaaatcacggggtcgaatgcatcagtgactgtctccggggcaatttttgtgcggggtaatactgatactcaatactatatgtttcaacaatatcagaaacgacaggtgacactgaaagatacggtttttattactgacggtgtgaatgtaagtaagggtttgatatctaatcttgaggtggtgaaaagcaatctgacattccctaacgatgcagccaaaagcattgcttataattcatctgatgaaagcctgctgaccagcaataatgccgttgttgatttctcgttatcggcagcggcaaaccatacggtatcaatgacagatggtaaactgacagtgacggctgttaccggcggcaccacttcacatctgtatatcgatatacccgttatgggtaatacaaaggttggtttcaaattagttgcgtcaaatacatcctcactgggtgctatatccctgaacaaatcgctgcttactttgagcaaaaggcagatatccgacctctcggcgtcaggtacggcatcatggccagccagcgctgccagtatagcgggtgggtcggtgacgctctttgatatccccagacaggccgcttttctcaggctcgattttaacgtggcaaacctgaccacgggtgcaagcttcattattgaatcgctgaaaatgttcacatattaa

SEQ ID NO: 208557 - DNA, 1200 bp, Klebsiella oxytoca; identical to SEQ ID NO: 150447

SEQ ID NO: 208558 - DNA, 531 bp, Klebsiella oxytoca
atgcagggaatagttaagacagtgccgctgttatgttttttactgctgggctgtgatccggcagaaaaagaagcaccgcgcggcagcgggaagaccagctacgtagcggctaatctgctgggctataaccatatggcaggcacgaatatcaactggttctccgtcaacggctaccggggacacgccggggggtttacctgctgtatatcgctgccggaaaaatggcgacccaatatgcaggtggtagtggagtgggaggttaaccctaacccttttccgaaggatctcccccacttcgatgatccaaactatgaacattatatggaaaaatataaggctacctttcgtcagtataaagcggtagccactattcccgaatatgaagattcctgcggcctgcaggtgcatttcttgccctgtcagcagattaaagtaacggccacctgccacgggccgacccatcctgaccacccgattaaagaacctttcgacctgccggagcctgcccagtgcccgccagaaacgccatga

SEQ ID NO: 208559 - DNA, 822 bp, Klebsiella oxytoca
atgtcacaggacacagtttttcagggccagagtgaaactcagccaaggcttaaccctcccatataccgctggcaggaggatatgccagagaataaccagcctcagctagtgcctccccagcttatttggctaaatatcaaaaataacatctggattgaaattcctcgttatgaaggtgttatatggggggggatgttgggaggtgcatttatagtgtctcttttcatcatttttgtaactccatttttttactctattcttagcgattttccggatatattcgcagtaattaactgttcaggtatgttctttgtattgatttcgtccttatttgtttttttaaaatcatacttctgggctgtgagagatcaacctattcgtctgaacaaaaaaaggcagaagatctacgcctttgactataaaagaaaatggtggaatccctgggccaaatggccagccactgtcaaagcttaccactgggcagatattcacggtgagatgcgtttttccagcgaccgctataccgggggctttcagctgttcgcttccgtctgtcagccaggaacgctgaacgtggtggaacgcttccagattgccagtggctctcctgcgcagttgcagcagctctggagctatctgtgcctgtatatgaaaggcgagcctgtgccggatgaggcagtcaacaaaggtcgccctgatttctggtgcccgcgtaaagcggataaatggcctgctgaattggaacgagaatccaccaccgggccggatactgaactttctgctccccgagcctgtagcaaactatctgataagacgagctaa

SEQ ID NO: 208560 - DNA, 807 bp, Klebsiella oxytoca
atgtctcaggacgcaatttttcagggccagagcgaggctcggccaaagcttaatcctcccatatatcgctggcaggaggatatgccggacaatagccagcctcagctggtgcctccccagctgatttggttaaatattaaaaatactatctggatggaaattccgcgctatgaagcgattatgtggggggggatggtttttggcatagtgattcaattttttactattgtcatgtttttctgttttttatttggaagtgatgtgttttcattggttttattaacgttggcttcatttatttcatttacactgatgttgacttatattcggatgagtttttatattccacgagatcaacccattcgcttaaacagaaaacgtcaaaaaatctataccttcgattataaaagaaaatggtggaatccctgggccagatggccagccactgtcaaagcctatcactggcccgatattcacggcgagatgcggttttccagcgatctctataccgggggttttcagctgtttgcttccgtctgtcagccaggaacgctgaacgtgacggaacgcttccagattgccagcggctctcctgctcagctgcagcagctctggagctatctgtgtctgtacatgcaaggcgagtccgtgccggatgaggcggtgaataaaggtcgccctgatttctggtgtccgcgtaaagcggataaatggcctgcagaaatggaacgtgaatccactactgcgccggacagtgaactttctgctctccgcgcctgtagcgaactatctgataagacgggttaa

SEQ ID NO: 208561 - DNA, 195 bp, Klebsiella oxytoca
atggctacgaccctcaccccgtcacacccgcagtttgtctttgtatttgccgccgttcgtcgcgcagaccgtcagctccgcatctgtatgctccgcgccgtcgccggggatgaacacgctgcacgccagtccctcgttcgcgattacgtcctctcgtttgccgggcgtctgccggtggcggaggtgcgtgcatga

SEQ ID NO: 208562 - DNA, 399 bp, Klebsiella oxytoca
atgatgcgcctggcggaatgcctttgcggtgctgttgcaggcgactttcagcaggtcacgttcaaaggccagcacttcggtcagattgtcacattcctgcgccagctcccggcgggccacgcgttcgatatggccgcttttcagttcatccgtcagcatggcgcccccggcgcggaaagcggcgcgccaggtgcgggtatcgctcccgttgtcctgctccagctccgctttctgctcctccgcgcggctgatggccgtcagggtgtcctccatccggcgggcctgttcaagatgggccgctctggcggcggccagtcgctccagcgccggtttcaggtaatcagggataaaggtgttgtcggtcatggcagatttcctcgtgatttcaacatgaggtga

SEQ ID NO: 208563 - DNA, 504 bp, Klebsiella oxytoca
atgaatcatatcagtcagcagaaagtactcgaatatctccaatacgatccggactcaggtgaatttcgttggaaagttagttcgaacggaagaattaaagttggtcagttggccggatgtctggaattaaccggctacataaaaattcgtatcgaagggaaagcctttggcgctcaccgactggcatggattgcagtgaatggcgaggttggcgactcatttattgaccatatcaatggtgacagagctgacaacagaatatcaaatcttcgggttgcgacacgggttgagaactcgagaaacaggcgtaaccagaaaaatataagcggacaaagaggggtttattggaataagccatacggcaaatggcaagcgagcggatttaaagatggaaagctcattagtcttggatatttcgaggacaaattagaggcagcaaaggtagctgctgaattcagaaaaaatgaatatggcaaattttgtccgaatctggaggcgttatga

SEQ ID NO: 208564 - DNA, 234 bp, Klebsiella oxytoca
atgagaatcgaagtaaccatcgataagaacaagaagttgcctgaaggtgctttagcggcgttgcaggaagaactgatgcgcagaattgatgagaagtattgtgatttctcgctgtcacttcgccgcaccagtatggatggtctcagcgttcttggtggtgataagggcgacgaagaacgaattgagcaaattctgccagaaaccagggaaacgtctgacggctggttctactga

SEQ ID NO: 208565 - DNA, 357 bp, Klebsiella oxytoca
ttgaaaacgttgaaagtcacagttacgaaccttcaacagattaagaatggtgttgtctgtggggctaaggttgaatttaaagtgattcaggcaggacgtgtgttggtggagagggttatttcaggaaagacttctggtccgtttaccatgtcctatgacgttagcgctgatgatgagccgctggtagttgaacatgatcgtccggatatcccaaacattagtataagagcattacttgaatcgccgattgtggatgatgcggcccatccacaggccgctgaatactcattaaagactgacattgcgaaagatgtcgtaattaatgacgtggttcttcgaggggctatttaccgttag

SEQ ID NO: 208566 - DNA, 342 bp, Klebsiella oxytoca
atgaatagtggaccccgtatttataacaacaaatgggataaggcgcgtctgtcattcctgcgtacgtatccgctgtgtgtaatgtgtcaggagcagggcagaataactgctgccacagttgttgaccacattactcctcacaaacttaaagatgctctgatttcttgcgaccaaaagttaatcgcgacagcgcaaaagcttttctgggatagaaaaaactggcaagggctctgtaaaccccatcacgacgcaacgaaacagcggatggagaagcgcggcatcacgatgggttgcgatgagaacggaatgccgcttgatccgaattcccactggttcaaatga

SEQ ID NO: 208567 - DNA, 1014 bp, Klebsiella oxytoca
atgtcaaaaaatctcccggttttattaagctcgccatcaacaactaattttcctgcaacagttaatactgaaatagaattcctttcgcaagctagaaagttgttagattctggcttccctgatcatgctcttttagatatatggaatgcatccattcataatcttaggcggcgaattgaggcttatggtttagacttattcctttccgcaataaaggatgatagtggtcgtaaaaaatatgataaagatggtgaaacaataaacgagagatggtcaggtgtagatgatttagtgctaataagtggagcaaccaaattaggggttctgcataagaaagctggaaaatcactagaaatgatcaattggatgagaaaccatgcctctccagcccatgcaagtgatagtaaagtagagtctgaggatgtgtttgctttggctcttatgctccagaagaatttattcgaatctgatatgccagaccctggacattcgccatctggattatttgaacccataaaaaaatctgaactatcaattgagagcatagacttacttaaagatcaaataagagcatttaagcaagctgatataagaataacatttggatttttattggatttaataactaagggggaaaatcctgcttatgttaatgctagcaagttgtttgaacaaacatgggaaagatctaatgatgatcttaaaaaaacagcgggggaaagatatcactcatttatgctggagcccgaatcggatacaagtgaggataaaggagcaaaaataagaattttagagactttagtaaaagttaatggtgtgaaatttatacctgatgctgctagggcaagtttatacagacatgcggttaaacagctagctaaagctaaggatacatcttacggctggaatgatgaagaaagagcagccaaggcacttatacaatttggacctcatgttccatctattgcttttgaagatgtatattgtagtggtttactgaatttggccacctga

SEQ ID NO: 208568 - DNA, 333 bp, Klebsiella oxytoca
atgtcagtagaagacctcaaaacgattgactgtattggtataccgatagacgctcctcatgaggtgaacctagggatttctgatcatcttgactgggatgtctcttttgatgagcatctgtatatgcttcaggaaaaaataaacacatacctgggttttatcgagtcgggagaaatctatcaaagttttcctcctgctactcaaacgacaaaaaaagtcattgaaattttttttaaacatcaaccgccatctcgagcaaatccatttctaaatcatgtcactgattacttaaaagaactgggcatcgaactgacaatgaaggtagaagaataa

SEQ ID NO: 208569 - DNA, 2529 bp, Klebsiella oxytoca
atgactacacgcgcacatcaagaacaagtttgggagaccaacttgagaataaaaatcaaaaatctgcttaagcgaggatttataaaatttgatgagatattaccacagtgtgatggagcccaacctaaagatgcatttcgcatatttaacgaactgaaagataccaactttggaacatctactaattcgcttgactataaatctaaatttttcttcaaactccctgcggccaaccctaaatttttccaatggtggtatactcttgaatcacaggagttaatgactactaggattctggatattcataatgatcatgacattgcctgcataggcacccctactttagccgcaacaatttcttcatacaacaaagaagtaacattacttgatattgatgaagatgttgtatctttatttaataaagtatttaaaggtatatcaaatgccgaggtgtatgatgtaaatgtcggcaatattggcttgcatggaaaaaaatatgactgcataacaatagacccgccttggtacccttctgaatttaaaaagtttatttctagagcaatacagttatcaaaagatggagcaacaatctattgctctatcccacaaaatcttacacgaccagggattggagaggagagagcggaactaatttcatctttgcaaaaatgtggtcatgatatattatacattgagcctggtgtgatgaaatacattgttccatattttgaagaagaagcattaaaaaatagtggtattgaaacaaagaatcaaccatggagatcttctgatttattagtaataaaagtcaatgggactaaaacactaagctttgagtccgaagtgattaacaaggtcagatctttctctagggttgggaataatcatgtttttcgggtgttcatagaagaaaacaatgtagaatctagattcccaattagaagagttgatggcttttccaaatctattagcaatagagataatgttgaaaaagtaaacttatggacttcggaaaaacaaggattccaagttgacgatatagtcttttttaacgaagtaatccaattatggagtgatggtaataatatagacgagacagtaaggattattggtgagaaaaataatgacaaagctaatataaactcaattaaacagataattgaacagctagaagaatatactggtttttgggcgatgaccccagaatcttcagtacgtcgcacatctgaagaaataaaaaagaaaaatgatgctttgtctagtgagtgggcagccaaagcctctgaaagagaacatggaagcagaagtgatggctttcgtatagaatttcaaagggatcgagatagaattatctggtcgaatgggtttagaaaactcgctgataaaactcaattattccctcttgaagaagatgaacatttaagacaacgactggcacatagcatagaggtaatgcagctagcatcgactattggtgctgctttcggtttagataagaacttaatagaagctggctcattggctcatgatatagggcatactccatttgggcatgctggcgaacacgcaatagatcaaatgtttcgaaaattaggttttaaaggtggctttaaccattatgagcacggtgtggatgttgttcgatttttggaaggttcatatcaatacagcgttattgaatcgcacaatgggctaaatttaacaccagaggtatgtgattgcattttaaaacatacgtattgtcacaatggggatggacctagtcaagaaaatatatggagacatacaaaacatcaaaaatacctgaaatgtggaggatacagtcaccttgaaggtcaggcagttagagctgctgataaaatatcttatctactatctgatatagaggatggaataaagttaggagctatacaacttcatgacctcttaggttcaagactgtttcatcgagctccaatagactttagaatgagaagcggcgaaaatctatatggtaagtttatagagcaaaggggatctataataaaactcctgatggaagatatcattctggagtcaacaaagaggatcagtaaattaaaatccagagccgatgtttttaatgcgggccattactgtgtatttcatagtgaacagatagataatgacatgggagagatttggggtaaaattcaagtcaacaaacttcacatggatccgagagttttatctgctaatatgaaggcttcaaaaatggtaagcgagttattgttactttttacattattccctgaacatataaatacacaatttagaatggagcatgagagattaaattcaactgaatacttgaagtattatagagaccaacatcaaacaattgaaataccttatgatcttttaaaattcttgcctttggatatgatgataggtttccatccgggaaagactaaatatatagatgtatatcagttaattttggccaaggattatgttgcaagcctaacagataagaaactgaagagggtttacaacgagctattagattaa

SEQ ID NO: 208570 - DNA, 582 bp, Klebsiella oxytoca; identical to SEQ ID NO: 158338

SEQ ID NO: 208571 - DNA, 804 bp, Klebsiella oxytoca
atggacaaagcaaaatggctcaccggtattaagaaaattgccgaaataacgggagcagcggttggtggaggggctggaattttagccaatggtcctttgacggcagcagcgggtggggcgattggagtcgtcattgcacagaccatcactgaagttgcaagccgggctttatctcagagggaagatattagaattggcttatcagcacgtatctctattgatcgtataaatgaattgctggaggaaggtcataaaccacgtgatgacggattctttgatgaggaaaggagcattgctgaggaagtattcgaaggttgtttgatggcgtcaaaaaattcccatgaagaaaagaaagcgctctatcttggctatctgtttgcgaatctttgcttcaataataaaatatcaaaagatcagactaacagaattgtcgcaattgcgaacagattaacgtatagccagttatgtatattacgggcgtttatatttgaagatatacgctcaatacttccattgataaatcatgacttcaccaacaacaatgccactttcgagcaaatagtcgttttacaagagatttatgagctcgatgtttcaggtcttgcgataatagaagaccagcatacattctatttcaaccaggtaaccccaagcaaagtaaggacacaaggtattggagctgcattgtacgaattgatggaactgaaaaaaataccgatggaggactggattggcacaatccgccctcttttgactgatccattttttcctcataaagaatcaacaattatgcaacaatggtga

SEQ ID NO: 208572 - DNA, 204 bp, Klebsiella oxytoca
atggaaaatcaagctcgtctcatccgtttaccagaagtcatgaagaaaactggatttggtaaagcgtggatctataggcttatcagcaagggatgttttcctcaaccagtaaaaattggtcttcgtgcagtagcctttgtagagagtgaagtagataactggattcatgaaacgattagttcttcgagaaataaagtttcttag

SEQ ID NO: 208573 - DNA, 531 bp, Klebsiella oxytoca
atggcttgcataacgggaggtgtccatatacggcatcagcgctttattgataccctggtaatcaatcagatagcgcaccgcttcgcgcactttcggttgggcgaagtgcgcctctttcatgctcatcgccacgtagtacatggtgccgcgctgcaccgcatcgacggtcagctgcgggtcgctgcgcagggcgttaatatcggaaaccgccatattgttggcaatatcgaggtcgcctttttcgatcatcagacgcagggtttgcgactcctggaaatggcgcagcaccacgcggctcattttcgcctcgccgcgccagtagtcaggattgcgcttcatgcgcagcacatcttttgcctgccaggtttccagcgtaaacggcccggaaccggcttcatgggtggtcagccagcggttaccccagtcgttatcctgctggtagttttgcaccgttttactgtccagcaccccgaggttgcccagcgccgccagcgagtaaatcaccagctgcggatcgttatctttgggtaa

SEQ ID NO: 208574 - DNA, 228 bp, Klebsiella oxytoca; identical to SEQ ID NO: 82293

SEQ ID NO: 208575 - DNA, 348 bp, Klebsiella oxytoca; identical to SEQ ID NO: 82292

SEQ ID NO: 208576 - DNA, 258 bp, Klebsiella oxytoca
atgataatagctaaaaaagaaaaatttaaaatgcagttcgtattaacagaagaaactatattagacgaagaaaaaaatactgttatatttaaatatacagagtgctttttagatttaggtgttgagtttattcattataaacaaaagggtgtaagggtatgcaccactgaaacaaaagaatatacaagacaagaacttagaaatatatacgacaaagaaaaacaagaaatgattaatttttttatgttggaagtttaa

SEQ ID NO: 208577 - DNA, 2103 bp, Klebsiella oxytoca
atgtctggaaaaactaaattaaaagaggtcaaaactgaatttaatacaaatgaaaatgacgaatttgatgtatttaatgatgtttgggctgtagtaggaaattatacaattaaagctgatggcatttatgagttcagcgaaaaaacacagaaaaaaatacatggattggggattatacccctttctgtagtgaaagctgtccgtgaagacggtaaaactgactatacaatgataaaagtcagatataaagccgtttctacggatatttttggcaatccagaaattgaagaagtagaaattccacttcatgactttaattctttatctacagattatttaagaaactggtctcaaccagtggcacaatacgacaaacaaacagtagttaaattaatgcaggaaattatattcaatccgagagaatataaaatacctacacaaaaagcatatacatattgtggttgggtttctgaattagataaagaaggtattgttcgctggaagcacattagacctaattcagacagcttttctacaaaagcgactgataacgagatcgtaaacaacacagaaacagcaggtagcgaagaagtattcaagaaaacacaagtatcaatgatgaagctatcaaggctctatacatacttatgctgtgttgcctttggtgcttatgctaaaggcttgcttcctcgttcggctgactactcgccgttcgtctacatccacggtgattacggtacaggtaaaacaacgtccttgtttgggcttggtgctttacagggacgccctgagaaggctaagacagtgtttgatagtaaatcatctactatcggcttatctcgcctcttaccgtggtttaagcatggtcctttcttccttgatgaaatcgacaagtttatgaaagatcgtgatggtatggaaaatatcatgatgttctgtaataacggtggtcgtattgtttctggtaaaaatggcggggtgttattccagcaaacatgggatagcccaatcatatctacagggaacattgatatattaaaccatccgacttttaaaaatgatggtaaatcagcggcggttagtagtcgtttcgagtttcacgaaattaaagacaaagatttaaattcttttggctatgaaacacaagaagataaggatttagttagaagtttcctttctacacttaaaaggaactatggttttgcatatccagctatcattaaaacattatctgatagtgaatatgaagcagagaaaaaacgccttgcgggtgatactttagctaaaaacgaattccaacaagtatatgatgatttctttgtagaaatacagagtgatgaaaaattaagacgtttagatgaagaaaaccgtattagtgaacacattgcattttcaagagttggtgctgaattaatgcgtcattactttggtgatgaagtttataaacttgctcttgatgctgtaaatattcagatcaataaatataaatcgggtgaagaagaagaagaaagcgcattaagctataaacaattaagcgcattggatagatacagcgaaattttaaacttcattgtaaataataaatccaatttcatttggtcagattatgcctttgaagaagggatgaacgataaagggcaaaaagataaagctaaagctatatctaaatcagcgcgtgaaaataacactattacggtatatggtgaaattcaggttaagcgtttgatgaacgatgaatatgatttagagggaatagcttttcttaatgctgatgctgaaaaagttcttgggaacctcacgaaccagcttaaacaggatttacagcttcttgatttaatcatcgatgaaaaggcttccattacggcaggtaaacgtaattatcttggtagtagagcattgaaggttaaattaatccatccagaggcttataagcgtgaacatctaagcaaaatttcaaaaggcaaagaaaccgaacctaaagaaccatccatgaaagatatgtatggtaatctcacacaagagcagttaattaaaaacaatgatataccgattgaatatatagaactggatgaattgaacgaaaattattttagcaattggtaa

SEQ ID NO: 208578 - DNA, 912 bp, Klebsiella oxytoca; identical to SEQ ID NO: 150282

SEQ ID NO: 208579 - DNA, 1905 bp, Klebsiella oxytoca
atgagaccatttatattaaactcaacaaaaagtaatgatgttaaaaaagcacatggtacaccttcggcttatgaaccagcgagtgaaggtgatgattttgcagagtatgaagatatttttactggtgaaaaactctacgctgaaaatggtgctgatttaattcaggtgattgaagataataatattcaattaccatccagagatttctttttaaagctaactgaaaatacagaaatagcaaaaaacagtagtgatttaaaaaaaatcattgataaatacaatgaagaaaatggaactaatttaaggggcgtagcttatagggaaagagctaaaaaagatggttcttttactgatgattggcatcatttagctttcgatttgtctaagtatgaagatcccaagaaagcaagaaaaataataattgatacatttgctaataacattggtgtgcaagtagacggaactcctttatatgggaaaagaggcgttatagcttggccagaacataaagatcaagataaaggaaaccattttcacatatgggttcatgaaggttctcttgcaaaaattgaagtgaatggaaaagaatatttagttcctgaaacaaaaataaacttcaatgaaaaagaaggtgattatgttaagaaagccatcattgaaaatttagcaaaagcagggttaaaagcagacttaactccaccaatggcattaaccattgataacacaactaaaattgataaatcagtagctaaagaagctattcaggggcaagaagaaagccttgatgaaatgcttgatttatctaaagtgaagtcgttaacagtggatgaaacaattgattatctaaatagaagaaataaaaaagatgaatctgattttgcagaacttgtaagtgttattagagagaaaaaagaaaaattacaggcttctattgcagttcaaaaggcaatggaagattacagagatattaattctcgtttggttaatgcaaataacaaaataactgaattagttaatcagaaagaagaaataactaaccttaaagagaaattctcagaatttgcagaagaaaaatatggtattaaaattgaaagcgaagatgatatagcggcatttattgccacacacaacacacgcttagaggaattaaaacaaagacatgaagcagaggttaaagaactcaacgatgaaaacgaagagttaaataatcttaatacagccctttctgattttgcacataataaattcaatgtaagcattaacagcattgaagatattaaaaagcttgatgaagcttacgaaaatgaagttaatgctcataaagtagaacttgaaagcttacatttagacttatccaatttagagcagtttaaagattctgtatcttcaattgcaaaagaaaagcttggcattgaaattgaaaacatccgtgatttagaacaaattggtaaaaaattcgattctcttaatgacaagttagaagcgttaaatactaaattatctgatgcagatattgaaaacaaaaacttaagtaaaaaacttgaaacctacgaaagattaaatgatagattggttgaagaaaaaactactcttgaagtagagaataaagagcttaaaggtaatattgtcgctaaagataaagaaattgaatctttaaatgaaaaacatgaaaaggatttagaacaacttaaagcagaacttagagcagagtttgaaaaggaattaaaagcaaaaactgaagaagctgttaaatccgctgttaagtcagaagaagaagctcacgctaaaacaaaaaagacattaacgggcataactgaaaaattccaggaattgaaaaaatcgatggaagaaaaaaaagataatgatgttgaaaataaaaaccaacctaaaaaaccaaaaatataa

SEQ ID NO: 208580 - DNA, 327 bp, Klebsiella oxytoca
atgaaaaacaacgatatttttgcaaatctggaaaaactcacacaaacaagtgaagttattttcgaagaagaagataataattctttatatacttttgagttaggtaaaagaacaagtaatacagccccattagttgtaaacggtgcgagaggtacgcaggttaacgcaaccaagattttattacatatacagaatgacgtaattaataagatggataaagtagtagtgagttcttcaagagccgcaactatcggggcattagctgaattcgcattgaaatatttagaagataatgatttagttctgacaataaataataaaaaatga

SEQ ID NO: 208581 - DNA, 768 bp, Klebsiella oxytoca
atgagtaatataataatgttaagtgaaagcaacaatgataatggtgaattagtttatgttgatgataatttactaactaagtttatagaagactttgaaaataaatctatcgatgaaaataattatcctaaatactatgaagctttaatgaatacagtatatgaaaaacccagtctagatcacttaggaaatatagataatgattttaatgcaatttcaattttaacaagtgatgcattttatagagtagatatgaacgcatttaaaacaggtgaaactgatgaatacggcgatcatatttatagctatgattttagccttcaaaaaaatagtatattcaacaaagattatttatttgatgacgaaaaagtaatacaagattttatccttgaaaatctggaagaaaaaaataatgatgagctaagagacttcttagataataaccctgaagctttgcattacacgcaatcatctaaaatagcagattttttattagattcaggtgtgaatccagaagtcaataattacagaatgtgcaatgcacttgaggaacgtttatttaattgcaacaatcagccaaagaataatttcatgggtgaggatatattaattatgaaaaaacttattgatcatggtgtcgattatcaaagagtattgagtgttttacctgataatgttaaaagctatgcaatacaaaatgaacaagaaaacatattaagtaaaatagaatctgaaaacaacgaacccaaaagaaaaccacgtatataa

SEQ ID NO: 208582 - DNA, 294 bp, Klebsiella oxytoca; identical to SEQ ID NO: 150286

SEQ ID NO: 208583 - DNA, 336 bp, Klebsiella oxytoca
atggagtatttagagtttatcgaaacccccttgtttactaagcaacgggcagagctactaacagaggatgagtatcaggaatttcagaaggaactcatcataaacccgtctgtcggtgcgataatgagagaaacgggcgggtgtaggaaggttcgctttgccacaggcaacaaaggcaagagcggcggagtaagggttatctactactggcaggaaccgaacggcaggatctggctctttactgtctatcctaagaaccagaaagacaaccttagcagtagagagaaaaaccagcttaaagcagcagtaggaatgatcaaaggaggtcagctatga

SEQ ID NO: 208584 - DNA, 861 bp, Klebsiella oxytoca
atggataatatactaaacacaataaaaaacacttttctattaaattacacacagtttttatttatagcttcaatactcatagtggcatttctatgtgatttgtggttaattagaaaagaaaaagcaaaaaagcaaaaaatagaacatcttgattatactataacagaaacagaatatactgaaacggtataccctacctttgatgatgattactttgatgattattccaaatttacaaaatcattcagtcaaaatactaattataatatcagacaatatcttgatgaatattgccttaaagtgatgtttagaacaataaaagatcattcaatggagttgatttatttggatcataaaattaacaacatagatgacggtttcaaacttcaattattatcatggataaattcagatatgattaaaaatttagaattagaggaaaacaaaaaacctgaaaacctattaaaatatatcaatgcaaaacgcaaattcttcaaatacttttcaacagtaataaaagatatgtcagaaatttatagcttttcttttatttgtgaggacaaagatttcttagaagaattaaagcaatattttatacccatgtgcattatcaatattcataatgacaaatttcatgaagtaatagaaaaaatagaagctatgggtaatattttaaattacacccctgaatttattagtgaaagcatcaaacaaggattcaatgaatatgagtttaataaatcaaatccagaaatgttttttgctaataaatccattgaggaaacggaggatataatttacaaaggggcagaagatataattacagacgtattcgaaaagctaaagaaaaataaaatttaa

SEQ ID NO: 208585 - DNA, 585 bp, Klebsiella oxytoca
atgaaaaatacaataacaataaacaaaagatacttgatactaataacaggattaatattaatatattcaggcaacgcaaacgcagcacccaccatcgcgcaaattttagctaatggttctaatctctggtttgaagtcgctcgtttagcttctggtttagccttcttctcaggtatcgttatttctggcatggcgctttttaaaatgcgtgatgtcagcgaagggcaggcaaaagtaagcagtgttttacttctaacgttcgtcggcgcttgcttgatgacattcccacagacaatttcatcaataactaattcaatggtgctgggtgatacggcagggatggatattctttcaagggttccggttcctgatggtattcccggtatgaaagaaggaatggacgctcttttcttattcataaaaatgattgggcatatcgctttcttccgtggttttttgattctcaaagatattgataaaggtcagggcggtttatcaaaagccctgactcatatcgtcggtggggcaatggcaataaacatagatactgttgtagagatcatgacagaaacattcttaaaataa

SEQ ID NO: 208586 - DNA, 222 bp, Klebsiella oxytoca
atgttagaaaacataaaagggatttataacaaaatcggcaatatgtcatttgaacaaatattcatgttaataacctggatggtgtttcttgtcggtttattcggtaggtacgtaagggaagattttttaatcagtgataaagaaatcttgatggcatttttcggtttagttttttgcactgtatgcgcattcactaaaaagaaggaaaaaaataacaaataa

SEQ ID NO: 208587 - DNA, 249 bp, Klebsiella oxytoca
atggggattatcaaaataattaaaaatataacgaaaatgcaaatagcaataatatgggcagctctgacaatgattacattactctcaataccttatttaccagtattagaaaaatcatatgagcaaaacgtaattatacaattaacgttttttgcattcggagttatttcattggtaggggtaagcatctttatttataaaaataaaataggagatcagcatgttagaaaacataaaagggatttataa

SEQ ID NO: 208588 - DNA, 2271 bp, Klebsiella oxytoca
atgaaaatactaacaaaaggagagaaaagatttaataacaaatattggttgttagctcttttatcaataattttttatacaggtaatgcaaatgccgcatcattctttgaactatcaaaagatgatatggcttataaatatttcttagatccaattttttatagcggaacatcaccgctgcataaagttattgaatttttgaatacaacaataatgatggttgcaggtgtttttttcatttactttattattagtagaatctaccacaccgcacacgatggggtgatgttaggtaaatcagcaagcccagcttctatgttgcgttatgtcattgccatagcgttcatcttcccagcccccccgtctgtaagcgagaacaccgcaggatactcttcagctcaggttgccttcttatgggtagctaaacaggggatagcggcaggggggcaagcctgggcgctttacactgatgtagcgataaaccagggtgtctacgcttcccctaacatgtcgcgtcagataagaacgcttgcgggaaatatgctattaaataatatctgtgttgcaggtattaacaaaacgaacaatgagagtgaaaactcaagatggggttctaacaatagtaatttttcagctaaatcttttaaaaacattagttctgatggttctggtgtaattggttatgattacagttctgatagtaacggatcttacaactggtcaagatttggttcttgtggttctgtcagaatccagttaacaccaatggaaccaaaaatgaatagcgaaatgaaaagtaatgcttcatctatgcttgatagcggattctcaacaaaagaagtgaattatttacatgcaggtgaaataaataaattgcaatctaagatgcaatctcttgcaaataaaattgtagaaaaaggtgaagtgttaaatagcgaaatttcaagtgaaattgagagtgctgttagttcttatcaaaatacaattcaaaataaaggacaggaaatatttcagaaagcagttgttcaggattatgtagcaaaaatgaaagaagatgggtttattacagcgggtgcttatgcaatgcaggtagggcaggtaataaataaagttgcttcttctattagtaatgttccagcatcttcaacagtagcaacaggaagatactcacctttagaatatcatacaaaagtaaaatcactaatgagttcagttagagattatttaaacaatgaaatgacagctactaaagaaggtattgttcaaaatggtgaaaatgctgataatactttagcaggttctgtaatgagttggtttattcaggatgaaactaatttatttagttctgtagcagatggaacaggtaatttaataggtcaagatccattaatagctaataaaattcttggtgataaattgattacttgggcttggatttcttacacagcaggaatttcctttgccacggcgggaggtgctttaacaggtaatatagttggtagtacattaggtgcaggtgaagcattcgggcaattcatgtcttttatatcgccagctttctttatgctgttttcacttctcatgagcgcagggataatattagctgtaattcttccatcattaccgtttattatatggattggtgctgttatttattatttcaaagaattaatattagcattctatgcagcgcctgtttttgcattattccatatgacagcttcaggtgatgatttctttgtaagtcaaagaacagataaaggatatatggaattacttgtattagctttcagaccattattaatgatctgtggtttaatatccgcattactacttctaagaccaattggtacctttattaatacaatatttgttccgatgtttagtttaggtgttatgagtgatgtaagtgcattcggtatcactcaaatgttttgtggaatattgttgtattcttttcttagctacataacaactaaaagaatactcatgctcattgtagagataccggataaaatctttgcgaactggatcggtcatgctggctcaggtggtatgacacaagaagcaagagagagcgacgcaacgccagcggcagccggagcgggtgtcattggtgcaatgtccagcggtcatggctctggtcttagcagaatggcaggttctatgagaaacaaaggcagagaccctaacggcggggggaacaatgatagtgtttctatcactcacacggacagcaacgggaacagctcaacaacaagattacgttaa

SEQ ID NO: 208589 - DNA, 219 bp, Klebsiella oxytoca; identical to SEQ ID NO: 150284

SEQ ID NO: 208590 - DNA, 438 bp, Klebsiella oxytoca
atggtaggtaataataattttaataataccattataaatacgcgagcttcctgtagaagctcttgcgaaacgaagctttcacacaagcaaattcgtaatcattgcgtcagtgtcaggcttaatgataaagagctgacgcttcttaatgaaaaacgtggtcagcatcgcaaaggggaatggcttcgtttatctttgattaatacgcttccagttgtagttcccgcaattaatatagaagcttggaaatctttatctgatctttcacagaaactaaataagattgttacccaccttgataacaaaagcccaggaagccagctgacacagacggaactctttgctgtgaagcgacaaattgccgatcttcgcttacatctcatcaccgccgacttatggggagaccccgatgaagggaatgcaaaagatccgcagaggtaa

SEQ ID NO: 208591 - DNA, 1269 bp, Klebsiella oxytoca
atgaagggaatgcaaaagatccgcagaggtaagaattttatcgggatcgtcctctatacgttaaaaccagattctcatcatagggtagctcctgtagtgatcgggggaaatatggatggatgtgcagcgaaagatctgatcactgaattcaatctaacaaaaacgcttcgccctgatgtagataaacctgtttggcacaattcgcttcgtttaccaaagggcgaagtgctaaccgatgctcagtggtccgctatagctgatgactatatgaagcgcatcggcttctcggaaacgcatctcagatgctacgtgttgcatgacgatgcggtcggtcaacacatccacattatcgccagccgcatagaccgtactacaggcaaactctatctcggcaaaaatgaaaacctgattagtacacgcattatccaacagcttgaacatgactattcgctactaagaaccaaaggccctaaaacaaaagcctcttcagcattgccctgccctaaactaaaacgaaaaaaaacacgaaatgaagcgatgcaagagaaaaggacaggtgaacaatgcccaaaaaccatcatccagaacgctttagagacgatagtttctaaaagagtatcgaccactgagtttgtccaacagctttctgaacaaaatattaatgcattacccaatatcacatctacaggtaaaatgaatggtttctcattcgaatacgccgggattgctttcaaagcttcgcaattaggtaagtgtttttcatggtcgaccttgcagggtaaactcgattatagaccggagcgcgataacggctttctgtttgacctaaaagcaagtatcactaaagcgaattcaaacgaaatcttaaaggaaaacgttaaaaactccttcggagcatttattattgataggcatgcaagtaaagacggaagtgctgcagcttctgtagaagagaagtgttcctcggaagctttagcagggagtaataaagcgataacaactaaatccgtaaaagagatgcctaatcaaagctacgaggtctcagcattcagatggatggaaaccataccttaccttgatacgatttatcgtctgctgaaacaacttaaaatcccaattcttcgacgccccgcaaagcaccaagtcatcactgaagcgatgaagatagaaatccatcccatcaatcccaaaaacactcttaaggcgcctttacttgacggcaatttagtgccaccaaggcaacattaccaccttacatgtagattttag

SEQ ID NO: 208592 - DNA, 672 bp, Klebsiella oxytoca
atgagcagccccatcacgaaacactgcaatgaagaagttaacatcgacccgttaagtcgccgagaaacgaaagctgagatgacaacacccaaattcgagttgttcggcgaaacctacatgttcgttgagaccttttctgcaactgtcattagtcccctcccaatcactgaccaagtctgggttaaaactgatactggggatgagatacagattccagcctttggtatcgcatttagaaaatctcacaaaatgtgtaaatacgagcttcgccagtatagagttgatggttcatttagtgtcttcaaagatgctctcattgttaatgcaaccactggtgaatacgaagtcaacttagatagaaagacagttattatcccggcgtttctcaccgtacttttccctaacacttcgatggcattttattatagggcgatgcctgttcctaattttttttcgaccatatttatcttgctttgttgcattgcagtcgtttcattttttgtgttgccatggggttttaaatctggatatgtttttgatgaacacaaatatatgtggctaacctattttgcctcacgacttggaagttttacttgcattaaatggataaagagaagaagccgaatgtttgataactcactcagaagaattattaagtcaataaaattttaa

SEQ ID NO: 208593 - DNA, 576 bp, Klebsiella oxytoca
atggatttttttagtaataaaatgaagtatgaaaaagattttttatacaacgaaatccagttttcctataatcttgaatttttcaaaatcatagctctggcacatcgtgaaaaaaataaaagttatagctacctacacagggggacagtatttaataaagttaataatgatgaattaacgaaattctatcttaggtttttgcatgatgaaaatataaactcaacttacgaggcaggagatacagcccttttctttagtatctatccgttgcttacagcagagttaatcaaagctggatgtaatcctcaccatctcaacgcagaacgccacaacgcccttcagaacgccctgtacgctcgtttaaatagtggtaagaagattttctcacctggttctatcactgaccatgaaaaagactgtatgaagattcttttagatcacaacgttcagtatgaaggatatggaattaacttttcttcatacccaaaagatatacaggattatattatttttaaaatcgttggcgaataccctacacatgataaaaaaaataaaagcatcagcaagagaatataa

SEQ ID NO: 208594 - DNA, 279 bp, Klebsiella oxytoca
  misc_feature (249)..(258): n is a, c, g, or t
atggaaaataacttagttctttatgttaatagtgatacatctcatttagacgtgaataagtattttttttcttgtgtaagtaaggggaggttaacggaatttcttgatgcaattaattacaatcaccccttaaataagcatggatatataaattacgcggacaaccaaaaaccactattgataaccaatgatataatggattttatcacgtctaataaattactaccgttaagcgattacgaaaatacnnnnnnnnnnccatttatgatgattatttaa

SEQ ID NO: 208595 - DNA, 228 bp, Klebsiella oxytoca
atgtcaatattcaacaaatttaatacagtaagaaaaaaggtttttggtaaatcattaattgcaaattcctataaccagataacaaaacagtcttttttatgggattggtataaagggatttttaagaatatacaacaaatgagagcagaaaacgcggagtgggaaaagctatataaagagcatctggaagaggaaagaagaaacaaaggaggaagaaatggaaaataa

SEQ ID NO: 208596 - DNA, 354 bp, Klebsiella oxytoca
atgataatcaaagagcaaactattttaggcaagaaatttattatcagcatagcaaatattaataattcacatattgccgattatgcaaaaaaagaaataacttatcgtttcttaaaagtagttagattaatggtcatggactctgattttaaattctcaaggtctaaccaaaagggcgttaagacgcttgtgaaattcaatactacaaataaagctaactataaccatgccatttattttacaaataaagaaatgaagaaacatatagatcagttaattgataattctatgaaagaaataattgaatataaaaggggtgaaatatgtcaatattcaacaaatttaatacagtaa

SEQ ID NO: 208597 - DNA, 468 bp, Klebsiella oxytoca
atgaaaaaatttatgacattttcagaagcatttagaagacaaaacccaacagtcgaaatactggaaagaaactacaggaactttaaatacattgcatgggctggagtagcaactattttatattctgtaggttttgaaatttatttattgagttctggtaatttaggaataacgcctttagtcagtgctggtttaggggttgctatttggttcaggggagcggcgcttgcttatggaattagcaacaaaacacttaacgtcaaagaaatctggactaattataaatactggcttgttccttctgtaaatataccatttttatataaagaagaactaaacgggagttcagtttatccagtcgaagaaacagaaagaaaacctattcaaataaaaaacagggaaagtattattgtttctgacagaaaagcaaggattgttaaaattgataaaaaagggggtgatagatga

SEQ ID NO: 208598 - DNA, 768 bp, Klebsiella oxytoca; identical to SEQ ID NO: 150305

SEQ ID NO: 208599 - DNA, 252 bp, Klebsiella oxytoca
atgagcgcagggtacaatttaaatactataaaacaagatgagtttgagtatatagaagatgctttatcatattatgaaagaatgaatgaaaccaacgacttaacaagaaaagacattgagagaaaagagaaaatggaagcattttataactctgaatatttcagtgaaataaggataaaaaaagaaaaagactttattaacagcaccattgaaaataatggtgaaatacaaaaaccaaaagcgaggatttaa

SEQ ID NO: 208600 - DNA, 255 bp, Klebsiella oxytoca
atgataattcatggaaaattaattaaagcaaaagacttagctaaggctgcaggtgtatctcgttcaacagtgattaaatattacggcattagccgtgagaattacgaaagggtagcaaatgaaagaagaaagcttgcttttgaactaagatcatcaggtttaaaatggaaagaagtcgctgaaaaaatgaacacgacaaaatatagcgcaattgcatattatagacgatatgtagcattagcgaaaaacaaatga

SEQ ID NO: 208601 - DNA, 1008 bp, Klebsiella oxytoca
atggaccagagaatcctcgaacatgaggcaattaaacagcttagcaagaaatcggtacgcaagttgtttggggttcatgatatcccaagagccacctcaccttttcgctaccctggaggtaaagacaagcttacctcatttttagctatttttcttatgcacaataagttaaaaggcgcacgttttattgaaccattctgtggtggagcaggtgcatctctttcattgttattaggtggttacgtcaaagagatacatctaaatgacaaaaactacgctcttttttgcttctgggaacaattgcttaacaatactgataacctattagatatggtttatcagaatgtcccatgcattgaagattggcataagcaaaaggaaatttatcaggcaagcattagcagccccgataagtattccaagcttgaatttggctttagtgtattttatctaaacagagctaacaggtcaggcgtgctcagcgcaggtcctattggtggcttggatcaatctgggaaatataaaatagactgccgatatacggtcagcactctaattaaaaagcttgaaaaaatagcaagcatgcgagattcaatatttgtatataatgagcactgcattgattttttaaataaatttgacgacaaagcccattttaataatgattttgtttatctagatcctccgtatgtcaaagaagggcgcaatatatactctaaaaatttttgtttcagtgatgctcagcatcgcgagctaaaagattacattgcagggtactctaaccgctggttaatctcatatgatgaccatcctttggtgcatgatctttattcaaaacatggtacaagagctgttgaaataagttatgtaatgaatcaagcaaaagtcgggaaagaattgatgatagctgattctcggttaagaatgcctgaatcactgttcacagttgatattcttgataaagttgaaattgctgaatcaaaaataaaaagcattaaaacggcctaa

SEQ ID NO: 208602 - DNA, 1020 bp, Klebsiella oxytoca
atgcagttgttaccttacccagaaagccaccaaatccaagtgaaattggattggctggagttgtcatgcttgtctaatgcatattttacagtgcgtatttctgaattaaggaatatactggagaatttagattcgttcacatcttctgatattggagaggaagatgctgatgttgaaaatgaaattcaacggctgttagagcaatatcaacaaagaaaatatatcttggcagagagttatccttttgttttcaatgaggaaactctttgcttagaattggtagaagatagcttggagcaattgacattagatcagcatatttatctgtattgcctgtatttttcacatatgtcagcttctagattgttcagtggattagaaagccctactaaccagcaaagagatctgcttcaaatcgctgctactattgctttggccggttactgtcgagggcatagcatctcatttggttggccaaggcctgatcattctgagttttatgcagccctaacaagagctgttggtttgattggtgaaggaagtctcagaccttttgccgatgtaaatcgttatttgcaaacacggcctttaaaagatgcgggtatcgatgttatcgcttggaaaaacactaacccacgtgacaactatccaggtaataaacagatttattttgctcaagttgccagtggtaataattggcgttctaaagcggttaaggaggacatcgaggttgtccagcgtcattggttatcccagagaatttatcgtgtaattgatgcaatcatcatcccgtttgattttgaaagcgatgatgagtcgataaaaaaagaccatatttcactagttgccgaagaattcggcacggttttacaccgattaagactaccaacttgtttcaaaatggggttggagcttttagcctcagatcctgaattgcttattgagagagggaatgaagttcacaatatctctcaatatgtaattgcaactacagaaattttacaagatgaagcggcctaa

SEQ ID NO: 208603 - DNA, 1116 bp, Klebsiella oxytoca
atgaccttgaaagctttagaaccatataaaacacaaatgatttcccctgatgagctgattttggatgctaaaaatccacggctgtataacgggaaaaatttcaatgataatgcagatccacatgaccttgttaaagcgctttctgatacagcagatttagaagagctgattaaatctatttcagaaaatgggtatatgtctatagagcccttaatagtaatgaaaaagggtgataaatacgttgttttagaaggcaatcgccgtttagctgcgattaaacttcttacagagtcaggtttggctcaaaaatgtcgagttgttgtccctaaggtattagagcctcaagttattgaaagtttgaaagaggttgcagtatacctagttaaagacgagtctgaagctcgttcatttattggatttaagcatgttaatggtccacataagtgggattctttcgcgaaagcgcaattcgcttataaatggtttgtcaatgaaagatcaaccggactaacaattgatgatataactaagaaactcggtgatagtaataacaccgtacgctcaattgtgagtgcaatgtttgttcttgaacaggctaaaaaccaagaaatttatgatattcataccgaccgtatgtctcctaagttttctttctcacatttatacaccgcattaaatcgatcagaatataaagattttcttggacttgaaaaggattggaatgtcactcttaaagacaaccctgtaccggttcaaaactctgataaacttaaagatgttttgaccgggctttatgggtacaaaaaagataagcgagcgtcattgatatcgtcccaaaacccagatctaaaatattttggtgaggtgttggctaatgaggtctcatatgaagcttttaagtctggcgttgagagtttatctgaactctacaaacaagcaggagatccccttcagcatattaaagatgcattccttgagataaataagcaactagatactatatcttcagttttggatagaactgattctttagatgatactacaaaaaattatattgagcagttcaagaaaaaagtatccaaggttcaatttcaattgcaaagtattgagggataa

SEQ ID NO: 208604 - DNA, 153 bp, Klebsiella oxytoca
atgctgggattgcgaaataacatatggttaagggcgtggcagacgttactcattaccacggaacacctgtatggggtgacgccggtaacgttcaccgtattgcggtcaccggtgctggcgcatttgtatcgtatgcacgtcctgaccaattag

SEQ ID NO: 208605 - DNA, 279 bp, Klebsiella oxytoca
atgagtattcgtatcgaagttggcgacaaatgggttattaccagcgaccaatatcaattcattctgaatgaaaagaaaatcgctcaatcagggaagaaagctggcgaggaatggctcgacaccatcggctattacccgaagattaaccagcttatttccggtctggcacatcactatatccataactcggagcttcaaactctgaatgacattgcctcagaaattgagagattggggatggtatgtgagtcagcctttcatgctgggattgcgaaataa

SEQ ID NO: 208606 - DNA, 573 bp, Klebsiella oxytoca
atgatagatgccaattttaataacgaagcgttactaaatagaatatgtgaggtttatggatttactcagaaaatccaactagctaatcacttcaaaatcgctgccagttcgttacagaaccgctacacgcgcggcaatatgtcttacgacttcgctgtacattgcgccttagaaaccggtgcggacttgagatggcttatgaccggtgaaggtgacaaaaacctttcatccaaagaacacagcccatcacaggagttaccattcttcactttaagtgaaggaagccttagtgaatctggtgttttgagtattgataatcagctttttggtaaacagctcaaaaatgcaatctgcataaaaagcgaaagcagctgttacatcattgagaaagacgccccattggctgatggtttatgggttgttgacgtcgagggagcagtcagcctccgagagctgacggtactgccagggaaaaagttgcatgtagctggcgggaaagtgccttttgaatgtgggattgatgagataaaaacagttggccgtgtggtaggtatttacagcgaggttaattga

SEQ ID NO: 208607 - DNA, 699 bp, Klebsiella oxytoca
atgattctcgaagatcagagcggtattggtatccgcgttggcttgcgggatatccgagtcgctatccgaatcggcatcgctgtcagaatccgagtcactgtcagaatcggaatcgctgtcagagtcagaatcgctgtcagagtcagaatcgctgtcagagtccgagtcgctgtcgctatccgagtcactgtcggaatcggaatcgctgtcggagtcagagtcagagtcagaatcggaatcgctgtcggagtccgaatcgctgtccgaatccgagtcgctgtcagagtccgaatcgctgtcgctatccgaatcgctgtccgaatccgagtcgctgtcggaatcggaatcactgtcagagtcagaatcgctgtcagagtcagaatcgctgtcgctatccgagtcgctgtcagagtccgaatcactgtccgaatcggaatcgctgtcagagtccgaatcgctgtcagaatccgagtcactgtcagaatcggaatcgctgtcagagtccgaatcgctgtccgaatccgagtcgctgtcggagtcagaatcgctgtcggaatcggagtcactgtcagagtcggcatcgctgtcggaatcggagtcgctgtcagaatcggaatcgctgtcagagtcggaatcgctgtcagagtcggaatcgctgtcggaatccgaatcgctgtccgagtcagagtcgctgtctga

SEQ ID NO: 208608 - DNA, 186 bp, Klebsiella oxytoca
atggagattctctaccacatctttaccgtgttctttaaccaggtaatgactaacgccccgctactgctggggattgtgacctgcctgggctatatcctgctgcgtaaagcgccagcgttattgttaaagggacgattaaaaccattatcggttttatgctgttgcaggctggctccggcattctga

SEQ ID NO: 208609 - DNA, 570 bp, Klebsiella oxytoca
gtggatttcgccgataagcaggtcaccgagatctcgtgccacggactcggcgcacgcctgctggccccgcagactcgcacggtcatcgatatcggcggccaggacagtaaggttatccagctggacgaggcgggtaatctgactgatttcctgatgaatgataaatgcgcggcgggcaccgggcgcttcctggaggtgatttcgcgtacgctgggggccagcgtcgagcagctcgacagcatcaccgatggtattgagccccatgcgattaccagcatgtgtacggtatttgccgaatcggaggtcattagcctgcgttcggccggggtgccgccggaggcgatcctcgccggggtgatcaacgccatggcccgacgcagcgccaattttatcggccgtctgtcggcacagggcccgctgctgtttaccggcggcgtcagccactgcgcgtccttcgcgcggaggctggaggggcacgtgggtatggaggtacagacgcatcccgacgcacagtttgccggggcgatcggcgcggcgctgatcggtttacgtcagaggagccgccggtga

SEQ ID NO: 208610 - DNA, 621 bp, Klebsiella oxytoca
atgaacatctccctgaggcggcgcttacgcgcctgtccgggctactcaatctgccaccctcaggcgccgagcccggaaatcccgggtcgcggcgtaaacgccttacccgggctactccccctgcatatcacgttgtttcagaggcatatccgtagctgcatgaacatctccctgaggcggcgcttacgcgcctgtccgggctactcaatctgccaccctcaggcgccgagcccggaaatcccgggtcgcggcgtaaacgccttacccgggctactccccctgcatatcacgttgtttcagaggcatatccgtagctgcatgaacatctccctgaggcggcgcttacgcgcctgtccgggctactcaatctgccaccctcaggcgccgagcccggaaatcccgggtcgcggcgtaaacgccttacccgggctactccccctgcatatcacgttgtttcagaggcatatccgtagctgcatgaacatctccctgaggcggcgcttgacgcgcctgtcagggctacccaatctgccaccctccaacaccgagcccggaaatcccgggtcgcggcgtaaacgccttacccgggctaccgccccgcagacggctggaaacccgtag

SEQ ID NO: 208611 - DNA, 291 bp, Klebsiella oxytoca
atggagcgagaaaggaatggcagcactggccaagtgggcgatgtgctaaagaccggtcgctgcaaggtgtcaaccatgacgggaaaaacgagaaacaaaacccgacaggttgacatttttatcaaaaaaccgtcaggcacgaaaccgatagctttacacttttctcagcaaaaaattgctgtaagcaccgccgttactgggcttgttcgatttttacctctttgcgaaagtgtcaacttgatgcttagaattgccaggtatttgtggaaaagtgtcagcctgacctcctaa

SEQ ID NO: 208612 - DNA, 510 bp, Klebsiella oxytoca
atgttgatgagtaaagcagagtatgcacgtcatcgcggggtaagccgccagacggtatatgactgggtggcgaaaggtgaggttgtgttgtccggtaataaaatcgatctagaagcgacggaacgcagtttgcagaaggaagaacaaactccggaagaacgtcatcctcgtgtgctggagatgacgtggggacaattttgggcgggggttaaggctttagacggaaaatcccccgcacctcgtactgaagacgagataaaacagcgcgtcctgcatgcggcgagtgagctgaactggacagttgagtttatcgaagatggtggaatttacatgtatgacggcgacacggagttttacctcacaacgtacatacaactcattcaaaatgcagatgtagcaatcgggcttatccgtcgtgatgtttgttatgccgcctctgagtgccctgatgaggaagatgaatggagcgagaaaggaatggcagcactggccaagtgggcgatgtgctaa

SEQ ID NO: 208613 - DNA, 186 bp, Klebsiella oxytoca
gtgataaaggactacctgattgtggcctacctgacggcaattgctgcctggccagtcacgctgacgttaattggtctctctgcaggagtggcattctttacgaggtgcagggtgatggggggagctctcgtcgttctgttcacgctggtggccagcgcggcgtggaagtttgaacgctacatgtaa

SEQ ID NO: 208614 - DNA, 1305 bp, Klebsiella oxytoca
atgacagcagaaattgcagtctttaataaatcagcagtttctttagcagcagactcggcagttacgatctccggtgatgatggtgttaataagatctacacaggcgcagataaactttttgctttaagtaaacatcatcccgtagggataatgatattcggatcagcagatctctgtggtattccttgggaaatgattataaaagattacagaaaaaaacttggcacagatagctttgatacaattgaacaatacgctgagaaattttgggaacacctttgcctgagtgaaaatataatacctcaggacattcgcgaaaactatatgatagatacttacagcaatcgtttcttcccctcactaatcaaacatatagaaaaaaagaggatagaaccaataatagatgaaacaaatgaaaaaccttctatcatcgaaacctacaaaataatagaagaggaagcaaacattattcttaatggttttaaacaaatggaattttatgaaggattttctgagaatgatatttctgaagcgctagccttcgccctcccaatcgctcgcagaacatgtgaagaaaaattattcacagaggatgggattgaaatacctgacactttagtgagagttattgctgatttattttccagaataacatgtcaaagctcaccatttggtagaaatacgggactagtgtttgctggctacggtgaaaaagaatatatgcccgcagttttagcctttaatgtgcttggttttttcagaagcaaactacgtttttctcctaatcttgaaaagagttcatcaggtggtttatgtggtgtaaaagcctatgctcaagaagaagaggtagagaccttccttcatggcattagcaataatttgaaagaatttatgtatgttggctttgaagttgaaaatgatactatctctacaaaaataaaagaaaaaatacagactctaaatatacaggaagacgaaaaagaagctttgtatgatgatttagataatttattagctcagagacttgcgggctataaaatggttattgacgaccacgtatcagaaaagtacacaaaaaaagttactgaaatgattgaatttttgccaaaacaggacttagcttacatggcagaatcacttgtgaacctcactgccttcaaaagaaaagtctcaaacgacaatgaaacagttggcggcccaatagatgttgctataatctccaaaggagatggcttcatttgggtgaagcgaaaacattattttgataaagaccttaatcaccactatttttcaaaactgtcatag

SEQ ID NO: 208615 - DNA, 180 bp, Klebsiella oxytoca
atggaagataaaacttttgataaaaagttagcactacgcgaatggcagaaaatgttcaaccctactaaaacatttgaagctgaatcagtagtccttaaaactgtagaacctcaaaacactgatcaaatatcaggtaaaataaaaaaagacacatcctttttggctcatttaaccgcttaa

SEQ ID NO: 208616 - DNA, 216 bp, Klebsiella oxytoca
atgaaagccagttatcctggacaatcaaccaccgcaatttatgcgctggaggcactgaaagagcattgcccgcagtgggaaacagccggtatcgaactgcttagccgctgcgtcacctctgtcgggctgaccggtcgcggtcgtgagatatggcaaagcatggttaacgatatgggcgcaaccgtggcaggcaatcgagggggtaagaatgcgtaa

SEQ ID NO: 208617 - DNA, 219 bp, Klebsiella oxytoca
atgagaaaagtatcactttcagactccatctgtcgcgttcagcaggcgcaggccattttgtctgtttggctggaacacacgacaacagaccacggaaacacctctgatctaatcggcgccattatgtctctactggaaggtatcccagatgttatgaccgccgcagaggatgagctttttacgattgatatgcataaacgcgcgggaagtaaatcatga

SEQ ID NO: 208618 - DNA, 180 bp, Klebsiella oxytoca
atgaataagtccaccagctcaccccagccggatcacacttaccgcgacgctcacggggaggtagtgagcgttgtatcggtggcgcacaaccgggtgacgttctaccgcgagggctaccagttccaatgcgtacagcctattgagcgcttcatgaaggagtacacggaggtgaagcaatga

SEQ ID NO: 208619 - DNA, 384 bp, Klebsiella oxytoca
atgcaaatttcaactgcaccgaccacggagcctgtttcatcacgcctgtcgcctgtcgaggtctggcagatactactcaaacatcttctggcacaacactatggtctgacccttaatgacactccgttcagcgatgaaagcactattcgtgaacatatcaatgctggtatctcactcagcaacgcagtgaattttatcgtcgaaaaatatgagctggtacgtactgaccgtagtggatttaagattatggagcagtctcccttcatcagcagtatcgacattcttcgtgcccgccgggccaccggattgatgaaacgtcagggttataaatccatcagcaatatcgctactggtcaccttctccaggagcgacatttacgatga

SEQ ID NO: 208620 - DNA, 339 bp, Klebsiella oxytoca
atgactaaagaacctgttcaggaacacgtttggggtttacacagtcaaaccgttccatcattcagcgcccggttagttcaggaaggtcgacggctgcattttctggccgaccgtgccactcttctcggcacattcagcccggaacaatccgcagcgctggatgcgatcttcccagcattaatccgggatatggaaaccgctctgctcagcggcaaactcgacccacgtgaggctaaacaatacatctatatccgcaacggtttaacctgcgagtcagatacgttggggagttgcggttacgtttacatcgtaatttatcctcaatcagaaaccagctag

SEQ ID NO: 208621 - DNA, 222 bp, Klebsiella oxytoca
atgaaaatcatcagcaagcgccaggcgatgatgctttaccgccaaacgcccggttcacgtctggcaacgtactgtaaagatcgttaccgctggaccggtagcgtctgccattacaccggtcgccacgtccaggatatcagcggcgtactagccgtttttgctgaacgtcgtcaggactgcgacggcccgtatgccatcctgcgtagcgtgacactactataa

SEQ ID NO: 208622 - DNA, 501 bp, Klebsiella oxytoca
atgagcactgtaatatcactgatacccgcatccgctcccaccgtaccactagccttaacgccatatgcacagcgaacaattcaaagggccttgaacctgctggataaacacctgcgacagcccggcgtgtcattcctctccgcaaccgaaacccgtgactggttgcggttaaagatggctgtgctggagcgggaagagtttgtcgctctgtttttggataaccagcatcagttgctggcctgcgaaactctgttcaccggcaccatcaaccatactgaggtccatccgcgcgaaatcgtaaaggcagctctgcggcataacgcagcagcggtgatcctcgcgcataaccatccctccggcatggcagagcccagcagggcagaccgactgctcaccagcaacctgcaaaacacgctgttactggttgatgtgcgggttctcgaccatctcatcatcggccacagggagatcgtctcgtttgccgagcggggatggctatga

SEQ ID NO: 208623 - DNA, 894 bp, Klebsiella oxytoca
atgcccgattcccccgatacactaaccagtaccgaggcattacgatcccatctctcattcttaccacaacatgcttgcgaccgaattctttccagacttcagcacgccattcattacgaaccagtaatcggcatcatgggcaaaaccggtgccggtaaatcttctctctgcaatgcactgttccagcagccggtatgtctgaccagtgatctaatggcctgcacccgcgagccgcaacgactggtgctgaccgttggtgaacgtagcatgacgctggttgatttgccgggggtgggagagactccggaaaaggatgaaacctatctctcactgtaccagcaactgcttgctgagctggatttgattatctgggtcctcagggccgacgaccgtgcacgggcaacggatattgccacacatcgggctctgctgaacgccggtgccgatccatcgagatttctgtttgtgctgtcccaggcagaccgggtacggccagtgcctgatggtgaggaatggcaggcacttccggatgcagagcaatgcctttctcttgccgttattagttcgatggttgccggacagctttcatcctctttccccgtgatggcggtgtctgcgcacactagctacaacctgtcagccttggtagagctgatagtgcatgctttgcctccacaagccagtagtacagtctattggcaactgaagtctgaacataaaaacgctgaaagcgactccgctgtgcggctgcaatttggcgaaatagctggcaccgcatttgattcagtcattgattcaaactctctgccttccggattgcgggttttgctatgccggttacgtgaaaaattggtgcagttagcaaccagcctctgggacaaactcttcggctga

SEQ ID NO: 208624 - DNA, 1269 bp, Klebsiella oxytoca
gtgctaatacttcatttatctgacatccacttccgtaagtccgaaatcagtaccgtacaagatccgaatttgcacttgcggaacgaaatcattcgagatgcagctgagcaatgtgccgagcttgggccacctaatgtgattgtgatttctggggatatagcatttgctggtgatcctgaagagtttgtctatgcaacgcggtggcttgagaggctctgcgttgcatgcggttgcccgatgtcatccatttttgttgttccaggaaatcatgatgttgtgcgctcagttgctgaacaaaacatggttcagatgattcatcggacaatcaaagagtcagcgaatcccaccgcagaaatttttaggcaactgaatgatcctctggcacagcgcctactttacgaaggtctcgaaaattataacgaatttgcctcgcagttcctctgtgatttacttcctccagaaaggacgtctgctaaacgtgatttgacactaaatgatggctcaacgcttcgattgtggggattaaacagcgcttttgtttcaagtgggcacgatagagaaagggatttatttgtcgatcaggctagtttccagatcatgcgtgaggatggtgttgttaaccttgttgttactcatcatcatctgtcttggttaaggcaagctcgagagctagaggatcatctaaacgatgtggcaccaatacaaatctttggtcatgtccatatgaaccgaataaaccttgatcgtgattatgtaaggctcacggctagtgctgcaaacccggatcgacatgaaagaggttgggaacctggatacaacttaattcagctttctattgaccgagaaggacaggaaagaactctccaagtaaaagcacatgtcagagtctggcagacagctccgagtggctttcatgcaaaaatggatcgtagtagattgccattttttaagcagcgcataaatttggaaaactggacacctccagaagctactttagttacatcgccaactcatgtagaaattgcccaacctcacgaaatgccaactgatgacagcgccgtcatggggactgtacggaacttggctcttcggttctacaagctttcatttagtaaaaaatctgaaattgtaggacggttagatctgttagaggacgaagacatgcactcgcctgattttgaacgttttcgacgtgtttttatcagggcaaatgagcgaggtttgttaagcgctctagataatgcgattactgaagttgaacaacgataa

SEQ ID NO: 208625 - DNA, 1068 bp, Klebsiella oxytoca
atggcaaaatttacattcgcagatcgatattcggaagctggtctggagccttcttcagagaaaattaactctagatatgagcctgttaaacgcatcattgaagatataactgatgcacaattgattgatttagttttattttattataatttcccaagtgtaaacttagattggtttagggatgagtttgcacaagaagactctggttttagtttagttaacaataagagggaagcccacatactcgcctcgcttgttctgagtggcttgattgacgaagaaaattcaaaggcaattctggctgttattagcgcaggggtaaagggagctcgtacaccatctcaatcagtttggcttcaatccgctgctgaagagtcatttttgagactttcagtaaaagatcgagaacttgctgtaacacaaactaaaatcgcccctccaggaccgactaagcttggaacggaaattactgagcttgggcaaacgaacacttgggaggctcttatcaatattcttggtaagatgagagaagaatatcgagtatctgcaatttcttcagcaaagcaaatcactggcattttagaagcatttgaacgccggactttgataatgcaggaagaaagccagatgctttggtggctaacgggtggctatagtcgtactttcgaacgaagcttttcgacttttggtccgatgcaagcagctgttgcaggcgctgtagatttggggacgttaactacctatacacagctaggcccaattgctgttcctgctatgttagagcgtgttatttcggcttcaaaaaaattaaaaaaacaaccatcgaacattgcatcagcaattgatagctttactgtagatgagctcaagatgctggatgtccctaatcatctgccacctgtattagcgccagtgtcatatgctattgactcagcgagaaccgttggggctggtttgtggcatactttatttcagactaaaactgggcttgatgcaaatgctgaattttcacctttagcattgggcgaacaaatctaccgtgagcatctgttaggaaaattactgtga

SEQ ID NO: 208626 - DNA, 933 bp, Klebsiella oxytoca
gtgatagatgaacaaggtgaattagatactgacttggatgtctttgagcagccggatgcagcagaggtgcctgcgcagaaccagagttgggcgattttaccttctgcgatgatgctcacccttgaagaggctgatgagcttctctgctggcgagatgctgcaattattgccgtagttggagagagaaatggtggaaaaacaaccttaattactgagttatatggtcgttttctaaagggcccttttgcaaacactctgtattgcaatagcttaagtcttttgggctttgagcgaaaatgttatcagtctcgggctgtatcgggaatgaatacccctgaaacaccgaggacatcagttcaggacggtttgagcttttttcatcttgcagtttcgaatgaatgtgatttgcagcgacgagatctacttatttcagaacgtgctggagaagtttataaagagatccgcgataaacccgaacgagctatggatatggtggaaatatgcaaggcaacatccatagcatttattgttgacggtgaaagagttgcttcttctcgtacaaggcatgaagttttttcttcagtcagaacaaccatacgtgcattgctcagttctgggtgtattttggcaaaaacacaaattcagcttgtgacaacaaaatatgaccttcttcaaggtgaagagatggttgatgcgaggcaagctttgactgaattcgagcaatttacagttactctacttaatgaaaaatttgacgtatcattttttcatacatcagctagaaatccaaaagcaggtactgaacccggacaggggttagctcctttattccaagtttggatgaacccaaggcctttggaggtattggataagaaaatgcctgtcttgaataatgagtttgaccgtctgatgttgaggagaggtgccatatga

SEQ ID NO: 208627 - DNA, 879 bp, Klebsiella oxytoca
atgaattctaactttgtcataatgggactaccagcatcaggtaagacaacttttcttgctgctctttggcatttagtcgagtccaatgaaactccctgtcgtttagagtgttacgattatagaggtgatttctcctacctgaatagtattgcggctgcttggcgatcatttaaaccggtgccaagaacctcacagactggtgatatgaatgtaagtattatgctccgtaatcgtgatactggtgaaagtggagttgctttctttcctgatcttgcgggggaaacgtttgatcgacaggttgaggaaagaagatgctaccgggattttgtcgagtcgttttctcaagaaaatggcgttttatttttcattagtgccgatctcaaggaagataatctatcaattactgatctgaatgccagattaccaataaataatgtggagttaagagaggatatcagcactacagacgaaaacgagagtaagatgattttaaatgagtgggagcctaaatttttaccttggcaagtaaaaatagttcagttacttagcgatcttactcggcctccttttttacaacgtaacaggcggattgcgatattaatatcagcttgggatcttgttcgctccatgggaactactcctcaggaatggctatctgtaaatatgccattagtggaacagtttttaaaaactaatgtcgattattttaactttcagatatttggcgtctcagctcaaggaggacgacttgacgacgattctgctatcgatgaggccgctaaaggtttggctagtcggcgtattcagattgtcggcccgcaaggagaggggcacgacctcaccgaaccacttgtttggttaatgacggcgacaaaatga

SEQ ID NO: 208628 - DNA, 1965 bp, Klebsiella oxytoca
atgaaatttgaacattgtttatttggttacgatgatgggcacagactgctagcatcttcattacctcttgggaatgagatttcacttttaacagagctgagtgatcttgctccagggaccgtgtttggtaattcgaaagggtattggactggtgtgcctgtcccttctattggatgttatgctttaatgtttacttggcctgcgccagaaatgtccagacctggttgcgtatggacacatgcattatttattaaacctgctttgttcgaatgtttggatgatttattgattttaaaatcgctgtttgtcaggccgaatgggattaataatttagctttctataaacaacctttgaatataaatctagaaatgtttagcgctaaggatgaaccatctgtaaataatgatatcgttcaagagctgatattgtcattatacgaaaaaaataacaaacaaatagatgttaacactccaggtgaaatagatggggcgctatttgctgtatggtctcaacaatggcctagattaagaaggaatctacgttttcaaacagctgtatcaattgtttctcaaacaagtcgttctgcacgttttgatgtttctgtctcgttggctaaatctcaaaaacctaatttttcttttaaagaatacgactccaattgggtaattgctgctgtaaatgacatttctaacaggtttaacagtagtaaaggagaattacgtgattttttatgggtatacggacaggatgttcaacgtcagcgtggttcgtttcgacctttagttgaaattaatatactcaacaaactctgtcgaaacgatgatgctgaagctttaattgatcttgtaattgaagcctttcctgagagtaataatggagtccgattaaaacaggatctaatggatggtaagttagccggttttgtgcaagctgaattaattagattgataataacaaatgatttgagtgaaaaaaatggctttccaatactaactgaatcaggtattgataatcttgctaacttctggccagtaaggtctgaagaaattttcaagcttattgactctttgatcttttcgggtgggagttcttggactcgagtgcttgaagggataatagattttatccaaacagtggatttttgggtattaagtaatggatactctcgagttcgtgagtatgttataaaaaataggccagattttttaattcacttacataaacagttggatacggaatcattaaatacattaattccatttgttactattgaattagttgaagttagtgactttattgcatacgcaattaaaagaaataatgctgacttagtaaatattttgtttaaaaagtgtccagaggatatttcagaacaaataattaaatctttagataataatgatattaatatatcatccgtttgggctcagggtcttattcgacgtccagagcttctacttagggctaaagtacttaatttagtatcgcataaaagtttactttatgtgcttgcagattctctggggtggttgtcttcgtcagtcaagaatgcaggtatagccccttggagggaaggaatgtatactattgatgatctttcagagtctgaatctgagatattcgattgctttcttatttctctagctattatatctattgatggtgaaggattaagatttgtcgaatttgcttatgataaaattcatagtaaaatgcttcattccaagctctctttgagaggggaggaatttctatccccatttttacctgacttaggttggttttcaaattgggatcttgcacatcgttttcgcttggcaataacaaaggcttatgttcgacataattggcccacaggtagttatattgcgctcgctaaagataaaaaggggcggaaaatgctttcagaagcagcatcgagtatagatggtgcccaaaagtatcatgatgcattgtttacatga

SEQ ID NO: 208629 - DNA, 594 bp, Klebsiella oxytoca
atgtatagtggtcgtgatttttttaaaaggaatttgttgatgaaaataaaagaaaaattaaaggttaccggaaggcgctctaaaattgccatgttcattactgctatggtcatggtttactttgtcatgttagttctgaaaacgatattcattgagaccagctatagcagcatcgtgatagtccaaaacattcatcgacttgttagtacagttatttcttttacttattacccactaacgaagccattatggggttggattccatctgtctcattcgatgatagagatcttatcgctctttataagcctattgtaccaggatttgctattttaaccatttgtatgctttttatacgtgatcaccaggagcttaagcagaaattcaagcaactcagggcagaagtagaggatgaaattacgcgtaaacagttgcgtaaggatgctggtttggttaacgttgatgaaacaacaactatagatgtgattatcgataataaaaataacacagatccagcttggcatgatacttggtggggaaaagtaatcattggtgtagtaattgctcttattgttgctgcttttgggctcagttag

SEQ ID NO: 208630 - DNA, 198 bp, Klebsiella oxytoca; identical to SEQ ID NO: 191037

SEQ ID NO: 208631 - DNA, 282 bp, Klebsiella oxytoca
atgagcaatgaagcctggcgcaacgcccgcgcgatgtatgagaacgataactgtgcgaaagcgctgggaattgaaattatcgagatggaccagggctacgcgcagatgaccatggcggtcaccccgaacatgctcaacggccaccactcctgccacggcggacagctgttttcgctcgccgataccgctttgcctacgcctgcaacagtcaggggctggcggcggtcgcctcagcggcgagcatcgattttcttcgtccagcctttgtcggcgagctgctga

SEQ ID NO: 208632 - DNA, 180 bp, Klebsiella oxytoca
atgcttaattacttccgtgttgcaggatgcgccaccgcccggagtggcgaattagtcgagttcgtttatatcgttgacgcccgcagcgcgatcagcgccaaagctgaggcgctaaatcaggccagaaatgaacgcctgtcccacatccagattaaccgcattcgtgaggtggcagcatga

SEQ ID NO: 208633 - DNA, 360 bp, Klebsiella oxytoca
atgagaatgaccagccgcaaaaaagagatactcagctactttgagccggataacctcgaatgggtgacgggtgagattggcgctcctccgttcgatgtgtcgggcgtggcctaccttcttcatggcatggcgtcgttcgataaacgccaccagctcgaatcaacccggcgaactcttgaaagcatggttgctggtgggttgcttgatcgggtgatagtgtacgaatcccggcagataaaaagcggcggtgagactagcgcaacggtcgtgcgctacggtttacccggtcagtgtgccgttgtgcgcgataatggcggcgctgataacgcgattgatggggaatgcgagcgggttggctga

SEQ ID NO: 208634 - DNA, 1392 bp, Klebsiella oxytoca
atgtccgttaacaccgcagagtcagaaaatgcgcaaccggttgcgcgcatgcaaaccagcgaattaatctaccgcctcgaagaccgcccgccgctaccgcaaaccttgttcgccgctttccagcacctgctggcgatgtttgtcgcggttatcactccggcgctgttaatttgccaggcgctgggccttccggctcaggatacgcaacacatcatcagcatgtcccttttcgcctccggcgtggcctccatcattcaaattaaagcctggggcccggtgggatctggtctgctctcgattcagggcaccagctttaacttcgtcgcaccgctgattatgggcggcaccgcgctgaaaaccggcggcgccgatgttccgaccatgatggccgcgctgttcggcaccctgatgttggccagctgcacggagatggttctctcccgcgtcctgcatctcgcccgccgcattattaccccgctggtctccggcgtggtggtgatgattatcggcctgtcgctgatccaggttggcctgacctccatcggcggcggctatgcggccatggccgatcacaccttcggcgcgccgaaaaacctgctgctggcagggatcgtgctggcgctgattattatccttaaccgccagcgcaacccgtacctgcgcatcgcttcgctggtaatcgcgatggctgccggctacctggcggcatggttgctcgatatgctgccggccaataccacgccgacggaaagcagcctgattatggtgcctacgccgctttactacgggctgggcatcgactggaacctgctgctgccgctgatgctggtgtttatgattacctcgctggaaaccatcggcgatattaccgccacctctgacgtctccgagcagccggtttccggcccggtatatatgaagcgtctgaagggcggcgtgctggctaacggcctgaactcctttgtttcggcggtattcaatacctttccgaactcctgctttggtcagaacaacggcgtgatccagctgaccggcgtcgccagccgctatgtcggtttcgtggtcgcgctgatgctgatcgtgctcggcctgttcccggcggtgagcggctttgtgcagcatattcctgagccggtgctcggcggcgcgacgctggtcatgttcggcaccattgccgcttccggcgtgcgcatcgtctcccgcgagccgctgaaccgccgggcgatcctgattatcgccctgtcgctggccgtcggccttggcgtctcccagcagccgctgatcctgcagttcgcccctgactggctgaagaacctgctctcctcgggtatcgctgccggcggtatcacggcgattgttctgaatctgattttcccgccagagaaaaactga

SEQ ID NO: 208635 - DNA, 2607 bp, Klebsiella oxytoca
atgcctacatggggagatttaattgactcgctcatatcagatctaaatattgagggggaaacagattatctaaaaatcgcacaactttattacctcacatttggtgagcacctttactataaaaaaattaaaggtttctttcctgataatattcctcattcaaaaatccacgacctgatatttaagttgagccctcactctgttattactacaaattgggatacgctacttgaagcagctataaatgctaaaacttatttttacaatgtaataagcagtgataaagatttgatgaagtcgtatctaggaaaaaaattaataaaaatgcatggtgattttaaaaaccacaatattgtctttaaagaagatgattatttgaattatagctacaacttcccgttaattgaaaactatgttaagagtatcatatctacgcatactgtgctgttcttgggatattcatataatgatatagatctcaaacaaatcatcaagtggactcaaaatcattcatctgtaagaccaccaatgtatctttttgtatttaaagatatcccagcgcaaaggaagtatcttgaaagccatggcattaccacaattattttagccgatgaaaaacataagccttttaacaatgattcatactcaaacaagttatacacttttctccataatttaaacagccttgagttatgcacaaacttaagtgatatagaaataattaatgttatttattctagagtaaaatcgctacattctctaaatgcaattcttgctgaacagatcacaagatgttttactaattgtggtttaatgtatattgaagataatggaccaaaagctttattgcgattttacgatactgaagtaacctctagtgacaacaatatagagctaagaggattttataaaaaattcgtaagtatcctaaatgatgatggaaaagttgaaaagtataaatctcatcttcaaaaattattttttatatttaaaaaagccagtatatatggtgtaattgtaaatgataagcatgatagagcattattaacctctgaaatattgcaaaatgattcattaatcaaaatcgacaaagaaataaacttcaattattacgaaaacattacaccaacacgatcgaacaatttaattaataacattgataaatccaggcaatataattgcttccagttaaataaacttgatgaagcttatagcatcattgaggacgaactttcggaagaaataagacaaaaagactatgcgaacattttcatttcgcttttcaatcaaaatattatactaaatcgtttgaagtatgggttttcaagtgacaaagataactattcaactctcgaagaaaacaaaattcatgagttatatgacaaccttccgagaaacataaaaaagactgtttcagtcatatacgacctagtaacgtttgattatttgctaagccttcattataccgttagttcactattaacaaaatatagcgacattagaaaaagaaatactaagttattagttgacggggatctttacaaaacggattttctatttgaaaaccttataatatttgtattgaaaaatggttgtttgatcgatgtatacaaagaattcaaagatgtaattcgaaaggtcattgaaataaaaatcattaaaaatgctggcaagggcgaactttatttaacaaagctagaattatactcctgcattaaatatattgatgagaaaacccttgcccttcttttgagaaaagaagacaaaaaaccaataaaactatctgtgcaaccaaaagaattagactggttaatactcatagcgctcaataatttagcaaaatcatatagtaaaaactcaagggcttttaacccggtcgaaactaaactaattaacacattaaagatactatctttaactaaagtaactgtcgaacaagattccataatattgaaaacaatagatgacgccctcaaatcttcgtatcataacctagcattctatgatgccatttcagaatatattgtcttaaggtataacgctaaagatgagaactcatctattgacggaatcaaatccttaattgatacgattctcgataagttgataagcagaaacattggcgggtatgaattaatagctatagtcaatcgtggccttgctaatattttctctgtggcgaaaaacttaggcatcaacattgaagacgctgataagattgataagctattagttgagattagttcatattcaaatgcagacagagcaagagctgtagaaaccatactatatgacctgtatagaataactactggagaaatcagggaaaagataaaaacattcatcaaaaatacctcaactgttgattttagtgaagatagaaaaattaagtttgaattatttttattagcttcggaaatttctgataattatgacaatcttcctgagagagttactaaaatcattgaaaactataaaggatttacctttaactctgaagcagagtcaatcagaaatttattgcgccacatagttaataaactaaatttaagtgatttttcacccgttctctcgaagattgaggaagtaattaataattataaataa

SEQ ID NO: 208636 - DNA, 303 bp, Klebsiella oxytoca
atgcctggaactaaaacgggtctatttacagcagcgctcgcgcctgaattaatgggctatagcagtcagcatcccgccgtcagaaactgcgccatgcagcactcggtcgactatctacgcgaggcactaaatgtctggctggccgccggtgaaaaaattaattattctgcgcaggataatgacattttaacggtcatcggattcaggcctgacggggcttcacgcgatgataatcgtgaaaaattcacacccgcacagaacctgaattttgctcgccagcgcgcagaactggccgcgcagtag

SEQ ID NO: 208637 - DNA, 195 bp, Klebsiella oxytoca
atgcgtgatccaatctgtctggagcaggccgaatataaatcagcgctggcttcatcactttacgaaaccatcctggaaaaagcctctggtgaatgttcagaaacgctgctgaatctgatttctattgcctgtgattttaatcaggaaatccaccgggcattagtcgccgagctgcacatgggagagacaaaatga

SEQ ID NO: 208638 - DNA, 1206 bp, Klebsiella oxytoca
atgatcgcgcataaaacaaaggcgtccatgccgggccgcctgagtcacaacgctttactgaaacaccgtcagattaccaggcttgccgccggtggtcaaactttgtgcgtcagcattactgacctgcaaatcaactgcgtacgtttagcgtacggacatcacaacccgttgaaattgctccagactgtaaatttacattctgctcagaactcactcaaaccattgagccagcttaattatcgcgaaatgcgagaaccggctaacccatggattatttcaacttccaccaatggtggaggttggtctaacccactgaaccgccttgattataacgattcgttagaactggataagtcattgattattccgaaaacctgcgatgcaggaagcatgatgccttttttgaatcatgaggaaaatcaacaaagtccagttttggacgatgacgcaaatccgcaacatcttaaaaatcgccatgctgcagatctgcaggatgctggccatgagtctgatttagtttacgaaagggtagtacctcatagtcaccaggttaaccgcatcgctaaaagatacgcagacagccaaaactctttaagaggggagcctttgcacaactcattaagggttatgcaaaacagcccctttttaagaggggctgttcacagcattaccgagagtaaccctgttcagccttttggctcgatgccctgtcggcgcaattccgcgcgggccagttctttcaaccaattaccgagactaacgccctcacgttctgcggcatcattaagctgctgccgtaattctggagtgattcgcatctggaaagtaggcgacagcccttctccttttggtgttttatctcgtttgatagttgacatgtacgtacgtaaccttatagcatggattttgttatgtacgtacgttatcacgacgaacatgcaaaagacaacgccccggactgcgggaacagtgccagggcgtctgacctccaccgataagttacgtatcgaggaagctatgaaagatcatatcacacacccgcaagggcggaagtcctacatctggcgttttcttgcactgagcgccatcgggcgcaacgtcattcacatcaccgctaccactgagcgcgaagcccgtgagcaatcaccggctggctgcgtgatggtattcgctggccgtctgcctgtggaggtgcgccatgcgtga

SEQ ID NO: 208639 - DNA, 1101 bp, Klebsiella oxytoca
atgaacgatgatatttcgaagggtgtctggttagtagctaatatttttattggcaaaatcattacttcattagcatcaaaactccggaaaccagaactttatgctgctatagactatccgttgaaacctttaaataattcgttaaagaataacacaacaatcctttatgttatcaacaaggggaaagacaaagaaaataacattgaagttcacttacccaagaacaaatttataaaaatactatctaaaagcaatgttaacgcagaagtcgtagatgataaaataaaaataaaaagattgttaagcaaggaggatataacaatgaccattagctacttcggtgatattttagcaaaggacaaccttccttatatattttctgataatgctacaggcaaaagctacatcgataaaaaacacctccctatcggacgcgggcctactttttttctcgtcacaactctactcataagtggagtagcgatctctagcttatttgtatttaaaatagatccatttgattatgtatttgataaatacaaccattataaatatgaaaacttttacaagagtggcttcaatttatctaattaccaaatagctgaaaaacttaagaattatgacatcaacaacaatgagctacctgttatgattacagatttcaatgccacacaaaaacaaatcacattcaagctcaaagttaccaacaaaatctatccaaatgcaaaaacatatgcatcctttgatctgagaaacttcaaacagttccagaagaagaaagacaagatcgaagaggattattcaaatgataaaaattacgctacctatagcaaaaaatacgatgatttgattgccgaattcagatacccaacaaacggttcaagtgaaaaagtaaatataaaaatgaatgaatcaaaatttttaacactaaccagaaatatacctaaaggtctaatttcagacgatttaaatttaaatgtctttctgatttcagacaatgacgatctaacgctattctcatttaattttggcgcatcaggtttaaaatcaccaaatttgtcaatttcaaaaaaaacagagagtgaaggtgaaaaaaaataa

SEQ ID NO: 208640 - DNA, 246 bp, Klebsiella oxytoca
atgagctggcgattaaaaacgcaggtaatattgatgccatgctgccggaaaaaattacgctacaggcagcaggagttacgcgaagctttcgaactttatcagcagatcatcgacgccgtgcgcacgggacacgaggacccggagcagctctccctggcaagccttggccaacagggacgcattaagcactggcaaagcgaccccgttgccgcagcccatctttacgctacaccgccgacgttctga

SEQ ID NO: 208641 - DNA, 585 bp, Klebsiella oxytoca
atgcgcgcagagcagtatcaaaaggcgctgacctattttgtccttgcggagaatcgtgatgccgcgcagacgtttatcactaccctgccgaaaaatgggcccaaaacagcccaggcgcaggcatggtggcaagccgcgcaaattcttcgccatcagggcatggcgttgacgggctatgagatggtgccggattttgcggtctatgatggctggtattcatcgccgtattacggctggggcccggaaggcagtccgatgaccaaatcgtggataagtgccggcgaacgtcagtgcgttcagctctctcagcccaagcaggataatcactttatgcactatcgctggcaggcggtgaagcttgccgaaaaatccgccgacctattgccgcgtaaatcgcagacctatgccgccgtgctgtgtcacgcagcggggtggatctgggctcaggacccggccaaggtaaaacgtctctataagcgctatgttaaaaacggtgcgtcgttcccttgggcggaaaactttggccagaattgcccggagccggactttacagcgtccggggttggcagaaaggaaagggaataa

SEQ ID NO: 208642 - DNA, 324 bp, Klebsiella oxytoca
atgatttatctggataataacgcaacaaccaacatggctcctgaagtccgcgctactgttatacactgctttgacgaatacttcgccaatgcatcttctgtcagtcattatgaagggatcagagcgcaaaattatttagaagagtgcagggccattgtggcacaaatgattggggctaatgcggaatttatcactttcaattctggtgcttctgaagcaaataacacggttattcgagcggtgtctgattacttcttacacaccggcaaggttcatatcattaccagttcgatcgagcacgaatgcctgctaaaagtttgttag

SEQ ID NO: 208643 - DNA, 930 bp, Klebsiella oxytoca
atggcgctggcgctgatgacggccggaaaggatatctcggttctggcgggcgtaagtgttgagtcctggcagagtgagatcaaaggacagaacattaccctggtcagtcgcggcggagatgtcacctctcataccagcgagtggcccaactttttccattctgacgggctacgctggctgggaagcctggaggcttcacgtgatttatcagtcacggcaggtggcaatattctgctcaggaacacgcgttttcctgttctgagccagaatatttctctggttgcgaacggggacatcacgtttgataaaaatgacgccatgctgtggcacgggcgacctggcacagtcctgacctacgcccgcaaacaggagctgtttaaccggatgttaccgggagagccgctgcgtgcttcgggtgatatcaccctgagcggccggcgtctgtctctgtatggtgcagggctcgacgccggtgggaatatcagcctctcatcggctgccaatagtgacctgaacatgcggagcctgagtgacctctacagtgagttttttccggacagccggatacccgaattacgcagcaatgtgaaagcaggaggaaacctgctcatcagctcagcggcagatatcggcgtgcagggcgctcatattgtcgccgggaaaagcgcgacgctgcaggcagggaaacttctctggctgggcgcatacggatatggcgtaacggacagcagtaatgataataacagggatgaactcaacgtactgacccgtctgcacggtgcgaaaagcctgacactggcggcaaacggcggtatccaggctgacggcagtacgctgacctcagacggtaacatcacgctgaccacgaaaacggttatcaggattggacttaggagaggcagcctggaaagcgaaatttatctgtattag

SEQ ID NO: 208644 - DNA, 228 bp, Klebsiella oxytoca
atgtcggttacgtcaataaagctggaaagcggaataagcgatccagagttcatgggaataagcaccaccgcgcgcaaaggtgagcgcgcccatttactcggattactgcgcatccgcatgggcctgctgaaagagcaatgcctaaccccgaagagatttattcagcacttgagcagtggattgccaaccacgaaacaattaccagcgagggaagtaaacaatgaataa

SEQ ID NO: 208645 - DNA, 495 bp, Klebsiella oxytoca
atggcaaattcgtttcagaatgagataccaaaagcacgcgttaacattaaactggacctgcacacaggtcatgagaagaagaaagtggagctgccgctgaaattactggttaccggtgatttcagtaatggcctggagcagcgcccgttgtctgagcgggaaaaggtggatattaataagaataacttcaacagcgtgttagggaaatttaatccgtcggtgaatattgctgtccagaatactctggcaggggggggcagcgaagaaaatatccatcttgcttttaaagaaatgaaggattttgaaccggaacaggtagcccgccagatccctcagcttaaggcgttgctcgccatgcgcagtctgttgcgcgacctcaaatcaaaccttttaaataattccacgttccgtaaagaactggagaagatattacgcgatccggctctgagtagcgatctgcgtgacgaaatcgccgcgcttgcgccaaaagactga

SEQ ID NO: 208646 - DNA, 1353 bp, Klebsiella oxytoca
atgtctgtacagaatgaaaatgcctctaccgcaggcgatactatagtgcttgaccatccggatgcggccggcgtttatgcctctttatttgaaaaaatcaatctcaaaccggtttctcacctgagcgatatcaatacctggcaggatgaagccgcgatggcggaagcggatgcgaacgagcgtatcaccgccggcgtgcaggtctttatggactgtatccgcaaatcgggccagcaggttgataagctcgacaaaacgttaatcgaccaccatattgccgaactggattatcagatcagccgccagctggatgcggtgatgcatcatgaggaatttcaacgcgttgaacgtctgtggcgcggtctgaagcacctggtggataacaccgactatcgccagaacgtgaaaaccgaaatcctggatgtgtcaaaagacgatctgcgccaggactttgaagatgcgccagagctgattcagagtggattatactggcatacgtatatttctgagtacgatactccgggcggcgagccggttgcggcggtgatttcggcgtatgagttcgatgccagcccgcaggacgtggcattactgcgtaacatttcaaaagtctccgccgccgcgcatatgccgtttatcggctctgccggcccggcgttctttatgaagtcctcaatggaagaagtggcggccatcaaagacatcggcaactactttgaccgcgctgagtacatcaagtggaagtccttccgcgacaccgatgattcgcgctatatcggcctggtgatgccgcgggtgctggggcgtctgccgtatggcccggataccgtaccggtacgcagctttaattatattgagcaggtgaaaggcccggatcacgagaaatacctgtggaccagcgcgtcgttcgcctttgccgccaatatggtgaagagctttattaataacggctggtgcgtgcaaatccgtggtccgcaggccggtggcgccgtgaaggatctgccgatccatctttacgatttgggcacgggcaaccaggtgaaaatcccctctgaggtgatgatcccggaaacccgcgagtttgaattcgcgaatctcggctttattccgctctcttactacaaaaaccgcgactacgcctgcttcttctcggcgaactccacccagaaaccggcgctgtacgacaccgctgacgcgaccgccaacagccgaattaacgcgcgtctgccgtatatcttcctgctgtcgcgcatcgcgcactacctgaagctgattcagcgcgagaacatcggcaccaccaaggaccgtcgtttgctggaactggaactcaatacctggtacgcagcctggtga

SEQ ID NO: 208647 - DNA, 1338 bp, Klebsiella oxytoca
atgaagacagttcgaccactgtgggggcggggccagatggtctcgccgcagcattttcagcagcaggcggcgattgccgcctggtctgtagagagcattgcccggatgggggcgctgaatccctggggaatacagtatgcggcgtttgatacgccgctgctgaagcaggggaaactgaaggccagccatctgtgcgtgcgttttgccgacggcacgctcatcgataccgacaacgccgatcctctgccatccgcacttacgctgcccgatcgcagcgaactgacggtggtgctggcactgccccatgaacatgaaaacggcggcaactgcctgcaaccggaggaaaaagcggaacgcccggtgcgctggcgtctcggctggcgcgaggtgcgcaactgctatggcgacgacagccgccagatggcggtgttgcagccggagctaatcctgcgcccggcggatgaggacaacggtaattaccagacggtgccggtcgctcgcctgtttcgcgacggccagggcaactggtcgcaggacgctgcctttatcccgccgctgctgagcgtgcaggcgaatccctggctggcggaacagctggagcagttattgagccagctgcgcattcgtctgcaacggctgatggcgatgcgccgcgagagcaacgagcggatggcggattttgcggtggcggacgtgtcgctgttctggctgctgaatgcgctcaacagcgcggagccggtgctggggcactttcagcatcatccgcaggtgcatcctgaacggctgtatctggtactgtcgggactggcgggcagcctgctgaccttttcccttgaccataccaccgctgatattccggcttaccgccacgatcgcctgacggaggtctttccgccgctgtttgccctgctggaggtgctgctggaggccagcctgccgtcaagggtggtggcaattgaccttgagcgcgacgaccggcgtaagcgctggcacgcccggctgcatgacccgcggttgcgggaagaggccgatttttatctctccgtacgttccgcgttgccggtggcgcaactgcttgagcagttcccgctacagtgcaaagtcggcagcccggatgaagtggacagggtggtcaacggctcgcggcccggcgttccgctgcgcgccatgagccatgttccggcggccattccgctgcgcctggaaaatcagtatttcaccctggatatggctcatccggcagcgcaggcgatgctggcggaagggagctgcgtgttttacgtctccggcctgctgggcgagccggagcttgagctgtgggcggtgctgcgttcatga

SEQ ID NO: 208648 - DNA, 666 bp, Klebsiella oxytoca
atgaaaacggatatcgatactgacgccctgctggcagatgcctggctgacggttaccgagctgcgttacggggccaggctggctgaaggcgatggggaagcgctctggcagcattgcgtggaggatattgcgcaggtgatggcgcaactgaaacaggccggaatgagcgaagccagccgtcagcacattctctatgcctggtgcgcgctgttggatgaaaccgccaagggacgtgaaggtgaggatgatgcctgcatcgtctggtatgaccgcccgctacaggcgaaatactttggttctatggatgcgggtgatgaactgtacgagcggatgcgtcaggttttgcgtgagcccgcgccggatatggcggtactcacctgttttcaccgggtactgatgctgggctttaagggcagctgttcgctgaaagacccggcccgcgagcagattgtccgggcgctgacggatcgcgtgccatcgttagatttcgccccggacaggccgctgctggccccggtttccggaagtcacgggctgcgtgaatggctgcgccgctggccggtgtgcatcgggctgtccgccatcgtggcggtggtgctgtggctggggctgaaccactggctggaccagctaatgaccacgctgctgccgggggccggaaaatga

SEQ ID NO: 208649 - DNA, 1470 bp, Klebsiella oxytoca
atgagcgtggcgcatcaccggctgctctggctgtggagcgggctgcttgcggcgttgctgtgcctgcttttcctgccgctgaccgccggtgaacgcggttttgccattctgctgataatgatggttgtgattgccggtctggtttcagccgggcgtcgtccgggtggattaccggagggtgaacacgggctgaacgacctgccggaagcaccgtaccgtctgcctgtggtgctggtctgcggcgacacgccggactggccgggggagggcgcggtttaccgtaccgcccagggctgctggctgaaggtttccactgcgcaactgcaaccgacggtgcgccatctgctccaggaacgcccggaactggcggcgcaactggcggtaatggtccgtgtctgcccgcagcagcatgacgacgagacggtgctcattacccggctgcatgaactgcgctggcagcttgcgcaggtacgacgcgatacccggtggactgtgcctctgttactgaccagttctgttgtgggcgcatccgtcgcggagacgctgtggcagtcgctgcgggcgggggccgcgccgcaggtctggcaggcagatgttgccccgtgcagcgtcagtcgctggatatcgcaggatgatgccgcctcgcgcacaagtgctcaggtacggataaacgctcaggcccgctttatcgcggaggcggtattaccggcgctgaccgcagaatcgccggatatgccggtggtgacgcctgcgatggtgctgtaccacctggcaacgtcatccgccgcgccggtactgactgactccctgtggactcgctggctggcccgccataccaccctgacgtcgcttccgggctggcagcccggcgcggcctctgcggacgatgcgccactgccggattttattctgccgcttctgccgcagggcaacggcgttacgccacgcagccgcactctgcgccgggctttttgcctgttcgcgctggcggtacttgtcgccctgtgcagtagcgcgtggaacaaccgccaactgctgcaccggctctcctttgatgtctcgcactattaccggatagcaatgacggacagcgccccgaaggcaaacgcggtggacgtgctgcgtaaagacgcggcgctgctcaatgactggtcgcgcaacggcgagccgctgcgctacgggctgggtctgtatcagggtgaaaagctgcgaccggcggtactggccgctatcagtacgtatgtgccgccgcctccgccaccccctgcggtggttaaacaggtgatacaggggccgcagaccgtgcgccttgacagcatgtcgctgtttgataccggcaaatggcagctgaaacccggttcgacaaaagtactggtgaatgcgctggtcggcattaaagcaaaaccgggctggctgattgtggtggccggacacaccgacaacaccggcgatgaccagttcaatcagtaa

SEQ ID NO: 208650 - DNA, 213 bp, Klebsiella oxytoca
atgccactaataaccagagctatatattttactttcatgattaacatccctaattacattattatttgtttcatcctgggtataaccggggctatccagggaaataacctgcatagcccttttaatacagcgttgaattatcaggatttggcgaaggttccgtgcttcaagtcatcaacgatgccgttcattctattttccgttaagccataa

SEQ ID NO: 208651 - DNA, 1098 bp, Klebsiella oxytoca
atgaagacgtttattttattattgctgacctgtttgttaccggcttacagctgggcatgccaaactggcacaaaccagggggatatatcgttgactaatttacctgcgcaggtcctggtcaatgccggtagttactctgcaggtaccattctttatgattcagggcagcttactcattccacaacatcttttacaaactgtgtggggtcgatatattcaaaatttgaatggagttcgggaaatgccggaacgttagttggcgataatatctactcgacctcggtgcagggaatcggtatcagagtgaaagtctggttaaatattactggtgaatatgacggtgactcaaacgattttaactctgactacaatgtgcactatatcggcgatgcagacctgtatattggaaaaccaaatggagcctgggatactcaggcaagcactaactatgcgcctacctaccaaatacagcttgtcgcaacgggcggtgctattgcgagtaatagcacgttgacgctagccgatcctattgccactgtttcagtgaaagacgatcaaggcacgatggttatttctcaactgcacgtcaccggttcgacaaaaatccagctgaccccgatggggtgcacggccagtacgggggccctgaattttacgatgggctcaatcagtaccaacgtattcgatctttcaagcaaggctggttttgctgagcaaacgcttatcttgtcctgtgaacccggtacaagagtaacgatgcgtattaacgcgactgaaacagatggcgatagcccggacaatagcgtgatagcgctcacccctggtaacaacgtggcgaccggcgttggcgtccaattgaatatcgacggcgctccgttatccctgaataccaactaccgggtctatccttacaacagaacaacggtaactaatcccggcgcggatgccagctatctgatattcaccgatcccgataaccccggcggggcggcggcatccaatgcgttgacgtttacgacgaactattacaaaaccggatcgaaagtaacaccaggaaatgcaaatgcaagtggcacgataacctttatttatcaataa

SEQ ID NO: 208652 - DNA, 903 bp, Klebsiella oxytoca
atgccgagtaagaagagtagttcgccgccgagtgttgagaaacttcatcgttctgaacccttggaattgaaaggagctacgctttttgaaggtgatgccctgtcagttttgcggagacttccaagcggatcagtacgatgtatcgtaacttcgcctccatattgggggcttcgggattatggtatagatgagcaaatcggcttagaaagtagcatgactcagtttttaaaccgtcttgttacaatcttttctgaggctaaacgtgtgctaacagacgatggaacactctgggttaacatcggagatgggtacacaagtggcaatcgtggttacagagcaccagacaaaaagaatcccgctcgcgcgatggctgttcgtccggatacaccagaaggattgaagccgaaggatctgatagggattccttggcgattagcattcgctttacagcaggacggatggtatttacgaagtgatattgtctggaataagcctaatgctatgccagaaagcgttaaagatcgcccgactcgttcccatgaatttctttttatgctgaccaaatcagaaaaatattattatgactgggaagcggtcagagaagaaaaagaaaagggcggtttcaggaatcggcgtacagtgtggaatgttaacaccaagcccttttctggcgcacactttgcaacttttccgacggagttaattcgtccttgcatactggcttcaacgaaaccgggagactacgttttagatcctttctttggttctggtactgttggtgtagtgtgccaagaggaagatcgtcaatacgttggtattgaactcaatccggagtatgtcgagatagctgtaaaccggttgcaaggtgaggatacgaatgtgataaggattgcagcagcatga

SEQ ID NO: 208653 - DNA, 999 bp, Klebsiella oxytoca
atgacagataagatcagttttcctgagccaaaacagcaagttgatttcgctttagctttaaaaagatttcgcggtgtttatcttcaaaatgcgttgttggaaaccgtgcggaatatggatattgtcgcccttgatgcgcaacttggtgaatatgttcccaaagcggatctcgcaaccttagccacatatggtttacgggccgaactattatttcctgtccccgcagtgttagaagcaaatccttatctattaggctattaccgcttgctcatgggatatagtcagaaagagttttatggccgagataaagggtttggtgttggcagtttcaaatcaatggaagtgaaaggcgttattggtaaactggcgaaaccaaaaatatctgagttatgtaccgctttttgcggtgcagcttccgctcttttatctggcgttgggcctttacgcgtgagccgcgaattgttggatgacctgacactgctcactgtggggccgcaattaagaggtggggcaaataatcaacgcggcacaaatggtattgttttagtatttgaaattattagagaaattgtttcccatgctaccgcagaagttcgggaaagtgcaattgaagtgaacagcgcaacaggtcgtccggttcttatagaatttgcagcggacccagacataatcatcagggaagaaatggcccatcagaactaccgcaatgtcgtagctgttgaagttaaaagcgggaccgatgtttcaaacatccataaccgcattggtgaagctgaaaagagccaccaaaaagcccgcagtcgtggttatacagagtgttggactgtaattaatgtttctcgattagatatggtaaaagctcgtagcgaatcaccatcgactgaccgtttttattcgttgactgaactctcattacgcgagggagaacagtatgaagattttaaaatgagggttctttctttgactgcaatcccatctgcaccgattgcaataaagtaa

SEQ ID NO: 208654 - DNA, 972 bp, Klebsiella oxytoca
atgcacgagacagaaaaaactgagttccattacgaactatttaaacgcctccagtatgcaacgcacattgtgcgccgtgataccgggctggagataaaaaaccgtctcgaaattgccagtttctacggctacatgcgtgatcagtatacgagctactccgccagggggctggagttcttcgagtcgatggagagcatgggactgaaatttcaggatactgatcgccggacagttaagaagtggctggacgtgttaaacgctatcgggctggttatttcagacaagcgggggaaggatgagcgcggctatgatcgctattaccacacagtgattcccctggaggagatcgcggacaatttgcttttctacggttcagcatcaaccagcggtgggctactggctgacggaatgttgatccgcaagttggagaagaagaagccacgcgggaaaccgaaacaaaaatccgagaagaaacaggactatggcaaatccgaaccagcgtcacctggtgacgttaacgaagttaacacggctataccggactgcaccgaaccgcaggcagcaaccgctgatcagagtcctgacctggcctctgagtctgccgcgtctactgctggacagcgcgaaagcgtggcatttaacaatgacgggagcggcgatgctggcaccgatggtaataatgcagtgaagcagccggagatcttcgatgatcgcggcgtcatcactgaggcgtttatcaacaacctaaacagcctgacaggatacgacgaaccacgccgcaacgatgacggcacattgcagagtttccgttacgtctatgggatagcacagcaaacacaggataagcgggacggggttgccgttcgccctcttgatggatacatggcagaggcccagccctggcacatcccgccgcatctgttatcgacaccgacaccagagccagaatacgacgaagatcctaatttttaa

SEQ ID NO: 208655 - DNA, 627 bp, Klebsiella oxytoca
atgacgaatgatgaccgtaacagcctaacggctgaccagaacaaaccagcgtcaccaggtgacgttaacgaagttcacccccgcaaagcgggctgcactgaacaagaagaaaaagccgaaccactcccagatctaacgcgactctacaaacggcgttgccgtgatgagagcgtgatcaaaaaggcaaaatctctacttgttcacggtatgactgttaacaaagtagccttactgctgcgtcttcccctggagaaagtgcaacaactgcactccgaagggtggaatagcagatgcagacgcgtgacccggattaacgcataccaaaacgcaaaactggccctcacctcattcaacgagggagcaacgttagctgagatttgccaggctctggggttgccgttgtacaccgtggtgatgtcactccgtcaaaacggggttgctgaatcagctattcaggccagatttccatctccggatgaccctttgaccttggcgtacaatatcgtcgttacgaggaaatcagccagcaggtttaaaccggtgaagctattttcaaaccgctgcaaattgaatccggcaacggtagcaacaacacaacgaacgtcgagccagaccgcgacggcctga

SEQ ID NO: 208656 - DNA, 381 bp, Klebsiella oxytoca
atgaacctgatcgaaaaagtacgcagcggcattgcctccgcgcttctggggaagacaccagaccaactggaagaagaacagcggcaggacgctgtaaaagcggcggtgggccgcttccttgagtccaaccctgactggaaaccgtctgcgaaaccagcgcccgcagccgtgccattcaaagacagtaaacagaaggctaaacacaaagcgaagcgcatcaagaagacgctgggtgctggcgctgggacgtttaaacctcatgttgtggatgaggacgcgttagcccgcgcccgtgccaaatgtcgggagattgtcgccgccgatccggcagcttactcatacataattccgtcagcgccgatcaaagggacgaatgattga

SEQ ID NO: 208657 - DNA, 207 bp, Klebsiella oxytoca
atgagactaaatctattaggtgtcgggaacgcgccgctgctgtctatgaaggtgaagacactggacgaggggctgatcaatgtctcggcgctgtgccggacgttgaacgtaaaacgctcaacattcctgagcaaagtcgcaaatgtaggccttgaggccgcgatactccattacgtaagccagcaaaaactgaaaggtctgaaataa

SEQ ID NO: 208658 - DNA, 1236 bp, Klebsiella oxytoca
atggcgatcaacaacaatcagtacctttttcagaacaaatccgggctgtggattttccagatcttcgtacctaaatacatgcgccacgcattcggacataagcgcgcctggcgcaagtccacaggcacaaaagatatcgttaaagcccggcaattcagaaaccatcttctgattgaattcaataagttgaaggaacagttaaagccagatactgaggagaaacgcatctcaggtgctatcgcgtctctctatcaagaggtaagcaccaacaatgagatcgaggatagacgcggcaagccagacgaggataaaaccacgtcccccaccctttgcgagatccgcgatgagtacagcgaaaactacaaaaaccgtcgatcctactccactctgagcaaatcagcccgtgccgtgcaggtctttcttgccaccatccaggaaacagacatcaagatcgatctaatcgggcgacgcttggtgacgcagttcatcagaacacaacaagaacgggttgcgagtcagactttacagaactggataacctgcctgggcagtctgtacgagttcgctctgagatcttacgatgccatccccgagggaaaccccttccacaaccacaatctggaagcaagacgcacaatcgaaagttacgaaccattcgagccaacccagataaaagcgctgcttgacggtgcggatgaggtgatccgggatttgatcttgatggggctgtactcaggttgtcgcctcgatgaactggcaagcctacgtaaagaagagattgttgtggtcgagggtgtccgctgcttttacatcagcaagtcgaagacaaaagcagggattcgccatgttccaattcatagcctgcttgctgggatcgtcgataaatacatgagccagaaccacggcgactacctactaccgccgtcaaaccggattatcaggaaggatgggaaaaaaggcccgtggtatagccagaagttcacgcgcttgcgtgatagcgttctgccgacagctacagatcgtcaatgcttccacagcctgcgtggaatgcttataacgtgtcttgatcgcgctggcgtaccagagcagcgtataggggccattaccgggcacacagaacaaaaggcgaagacagaggcattcaggacatatagcaagggcgcagggatggaagagctatcaaaatacgttgaactggtcagttacgatatcgccggatttcaaggccccttttag

SEQ ID NO: 208659 - DNA, 309 bp, Klebsiella oxytoca
atgcagcaacggcctcacttagcaaagcaaacgatcgatgagcaccagctcaataagctaaataaaacaacacagagcaaaacggataagctgtcgcatagcggtaaattggcttatatcaatgataactactgtgagattacgcgtaactacacttcattttatgggatgaacatcctgggcgtggtgcttttcttacctgttgctattttatgctttggtgctgttttatttttttctatgatgcgatatttaattatgcgcgatatgttgaaacctggcagtccagagcagacgatcaacttttaa

SEQ ID NO: 208660 - DNA, 171 bp, Klebsiella oxytoca
atgtttatttttacattaactcgcagacgcgttggcaaggcgattttgctacctttatccggcggcgaattcaccggtaatcaactgacgctgcagataaacagactggcttttcttaagtcaatgatctcccggcgtgtctgtgcgggtttttaccaacaaaggtggtga

SEQ ID NO: 208661 - DNA, 183 bp, Klebsiella oxytoca
atgtcatttcagattaaatttcaccacattcgcgccttcgttgaggtcgcgcgcgaaggaagtattcgcggcgccagccgggcgttggcgatttcgcagccggcgttgaccaaagcgattaaagagctggaagaggggctctccgcgcagctgtttgtgcgccgtagccagggctggcgctga

SEQ ID NO: 208662 - DNA, 498 bp, Klebsiella oxytoca
atgaatccgaaaacgaaaggtatttttgaggcggcattcgccatgtggggtttcgattctcaggtgctggtactggcggaaaaagccagtgaattatcagcctcgtgcgtccgttttattaataacaaaaccgactgcaacaaagtggctgaagaagcggcggacgtcgagatcatgattgagcaatttcgtcacaacgggatggggggcatgattgactatgtaaaaaatcgcaagatggcgcgtctggcgcagactgtaggcgtggatttacagcctgttagcccctttggcccgtctgttctgggcctgctggaggaagccagcgagcagatggggctggccgaaaccctctaccgcgataccggaaccagcaaccgctatgccgcacaccgcgcccgtatggccgtcagcctgctgatgcaggcggctcagaagatgatccgcgaacagcagtatgccgaacgtatgcaggtggagggcaaatctcatggttga

SEQ ID NO: 208663 - DNA, 198 bp, Klebsiella oxytoca
atgtcatccgaagataaccgccttcctaaagacgttgcctttgcccacgccgtacaactggctgctgcatttatcagtaacggagatatccgcctcaacggcagcacccgcccagaatcagcgactttcgatatgacgacggatcttatcgagacgctgtatgaaagaattcagcagacgtgggacgatcttgactga

SEQ ID NO: 208664 - DNA, 306 bp, Klebsiella oxytoca
atggataaggtaaataaaaataatgtttctgttgctgacctctacatgaagtctcgcggcgtaacgctggactatcggacagttactttattgaatgaagaagctgaggttaaaaatatcaaccctggcacctccttttatagcagcgttatgaaagaggttatttatgttcctctgcgggcgcaaatacgggcggatgaatcccgcccgaaaggttctgacaaatcagtcaagatcgtcccacgtctgctgaattctttcatacagcgtctcgataagatccgtcgtcatatcgaaagtcgctga

SEQ ID NO: 208665 - DNA, 2067 bp, Klebsiella oxytoca
atgttttttgtcgctaaagagcttattggtgtgccagggttgccaactaccactaaagggattaggcaggctctttgtaggttgtctgctggttctgagagtcaggttcgtaaacgtactggtagcaaagcatttgaatatcatattgactgtttaccggaggttgctcagcaggcattgcgtgcgcgtcagattaaacaattgatgagcaaagatgcggaagctcttccggttatccctgccaaatcaacgggaagcaaaatagcgctctatcgtgatcacccatctctggttgaacaaaagctggacaggcttacatcagatcagattaaagccgcagatgcccgtatcgctctggtttctgaggtgttacggcttggtgacgtccctggctatagctgtgcaaaagctattcgggagattgttcgtcaatcgaaggccggggagctaccgcaacgtctgacagatatggtttcactggctaatgccaaaaaaggtaaatcccgtacgttaagcgagatctccctcaagcgctggatggctgacttcaaaaaagcgggtacgccagcagagcgcattgccctgctggcaccgggaaaacgccagcgcgtggagcctgaagaaatcgcatggttacctgattttctggcgtattaccgcaatcctaacggcgtgaatatggccgaagcatatgaaggttttgtttctggctggtgcaagcgatatgccgcacaaccagaaatgctactttccatgccaagttatgatgctgttcgctatgcgatggataagctaccggaagtcgtgcgtcagcatcgccgcattaccggcagtgaagcccgccagcttgaaggatttgtgcgccgcgactggttgtgcctgccggtgaactacgtctggatcggggatggtcacggtatgaagatgaaggttgctcaccccgaccatggtaatccgttctccccggaggtgacgttcatccttgatggcagctgtcgctttattgtcgggtggagtctggcgctgtcagagagcgttattgcggttgctgatgccctgcgccacgggattagaaataacggcgttccgtatatttattattcagataacggtggcggcgagaccaataatacctttgacgccaatatcaccggtattttaccccgtctcggtgttgatcaccggctgggtattcctgagaacccgcaggggcgcggcattatcgaaatcctcaacaaaacgctggggatgcgcatttcccgtcagtttgccacctattacggcaccggggccgataaaagtactgtgcgccgggtatcaaaaacccttactgctgcgctgaacgcggtggataaggggcgcgaactgacagctaagcaggagcagaccctgcgcgaatttccgtcatggaatgagctgattggggaaattgaagcggggatcaagtggtacaacaatcgccctcatgaggcgctgccgctgaaaggaaatggtgagcattttactccggcacaatttcgtaaatacaaactggaaaaggaaaaaaccgagattgagtggctttctgatgccgagctgcgtcacgggttcatgccgcagattgaacgtaccgtcagccgctgtgagatacggcttttcaataacctctattattccgaagcgctccgggatgagcataaccgtcaggtgctggttaattacgatctgcacgatgccacgaagattattgtgagtcgcatggatggctcgctgatatgtgaagcattctgggatggcaacaagaaagcggcattccctgtcactgcggaatactggcaaaaacagcaacgcatcaaaggtatgcgcgaacgtggcgaggagcgggtccgtctggcggaggccgagaacgtacatactctctcggcacctgtagccccggactgggttcacagcaatatttatcaccctgtaatcaaaggcacacccgccatgcaggtcgtgtctgaagaagaggaatatatcgaggatgaatatctgaataacgccctcgatatgctggaaaaaaacgagcgtaaaagtgccatttaa

SEQ ID NO: 208666 - DNA, 249 bp, Klebsiella oxytoca
atgagtcgaaatgaagaactgaatgctgattggcatcccgagaccataaaggccgaaatccataagcgtggattatcgttccgctcgctatcccttcaggctggttacagtaaggattctctgaagagtgtgctgcgtaccccctgcaagccttaccagcagattgttgctaacgctttgggtgtaactcctgaaacaatttggccaagtagatacagggcaaacagttacatcaataaggtggcctaa

SEQ ID NO: 208667 - DNA, 543 bp, Klebsiella oxytoca
gtgataaaaaaacctgaaggtgcttttctggaagatgacaaagaacctgtcattgaacggattaacgagttaatacagaggtatccatcacgcagcgctgctgcacgtgcatgggggataaacattaatacacttaaaagttattttagacgcggtgattccgtccccacaccgcgtgagaacatccttatccgcatagccaatagcgaaggcgttggacttgactggtttaaggccggggcacggttaacacaagaatcaccaaaatcacctaaatcacccagtaaagagaaagatcgactacaagagatgctttcgtttttaacaccagatgaaagacagcagctcacagcactgctcgcaagaaaagggatcgaactcgtgttgtatcttttggatgaaagaaatatagagttactacaaagtgatgacgatgttaaacaccgtgcattggcgatgatgagggcgaaaaaagggacatctaaaactagtacacaaatagccgccccagacctctccgattcaagcaaaaaggtcgtttga

SEQ ID NO: 208668 - DNA, 756 bp, Klebsiella oxytoca
atggataactggttagcgctttttgacggacagacccgttactttctggatatcaatgacagttcggtgaagccggatgttctgcgcttttacggcagggaagcactgagcgaacccttccggtgggacatcgagttcacaacgcttcaggcgaacatccccccggaacaggtgctgatgaaatatgccaccttccggatgcggagcggcaaaagtgttcacggcatggtgacccgcctggaatggctgtccacatcaaaagaccagtctcactaccggctcacgctcagttcccgcctgacgctcctgggatacacccggcagtgcgccgtgtttcagaaccagtccgttccggaagtggtggagcaggtgctgcgcaagcacgggctggagggagctgattttgacttccgcctggagcgcacctacccgccgcgtgaaattatcacccagtggcgggaaacggacctggagtttatgcggcgcattctgtccgaggtggggatttactggcgtacggagatggacgacacccgtgagctggatacgtacatttttgccgacagccagcttaactaccggtttgatgtgcgcgctgccgtacagcgagccctcgggcctgttcgacggcgcggcagaatcggtctgggatgtgcggacctggcacaacatcgccaccggctctgtcgtcacgcggaattacaactaccggaccgccaccacgccgatggatgcggcggtgagtgtgcgcagtga

SEQ ID NO: 208669 - DNA, 954 bp, Klebsiella oxytoca
atgagaccgcagaaacagcacataaccactcctctagcactggccatagcaggcttgttcagtccggctggctttgccgaagaagtggagcaggataccgaaaccatggtggtacggggaaccgccgaagaggcgctgaagcagcagccgggcgtctcgatcatcaccgcggaagatattgctaaagctcccccggttaacgatctctcagaaatcatccgtaaaatgcccggcgtaaacctgaccggcaacagcgccagcggcagccgcggcaacaatcgtcaaatagatattcgcggtatggggccggaaaacacgctgatccttattgatggcgtgcccgtcacttcccgcaattctgtgcgctatagctggcgcggcgaacgagagacccgcggcgacagcaattgggtgccgccggaaatggtggaacgcattgaagttctccgcggccctgccgcagcgcgctacggctcaggcgccgcgggcggggtggtcaatatcatcaccaaacgccccaccaacgactggcacggctcgctttcgctttataccaatcagccggaaaataacaaagaaggctccactaaccgggctaatttcaaccttaacggaccgctggccggggacgccctgaccatgcgtttatacggtaacattaacaaaaccgaacccgacgcctgggatattaaccgcgcgcaaaatggatcttatgccgcgggccgtgaaggtgtgcgcaacaaagatattaacgccctgctgtcatggaaagtcacgccgcaacagattatcgattttagctacgcctatagtcggcagggcaatatctatgccggcgatacccagtatagcaacagtaatatgagccccaatggcctggtagataccctctacggtcaggaaacaaacaggatgtatcgacagacctgggggctgacctataacgggatatga

SEQ ID NO: 208670 - DNA, 615 bp, Klebsiella oxytoca
atgaaattacagaataaattactccgttatttcatttctgcgggggtggttgtcctgacatcttcatttctggtgtatgaattagtcgccagccatcgggatatgtcagaatacatgcgatatatcgtcgaaaagggcgaatccgcctttctgtacgataaatatcaaaaccagctcgtgatctcccagttctcgcgaaagctggatacgcagccgactgccgaaaaagcccaacgggcctgcgccagcgtcgagaacaatggtaaagtcttcggccttaatatcgccgggcataccttccccggacttcacggtacgctcagtaccactcaggcgtcatgcgggccgtggattaacgatctgccggcgctgcaagcatttgatgctgctatcgcccaaagtaatatgaactcagcgttaaatgcggcgacattcaaatctgacaaacgtttccgctactatcttgatttagataataagtatgcttatttctattcaccgattgagataaatagcagcccagtcgcgaactggaattttcttcacgacagcaagctaggcatcactcagaacagcccttcgcggccgcacgctgatttccagcatctatgctga

SEQ ID NO: 208671 - DNA, 1407 bp, Klebsiella oxytoca
atgaagatttaccgtccgttatggagtgacggggcctttctggctcctcagcagttccagcaacaggcccgctgggatgcgcatatggctgataccgtggcccggatggcgctggcgcatccctggggcgtgttgagcgcggaatttgacgaaggggcgctggcgctctcccggctcaatgccacccggctgagcgtgcgttttgccgacgggacgctggttgacacggacctggccgataaccttccgccggtatgcgacctgccggcggcaggacaggagagcgtggagatactgctgtgtctgccactcctcagcgccaacggcggtaatctggattacgggcaggagagtgcccgtccgcgccgctggcagtctgaacgggtgacggtgcaggaactggccgggcatgagcgtagtgagctggcggtactgcgctatgcgctgacgctgcgtctgtccactcaggaaaacagcgcctggctgacctgcccggtggcgaggctagttcgcaatacacaggggcagtgggtacccgacaggcatttcattccgccgctgctgtcgttatcggcaagcacggtactggtcagtgaactgggcgacctgctgcaccgacttgcggcccggcgtaagcgcctgatggcgatgcgccgtgaaagcaatgaacgcatggctgacttcgcggtggcggacgtgtcgctgttctggctgctcaatgcgctgaacagcgcggagccagtactgacggaactgcaccagacgccgtcccgccatcctgaactgctgtaccgtgaactggcgcggcttgccggtagtctgctgaccttctccctcgaacatcacgccgacgatattccccgttaccggcacgatatgccggaacaggtgttcccgccgctgtttaccctgctggaccagcttctggaagccagcctgccgtcgcgggtgattgccattgccctggaacagggcgaagaccgggaaatctggcgcggaaaactgcacgacgcgcgcctgcgtgaaggcgcggatttctatttgtccgtgcgttcagatatgccaaatcacgaactgcagacccgcttcccgcagctgtgcaaggcgggcagccacgatgacgtgtccgaagtggtcaatattgccctgagcgggatggtgattaagccgcttagccatgttcccgcggcgataccgttacgtctggagaaccagtatttttcgctggatctgtcctccggtgcggcccgcgccatgctggaggccggaaactgcaccttctacacgccggaatcgcttggcgaggtaaaacttgaactgtttgcggtgccagtcgccgctggtggcgctgatgaacaccctgagcattcaggggcgcaccgggcagaccggggacgcgatagctga

SEQ ID NO: 208672 - DNA, 1236 bp, Klebsiella oxytoca
atgaacaccctgagcattcaggggcgcaccgggcagaccggggacgcgatagctgattcgctggtgaaatcggcgaagaatctgtttaaccgtgaggaacaacccgccatcgaccagcagggcggagcgcacggtccgctggatgcgacctttggcccggtgctggcgctgatggataattcacagaaagtgggcgggaataccgacctgagcctgcagacctttctgacccgcgtcacccaggtgcgcctgcgtttacagcaggtgaccaacgccaccgacccgcaggcgatgacccgggccctggcgcagacggtgttccagggtaaggcggtggatttaaccgaaacccgcgattacggcagtctggtggcggcggggctgggccaggagtggagcggtttcgggcagacggtgtttgtgcgtccgatggagcaggcgtggcagcaggtgttgacgccagcggcggaaagcctgaacgcgcagtggcgcagtgcggtggtcgatgactggaacagcgcctttggcggacgctatccgtttaaggatgtcagcagcgaggtctccctgccgctgctggcaaaataccttaatgcggattccgggcgtatcacacactttttgcagacccgtcttaacggcgtgctgcaccgggagggtagccactgggtgccggacagcatcaacgcgcaggggctgacgtttaatcctgattttctgaaagcgataaacaccctgagccatatctcggatgtggtgtttacccgcggggaagccgggctgtcctttgaactccggcccggcactgccgatggcatcatgcagaccacgctggtgattgacagccagaaactcacctatatgaaccagatgcccgtctggaagcgttttagctggcctgcggacaccgaagcgccgggggcggcgttaagctggataagcacgcagtcgggaacgcggcagtatgcggatatgagcggggcgtggggctggatacgactgctggataaagcctcggtcagcgcgtactccggcacgggcagcagttacagcgtgagctggaaggcgcaggatggccgtctgctgaactacacattacgcaccgaggcgggagaggggccgctggcgctgctggcgctgcgcaacttcacgcttccgcaggcgatattcagcgtcagcgcgcctgccgcagattcaccggacgatgacgccggaacagaagaggaaacatactga

SEQ ID NO: 208673 - DNA, 1764 bp, Klebsiella oxytoca
atggaagacttaaccctgcgttattttgatgccgagatgtgctacctgcgtgaagcggcaaaagagtttgcacagacgcaccctgaccgggcggcgatgctggacctggacaaggccggaacgcccgacccgtatgtcgaacggctgtttgaaggttttgccttttcagtgggccgcctgcgcgaaaaaattgatgacgacctgccggagctgaccgaggggctggtcagcatgctgtggccgcactacatgcgcaccattccgtcgctgtcggtggtggcgttcagcccggacgttctgtcgatgaaaatggctgaagtggtgtctgccgggctggaggtcacttcccgaccggtggggccgaaaaacaccgtctgccgttaccggaccacccgcgacatggcgctgaacccgctggcggtgtcggatgtggtgatgacgacggagccagacgggcgttccgccctgcggatacgctttacctgcagcccgcaggctgactggctgcactctgacctgaagcgcctgccgctgtacctcggggaggaggctgtgacgggcagcgccctgcacctgtggctgacgaagcgtcaggcagcgctgtatatccgtctgccggggcaggcggagcggataaaactggacggatatttctcgccgggcggctttggcgaagaagaccgcctgtggccgaaaggcgagagcgctttcagcggttatcagttgctgctggagtatttcaccttccgcgaaaaatttatgttcgtggagcttaatggcctggaaaaactaacgctcccggcgaggacggcgtatttcgatatcgaggtggtgttcagtcaggtgtggcagagcgatttgccggtgacggacagcaccctgcgcctgcactgcgtgccggtgattaacctgtttacccttgaagccgacccgctaaccattagcgggctggagagcgagtacctgctgcgcccgaaacgcgtacaggacgggcacaccgagatttactccgtcgacagcgtcaccggctccgggcggatcggggatgcgcgctacgtgccgttcaccagttttcgccatcatggcgggatgatgcgccgccacgcgccggagcgctattaccacacccgcgtgaagcggggtgtcaccgggatgcacgatacctggctgatattgggcggtcagtaccaggaggctgaccgggaaattgtgcgggaaaccgtatcgctgcgcatcaccggcaccaacggccagctgccgcgacgggcgctgcagagcacgctgctggaccgctgcgagcaggtcacggagacgccgctcaccgtccgcaatctgtgtaagccgacgctgccggcgtacccgccggcggaggaccgctttcactggcgggtgatgagccatcttggcacccgctttctgaatatgatgagcagcgcggaggtgctgcgcggctcgttgtcgctctataactggcgggaggatgagctgaacaaccgccgtctggacgccattctggacgtcaatcatcaccgtattcagcgattcgaagagggttttctgctgcgcgggctggatattgaagtgacgctcgacagcagcggctttactggtgaaggcgatgtccacctgtttggcgaaatgctgaaccgctttttcgccctctatgccgatatgaaccagtttaaccagctcacgctgattgttcagccagaagggaaatgtatccggtggaaagagaatcacaatccgcgcctgcccggctga

SEQ ID NO: 208674 - DNA, 1056 bp, Klebsiella oxytoca
atggcgcaactgaggcgccaggcgccgttcatcaacttttatcgtttctgccagctgctggagcagagtcagccggataaaccggttcccggaagccactggcaggtccggcatgaaccggtacgttttcgtccgcatccgggaatgggctttccggcgggtgaaatccgcgggatggaagagccggacccggaacatccacatctgccgccgtcggtgcgggtcacctttatggggctgtacggcgtggcgtcgccgctgcccacgcactatctcgacgatatcgcgcagcgccgtgaaggacatgaagcggcgcaggattttctcgatatcttcaaccaccggctgattactcagttttaccgcatctggcgcaaatactcgtacccggcaacatttgccgcgggcgggacggacaacacctcgcagtatctgctggggctggcggggttgggaatacccggctgtgccggaaataccgcgacacccttgtcccgtttcctggcgctgctgccggtgatgctgttgccggggcgcacggctgaggggatggatgctctggtcaggctgctggcgacggatacccgggcgacggtatatcatcatgaccacggccgtatcccgctgaaacagccagttaccatgaatacgcagcggccggtcagcctgaaacaccgtcctgtgatgggaacgcacggaacggatgttaacggccaggtgttgctgcgactgagcaccgacaaccctgatgaagtccgcgactggctgcccggcggcgggctgcaccgcgacctgatggccctgctgcacgtttatctgggcgcacacctggatgtccggttgcagctgtgcgtggcgagacatctgctgccggatgcgcaactggcgtgcagcgagaggcatgccgtgcagctcgggcgcacggcggtgctgcgaccgcttaatccgcagcaggacagaaacgacattatcaccattcatacgggccgttatcagcgcgtccgggaaaacattcaccgaagggagagcgatgaagatggcgactaccgctggtaa

SEQ ID NO: 208675 - DNA, 537 bp, Klebsiella oxytoca
atggcgactaccgctggtaacaccaccgccacgctgctggcattcatactggccacggccttaaccggctgcggcctgacgcagaccgtgaaagacggaacggtctcagtgacgaaggccattttttacaaacaggtcaaaaccctgcatctggatattcaggcccgcgagggggtgaataacaatgcgaaagggacatcgctggcgacagtggtgcgtatctaccagcttaaagaccgtaaggctttcgacagtaccgattacccgtcgctgtttgctgacgacagccaggctattaacgctgacctgctggcggagaaagatattcgtctacgtccgggtgaatcggtgtcgctggatatgccgatggaagaggcggcgcagtttgtggcggtggcggggatgtttatggcgccggaccaggtcaatgacacctggcgtattaccctgagccgtaatgaccttgacccggataaagcccgtgttatcgaagtcagcaataaccggctgacgctgaaacagcttaaggaagattaa

SEQ ID NO: 208676 - DNA, 645 bp, Klebsiella oxytoca
atgagtcaatcatcccgctaccgtaaccaccggtcaccatggacactccgcgaactggtttttgtggaaaaacattatggcagcatggcgactgcggcgattgccgaccagctcgggcgcacgcccacatccgtcagggcggcggcgcgttcgatgggctgttcatccgggaacaaaacttatggtccatggaccgatgaagaaaaagagattgtccgcacccattatgcaaaagggtcggcacaggtaatggcgctcctgccgggccgcacccgacagacgatccagtggatggcgaacaagctgggtgtgacgagcgccagaagctggagccgggaagaagagcgtattctggcgacgtattatccggaacagggtgttgcggttgcagactgtctgccggggcgcacggcagaagcggtgaaattaaaggcctgcgatatgggcatcagatatctgggaggtgagagcgccgggcaacgaatgtggagtgaggaggagcagagactccttatcagaaatgaccatctaatatttccggaactgctgaaactgttcccacaccggagccggttgtcggtaaagacggcgagggagcggctgagaagaaaaaagaaaatggctgttcagcgttcgtcacgctga

SEQ ID NO: 208677 - DNA, 1029 bp, Klebsiella oxytoca
atgaaaaaaatactcacttttattagcttatttttcttaagcgtaccagtgatggctacgtgcgactatagcgatactggtaatggtgcttcggtaggattatcaattacatccaaaatattatctgacacgactttacctgcaggcactgtgctggctgccaaaagtgttggcggccaggttacaaatacaaaaactttctctaactgtggaataaatgatatctatgcgattatcgcttcccccagcacaactctggttactggcgttaaaggtgtgttaggcggtcctgtttatgagacagggattccgggtattggttttgagatatcagaagcaattacaggtaccgtttcacgccctgttccagcaactctaggtagcgtatctgcctatggtcttagttcttccccaatcaagcagattagtgtttggctaattaaaactaatgaagccattgatactagttctaccggcactcataatatttcagtatcatacagagctggaactgtgaatcaggtaaacagtaattcaaccgcagcccgtttgttacgcgttgatataaccttaggtccttttacattcaaagaaacctcatgcgatataaccccgagaggaggtaacactattaatctatcaagcattgaggccagccaacttaagtcagcagtacaaggtggagtaacaggcaagcaaaaagagtttacgcttgatatatcttgcccaacttcgtcgattggtactaaatacaattattggtttaatgctattacggagaactcgcctaccaaagatggagtactacttaacaacatcagcactgcaacgggtggagctaaagatgttggttttataataaaacaaggaaattcggcaattaaattttttgacttcaatagttacgtaataaataacattcaaaaaagtcaatctctaaactttacagctgactactacaaggtttccaactccttaacacctggaccagttcaagccatgttcgaaatcgtgcttcaggaaaattaa

SEQ ID NO: 208678 - DNA, 345 bp, Klebsiella oxytoca
atgaaacaattaactgtatttgaaatggaaactatctctggcggcacgttcagttcgattaacgatgccattacttttgctgcacaagaagttggtgcaatcgcacttggggcttcacttggcgccatgtatggttcaatcgtcggtggccgctggggtggcgctggcggtggattgttaggctttggcgcaatcggacagggtgttggaatggtctggggattagttgtgggtggaattggctggggtattgcggctggtattgttggctgggatactacctggcagtatgcaacccaggctattgaatccacccttaatggcacactggccccgtggaactaa

SEQ ID NO: 208679 - DNA, 864 bp, Klebsiella oxytoca
atgcaaggaacatttattggttttaataccgcagggataaaatatgaagacagttttttagctttaatgcttaaaactaaacagcaaaaccagctctgccagacttattatctccaggcccaggtgcttactgacttgcttctggtactgcaaaacagaatgatgatcgtactgcagcgcttaaagaatgaaggtgaagactatcaggctgagctggttgcgtttaatgagcaacttctcgccaatacgccaacggtggatatgactgaactggagcaacccaatccagaacgccgcgtgatgtccattaccttaaagcccggcgagagctggtcaacgctgattctggtgctgcaaaacgaacaaatcgcctcgctgcgcattgacgacatgcaagttgaagcgctgctgattggaattcaacaagcgttaaaaaacaccggcgatgatgcagtaattgagtatttaggctcatcgctggattttctgatgctgtatgccgtggatttaactaatacccagagcgtcgattaccaacaatatcttcaggatgagtggaagctaaatctattttcccactatctgggcgtactattttgttgtgatacagataaaggtaagaagattgtctctggtgccgtcattaaaaccagcgttccgcatccatcagaacatgaaaatagcatcgtgatgcgcttagtcgagagaagtccaaaactaaaagaaattcatgcacaacatcaacccagccaaatagttagccaaatcattccttctcaaccggggaaaatgatgacgctggaagagtgtttacgccctttgcatgccttctaccttgaaaccaaggcacaaatcaacgcttag

SEQ ID NO: 208680 - DNA, 1287 bp, Klebsiella oxytoca
atgaatcgtcgtttttttttaagtaaagctattgcatttagtgcggcgcttccattatcaaagttttcaatgagtaacggaagatatataaagggttgcgaaactgataaagcgtgcgctataaacattgaagattatggatgccgggctcatagggatgataatgaatattttgataatagaataattctgcagaatataattgatacatgtgcgatattaagtattaaaagaagttctcgtatgataatttacattcccaaaggtacatattatttatcagcaacttcttcaaattcaggaaataaaaatatcgtgggagcattttgtctgttaatgcaaagtaatttaatattgaaaggtgaagggactttaaaattattaccaaatcaatatgggataggtgcctattttagaattttagcgagtgagaataaaatagaaaattgtgacatcgtcgatataactttagatggtaactcttcttctcaaatagatggaattcaatcaagtaatattcttttggaatgtaaggctaatatcaatattagaaatgttcgaagtataaatgcaaacggcaatggtatcttaattaaggggggcgtgcggcaagatcaacccgtattaaatgtgagtattagcgattgttttgttaataactgtaagaaaataggtattcaagttagtcaatttagcggtcttaagatctttaataatacagtttcacattgtaatgacaatggtatagatatttatggtgatctaggtagagactcccctaacaagacaaatggcaatcactttgcagtatttaataataaggtttctttttgccttaatggtattttccctgagactgtttcaaatggtaaaatatatgataatattttagaaaaccttaaagagtcaggtgtccatgttaaccgaatccatggtttaccccaaaatatttcaattgagcggaatcaaatatcaaacgcttcgtcaggtatgtattttactggtgacatgaagaatatttttgttgagaataataaaatttctgaaatcactgatgctttcttttcttttggtggtggtagaggtaatgcttccggaattcaagttatcaataatgatatttttcttaatgaaagtaataatgtattgtcttcattttctggcgaaaaaattcataatatctatattgcccttaacggcattcagccaaaagatgataattcaaaacttctattaaatcgtaataaagcacgggttattgataagaacaccgtaattgtaaagtaa

SEQ ID NO: 208681 - DNA, 855 bp, Klebsiella oxytoca
atgaaaaacattgacgtcatccttggtaaagaccatttagaagatatttcttctgcaaaaccaattccagcaattaaagaaataatatggaatgcatttgattccaaatcgttaatagttaaagttctgtttcaggaatgtcagaatacaaataccattaacaaaataatcattcaggatgaaggagaaggcattccccataataatgtctcatcattatttggcagtcttggtgaatcttggaaaaaggatgcaaaaaaaaatggggatcgttctttacatggtcagttcggtaaaggccgttttaaagcattttctctaggagaggtagtaatatggtctacttgcgtagaagataatggggaatattataaatattccattaaagggaatgctaataatattaaacgtttcgaaatcagtgagccttctgaaacgaatgatataacaaaaggtactcaggttgagatctttaatttagtaaaacaagcatcctcacttgcaacagattcatctaaagaatcaatcaccaaagagtatgcgttatatctaacagaataccctcataaaaaattattttatgataacgcatatattactccttcggatgtatggcttgacaaaaaggagtataatctcggagacgttgagatagaatctggccaagaaaatgtgtctgtttcaataatagaatggaaatttaagacgcctcgagaaattcattactgtgacgaaaatggcttttcacttttcaatgaaagcgcaggaaaacttgttagatcatatggtgtggatttcacagtatatataaagtccccattcattaagaagaaatttgaagaaaatgttctttag

SEQ ID NO: 208682 - DNA, 747 bp, Klebsiella oxytoca; identical to SEQ ID NO: 54416

SEQ ID NO: 208683 - DNA, 603 bp, Klebsiella oxytoca; identical to SEQ ID NO: 54415

SEQ ID NO: 208684 - DNA, 471 bp, Klebsiella oxytoca; identical to SEQ ID NO: 54414

SEQ ID NO: 208685 - DNA, 1014 bp, Klebsiella oxytoca; identical to SEQ ID NO: 54411

SEQ ID NO: 208686 - DNA, 399 bp, Klebsiella oxytoca
atgctggtgaagatgcgcgacgcgacggccacgtcggcgatggagggcttcagtgcagcgcttaatcggatgccgttggcggtgcgcaagagcatgacttacgaccagggccgggagatggccaagcacgccgagatcacgcaaaacactggtgtagccatttacttctgcgacccgcatagcccttggcagcgaggcagtaacgagaacatcaacggcttgattcgccagttcctgcccaagggcacagatctgtcggtacacagccaggagcagctggatgagatcgcttacctgatgaacattcgcccgcgcaaacgcttcaactggaagtgcccgattgaagtcatgacagaggtggtaggaatgcatcatgctgcgcctgcttcaattcaataa

SEQ ID NO: 208687 - DNA, 1167 bp, Klebsiella oxytoca
gtgagcaaccagtttggggatatcgtggcgttttttgaacaacacggtagagccccccaaaactcgacctgtgccgatatgcccgagaagcgtcttgcaaggcgcttgcaggcgatacgcacggatccaaagcaatgcagtgccctttcaggtcaggatatccatggtctgctggtaggcatagaagtagtggggatggttgccgaggagcatgagcaatatcctgccaggggagtagctcttgagactgttaatgcacccaccgttgatacgtcggagctggtgacctcgctggacgatatttttgccgatgatgacctcgggttattggattttgatgctcccgatatattcagcatgcagcatgtgcctagggaaaaaaaggcgttacctgacgagatagcccagcgccagccctgtccagatttcgctcgttttgcgccgctgtttgagaccgtgaaaacgggcctgcaaggccaagagttctccctcgtgcgctatcgaaacgagcatggttttcaggttggggatttcttcatcctgaatggggtgatgggttatgtgcatagtgctggggaacgattggaacagtacgagaggtataacgcacgacttcacctggtttttgataatggcactgagctgcatatgctctaccagtcactaacccaggggcttattcgtgacaaggagggccgtaaggtcatgctaggtgacaaactcctcttgccaaattacgcgcccattccaagcggctttgtctatgtgctcgcgacaaagagcacggaccctatattgatgcccttcatgcaaaatctctacaagataggtttcaccgagggtaccgtcgaagaccggataaagcacgccgagaaagacaagacgttcctgcaagccccggttaggatcatcacgacattccagtgtttcaacatgaacacccacaaattggagaccttggtgcacggttttctcgccaagcagcgcctcgatatcaccttgaagggggttgatggcaccagctatgccccgagagagtggttccatactccattgacaaccatccttgaagttattcaccacattttggatggaacaatctcgcagtaccgcatggacaatactaccggtaaggttgttgcaaaaaaaacgaccaataatgcgtaa

SEQ ID NO: 208688 - DNA, 1614 bp, Klebsiella oxytoca
atggccgcacccgctatctcgatccgtaacctcgatcaccttggtttggtcgccgcactctgccaggaactgggcattgcccgcatgatcgatgccttgctccccaaaaccccgcctttcaaggtctcacatggtgaagccttggtcgccatgatagtgaacggcctcggctttcacagcagcaccctgcacatgttcccgcaattcttcgctaacaagccggttgagcgcctgattggccccgggatctgtgctgatgacctcaatgatgatgtgctcggtcgctgtctcgatgccctctttgaggccgatgtcagcgccttgtatcaggtgatggcggcgcaagttgtcgagcggctggggctcaaaagcaccgcagtgcacctcgatattaccagcttccacgtcgatggcgcctatgactgtgccgatggggatctggtcggtaagctgcaactggtgcgtggttatagtcgtgatcaccggccagagctgaatcaagtgatccttgagctcatctgtgaaaatcaggccggcctacctgtctatatgcaggccctgagcggcaatagtaatgacaccaaagcctttgcccagaccgttcgtcgccatttgagcagtctcaaggccgcgcaggagtgccgttatctggtcggcgatgccgcactgtactgcgccgataccttgcaattactggcgcaacagcagcaactatttgtgacccgggtgcccgtcactctcaatgaggcaaagcaggccgtggcaaccataggtgcacaaccgctgaccgctctgggcaatggctatcatggccgttggcaacacgcgaattatgccggggtcgcgcaacgttggttgctggtgcgcagcgaacaggccagccaccgcgagcagcagacattggccaaaaacctgctcaaagacagtacccgcgagctcaaagccttcgccaaattgtgtgcccgacgctttgcttgtgaggcggatgcccaagctgagttgagctgttttaccgccagcttgatgctgctgcaactggatgccgaagtggtaggtgaacccgtttatacaggacgtggcagacccaagcgtggcgaagagccaattggccatcagtttcaaatcactgggttggcggcaactagcctggcttgcgttgaagaggcccgcaaccagaccggggtgttcatcctggcgaccaatgaccacagcgatacgctgaccatggccgaactgttggccacctataaagcgcagcagaatgtcgaacggggctttcgttttctcaagagcccggagtttttaacctcctcactgtacctgaaaaagccggagcggattgaagcgttgctcatggtgatgacctgtagcctgatgatttacgcagcgttggagcaccggatccggcagggattagtggagcagaatcgcagtgtggcggatatgaaaaagaaaccgacccagcagccgacggcccgttggatctttttgcgctttggtggcatccatgaatatcgactgggagaagctccgccacaagtaacggagctaacaggagaccagcagatcattttggaggtattgggtgagcgctatcggcaaatttattcctaa

SEQ ID NO: 208689 - DNA, 276 bp, Klebsiella oxytoca
ttgatctgggctagtttgctggccttgctggtcaaacgtcggctggcgctgacgctgattggcagcgcggagttatcgatgctgaagattgccaaaaacagcgcgctttggttaatgccgatattggcgagcatcatccatggtgcgtggcaggaaataacagagaagttggagtgggcaatggtgtatttatccaaaaacggcaaaaagagtaggcagagaaaatccaagcaaaacaacacgttagacggtattattaattcgcttgccgcttaa

SEQ ID NO: 208690 - DNA, 594 bp, Klebsiella oxytoca
atgaatgaagctcaagtattcaagcaagaagatttcttaggtgagatttttgaaaatgaagcgaaagcgttactaagcgatattatgtcatcgacttccttagtatctcttatgtatgcatttgaggaagaacaagtacataaggccattgaatacattgttggaatatttaatgagtgctacaaattcggtcatcttaaagttgccacatcaagctccgaactgacgctttgtgggtatgcaatgatttttgttcatccacatcatcaatcggcatatctccataaaatacagatttttgagcagtttagagggcgtgggctagggactgaaatgttgcagtcgcttagtcaatcatttagcgatttggggctaatttgtaataacgataaaatcaaattttatgaacgtaacggatttaagtgcgttggcgattataaagtgccagacagtgacgattttaaaatgtccaaacatatgtatacaggtctctacttgatgtcaaactctcaaaaagttgatggctgccctgtgttctttttaaatgatgccgacttaagggctattggcagcatttcagaatcactttcttag

SEQ ID NO: 208691 - DNA, 519 bp, Klebsiella oxytoca
atgagcgcggattttaagcatggttcggaggggtatccctgcggccaatgttgcggtagcaagggggaattgagcacgggggggtgcgagctctgtgaaggggaaggggggttcgctgatgcaaaggtgatggttacccgcgtgatcagctacgccaaagataaccgactgccggtgatcgctgccttgtcgtcttttgcctttcgcagcattgccacgaagggccatgaaccgcgtgagctatttaagctcagccaggagctcaatgccccccgtaacctgatgaggtatgggtgggatgcctgggagatctatgcgcgacatgaaggcgtgatacccgaactggctgatctggggcgtagcgtcatgcgcgaatggtataaccactcctgggaacatttcgaggatgaggtcggctttgacgcggccgagcatatgatcgctcaagctaaggcggaaccagataaaacagaggctcgctgggcttacctgctcagtgaagagtggatggtggcgtag

SEQ ID NO: 208692 - DNA, 441 bp, Klebsiella oxytoca
atgatggctggaatccgccctcagtcgatattgatgttatgtgcctatgctgccacgccactctggctggtgtggatttttggtcacctctacatgcaggacttaaccttgaggcaattctacggggagggggattatgtacgctctccagcagatcatatggtgatgggcaacagcgtaggcgtccactacctcaaggaactgagggccaaacaaggcgacgacatgcagtatcaatgtctcggagtaacaaatgccgacggcaccaagccaagtttgtcgtttcaagtcaaaggtgagcctgtatgctgctcgttggcaaaagatcagtggagcatccccttcaaaactattggtgacagcctccacctgctatgcggaaaatggcccgacgagaatgaaattgtgatgactcccatacctgaaaggatgaatagatga

SEQ ID NO: 208693 - DNA, 312 bp, Klebsiella oxytoca
atgagtacggatgataaaaacagaaagccaagaacagaaaaaacaattaagcaaaaaatagcatcagcgcagatgcgtttgaatcgtctcaaaaccaaagagaaatctttgtccaagagtgctgagacacgcctgaagataatccttggggcagaagtagctaaagcttttggctgtaaagtagaagacgtcgataaggagtttgtgttgggtatattaatacattttcaaaatgttggtgctgaggataaggcaaggctgaaattacgcggtaaaaggtttcttgaggatatggttggtagacaggaataa

SEQ ID NO: 208694 - DNA, 1518 bp, Klebsiella oxytoca
atgaggttgtttttttattgtatggctatttttcatcttgattttaaaattgtgaaacgttctgaaggcaagtcttccgttgcgaaagctgcctatcatgctcgcacacgtataacagatgaaagaacaggtgatacgtatgactacagccgccgcactgatttatacggacattttatattagcacctgttaatgctccagaacatattgttaaagattctacagcattgtggaatgaagttgagagggtcgagcgccagcaaaatggtcaaacagcccgttatttcgatgtttccattcctaccgagttaaataatgatgaaaagaaaaaacttgtccttgagtattgtcagaaaaatttcgttgataaaggcatgattgctgatatctctttccatgatctcgatagcgacaacccacatgctcacgttatgttgacgttaaaaaccataggcccggaaggttttggcaaaaaggaaagaagctggaacgacagaaaaatgtctgtattgtggcgtgaatcatgggcatcaatggctaacagctaccttgctgccgctggttcatcagaacgtattgatcatcgttctcttcaggcccagcacgaggaagcgttagaaaaagcagcagtagctttagacaatgaagaacaagcgctatggcttgctaaagccgctgaaacaaatcgtcctgcaatgaaacgtatccacagcgctaaatggcgtagtaaggctgctcaggagcaaagagccgcagaacaagctgttcgtgatactaccaagcaagaagccgttgaagtctacaaagcattcagagaacttgatcttgaaattgttgttgatgtcaggagctttacgatcactcatattgctgaaccagaagaaattgtattacctgaatcccgtaccagttcatcgaacgctgaagatctgaaacctgttcttgtcgctccggctcctcgtacaaaagccagaggcgttaaatcctatcgtgataaaacaaaaatcagcaaggttgttgctggtaagaaaccatcggttagtatttctgatattgaagcagatactaatttgaaaatatcctcttctcaaaaactaaacaggacatccagaagcgcctctgaacgtgttaaaaggaaacagactactccacgtcaggataatatctttaaacgctttacagctcttttagttgattttatcagggacaaattcatatgggctaaaacaagcaaaactgaaattgatattatcagtgaagaacatgataaacgtattactgaaaactatgtctatgataatgtattaggccattatattcctcgcactgaatatgagaaacaagcaaagtttaatcaagatgattacaagcctacaccggatgagatcagtcgtttcccaagtcgccctaaaactggactacctgaacgtgatcacaatatggacctcacgccaacccccctacctgaacatgcaagaaggagtcgctatccgaagttcaggccgccgggaaagtaa

SEQ ID NO: 208695 - DNA, 408 bp, Klebsiella oxytoca
atgacacaagaaaaattaatagatactttagagaaaattgcagtacaacactggaatacaaacaaacaaccagttttgttgagtaatctacctccacttttaatgaagaatttacccgattataaagatattctttcaggccgttctttaaaaaaattcattaaagaatcagagggcaaatataaacttgttgaacatccatatcaaagggcaaaagtagcacttctccctaaggatgaatcatataaattccctgagtcagatgaaaaacatgagcaatcagcaatcatcgaccgcaatgctgaaaaagcattaattgaatttctaaaggcccttaaaaaactacctgaaaaagatcaggaaaaagttcaaattcctgtttcaattctcgttaaaatgattaaataa

SEQ ID NO: 208696 - DNA, 837 bp, Klebsiella oxytoca
atgagagtttatgtcggccttatatcttcagacattgatctgattaaagaatttaatgctgtcaaagaatcccttatccccaaggcaataagggataaattaccaaaaaaatgtgattttaaatttgatgcatttaatccactgacttcaagcgggaaatacactgttgactcacacatattgcaagaaattaatgggttcgactatgctacctgtcttataactgaagagatagaacactattgtgagaatattcgctatgccatcctaagcacaagtattaatccttctgaagttaagaatggaaacattcataatttcttttccagtcgtttagctaaactgtttaaatcggtcatatttacgatggagaaaatgaactcgtcagacattgaacaagcaatgcgcctccctggaagaaacttcaatgctccagaactggcagagctatgccgcctttaccgagatgatgttcttgaatcacactttcataatagcgtgaaacaacaaattttcgcgataggaaagcgaaaaaaaccaagaagaaaatcaagttataatacaaaatattttatagatgatgataaaaagcattttgctttcgggaaagaagaacatgccgtactgcctacaggtgaaccgcatcagcctcactgcgttgtaaatgggagcttcaggtttggaagaaaaatatctacagaccatcactataacgtcagcaagggagacggtgataaaacctatatttcagggcaattcccaaattgccataatgatataatcacagcagaaaatgggaaaagtcatctaaacatgtttactaatgatcatttttaa

SEQ ID NO: 208697 - DNA, 789 bp, Klebsiella oxytoca
atgtcaaacagttaccttgaagccgctggtagtaaagaacgtatcgatcaccgttctctcaggtcgcaatgtgctgatgctcttaaccaagcagaagaagcattcagcgctgaagagaaaacattctggcttgccaaggcaacagaaacaaaccgcccggcaatgcagcgtgttcatcgtgccaagtggaatgacactgagtcacaggaacagcgagctgctgaacaagcccaacgcaatcttcaaattgaggaagctaaaaaggtctatacaacctttagtgagctaccattggagatcgctgttgatgtcagaagctttacgattacacatcttgctgaacccgaagagatcgttcttcccgactacccggcaacggaaaaacagcagcctgtttttacaacatctaaaccacacagaaggccagccgtaaaatcttaccgtgatccaaacaagataagtaaggttggtatggcaggagaagaaactcccgttctggttgctcctaaaccgaataaatccactaaactgaaaacaccttcttctcaaaacaccagagcgatgaaccgcgctcccatgaacagtaggaaacagactaagccacatcaaaatggtctgtttaagcgtttcacactacttgtgatgggcttctttaaagagagatttatatgggccagaaggcaaccagacactactgacgctgaccatgataagcgtatcgcagaaaactattcctttgatgagttgtggggatctacgttcaacgctctgagcatgaaaaacgagtaa

SEQ ID NO: 208698 - DNA, 960 bp, Klebsiella oxytoca
atgaagattgaaaggtgtggtgatattcctcagggggaacctaagtggatggttgtcggttttggggaaacacctgacaaagcagaaaactacattggtataaaatttaatttagggatcagggcgcaaaaacacttaggtaaaattatagaagagatactttacaacccggaatatatggctcaaagtgttctggaggacattttatcaaaagaagatgaattaggtaaaaaattattaataatactagaggaattaaatttaccgagcaagtcagataatcttttcttaagagatattgagttttattctcacaaagaatctaagcatattttcaatttcacaaatgacttatatgatagaacgtcagtaaatatcacgacagatatagatctaaatcctttagacgtaaaacaaacaacccgaggtgataaatatcacattgagtggttccatgatttcaaattctatgatttaaggtattttaaagatatagattatctaaatgaacttaaggaaagtgttctttgggtcgaaggaattataaataaaaaagccccaagattgaatgagtatatcaaagtatttgaagcatatgaaaatacaatacccggcactataaatgaagagcaggttaaaatatcaattgctcatattgaacttgaaggactaaggatcgtatatcaagcattcaaggataggaatgacaatctcaatgaaaagataaaaaatattattaaaggtgtggcttttaaatataagcaggatgttataaatgatgataaatgtagagagttcttgtatgagttaaaggtggctgcatactttttactttctggtaataacataagtgtatctcagcgagctgatgtggttattaatgatgatacgttcgttgaatgtaagaaaataacatcagaaaataaattgataacaagaatagatgaggctttaaaataa

SEQ ID NO: 208699 - DNA, 552 bp, Klebsiella oxytoca
atgaagaagattttactcgttgctggcgcagctctggcactggcgggatgcggtgaaaaaggcgactttgagaaagcgataaacgcgaaaatatcacaatcaaagctgtgctactcactacaggacaatgacattgtgttcaataaaggtttccccatccgggttaatcacggctatcgttctgctggatacagtgccagtgatgaaatcttaaaaggtctggctaatcagggactgcttgatgtttctcaacaagctaatggtttcagtagtgtcgatgttctggaagtaacagacaaaggccaagagattgagttttgggatcgcaaagatggtgcctgtgtgggacatcgtaccgttgataagattacagaatggacagaagccggtgaagatggaatgaagattgttcgcgtatcttatacgtggaaactggctaacgttccttcgtggctggaaaaaagcgcgttcgctggcgttaaagggatgaatgaacccgctgatggtgccatgaatcttgttaagaccagcaatggctgggaagctaactaa

SEQ ID NO: 208700 - DNA, 252 bp, Klebsiella oxytoca
atggctataattattgacataaatatcattgtcattttcaagagtgagttttattccatgttcagtaccttctactttgtttacaatacagatcataaatggtgttttctcatggggatgaaagagtgttatcattttaatatttttcatttgattttttctttttttatttattactatttaatactacatcgcgatcgtgaaaatcaaatttatttatgttttaaccatgatttttcctcttatttttaa

SEQ ID NO: 208701 - DNA, 1227 bp, Klebsiella oxytoca
atgaaattaaaaaacagtgctttttattttgataaagttgattctttatctaagtttattaacttttcaacgtttataatttcatgcctgtcgatcgctggaattttcttgaatgctcattggctctacggcattgctaccgtaacttttgtaatacaacttatcacttgggtcgcaatgtattatagaactgatttttcagcaaaagctatcgcaacaaaaagattagaaatgttgaggggaattataggcgaggataacttttatcgtgaaaggctttatatagatggagatgcagaagataataataataataataactatgagaaattaactctcctcatacaagaaaacgcatactggaactctattttatatatcaaaattttccattataagctatgttatcttttggtaactatattgtcactaatattgattattattataatgtatgcatcagtgactgatggcttagattttcaatacagtagaacaatttttggtatattagtcataaataatttatataatttattctcagaagtgtctggttcgcttagggctcatcatgagatgaaaaaaatagatgacttcatagaaatgaataaacaaaaatctccaaggtatctatcttatatttattcaaaatacgagcatgaaatattcatagcgcctagtattaataaaggaatctatttaaaaaacaatgaacgcataaagcgttcatggaacctgcgaatttataacaaaaataacttccaagacgaaacatttatcgatgcagttacaggactaacatcgttactacaatccattacagatgagtggaatattactgggggggcaaatagatatttacgtggtgtccaaacctatgccaatgacattgatataatcacaacagaaaaaggagccaatgaaatatgcaaattaatcagtcaagatttcaatgggaatttatataaaacaacatcaggaaacataaaatcattttattttacctttatatacaaaggtattgccattgaaataatgggcgacccagaaaataaagatgaattaggatggtgtgaaaataataaatggaaaaaaaaccaagaacacatcttattaaatggcattaaagtaccttgtgtaagcttggtttatgaaattgaaataaataaacaaattggtaattataatgcattcagagatactgatcttatggatttttatagataa

SEQ ID NO: 208702 - DNA, 252 bp, Klebsiella oxytoca
atgtcgcagcccggaaatgcagtaacttcctcatcgaaagaaaagcgtcagtacagaaaagggaatccattgacccttgctgaacgccaacaggcatcattagcaagaaaaaaagatacccataaagagttaagggtgtttctaccaatagttttgaaagagcatcttcaagacatgtgtgaagcagagggtatgactcaggctgaaatgattgcaaaattgattgaacaagagagaattgataagcagtaa

SEQ ID NO: 208703 - DNA, 240 bp, Klebsiella oxytoca
atgagcggcatcctgttatctcagttaactaaagatattcctgcatctcctcttatttccgttaaggagctcgccatccttctcggacgaaagcctcagactatcaggaagtggctttgccaagattcattgcctgaaggtctaccaagaccaagaaagttaaataacaaaaactgctggctaagaaccgatattgaatccttcattgcggcgatgttttcaagtaacagtaacttctga

SEQ ID NO: 208704 - DNA, 258 bp, Klebsiella oxytoca
ttgctgtacaccacgaattggtgcccgttctgccgccgagcgaaggcgctcctcaaggaaaagggcgtgcgatggaaggagctcgatattgaggcggatccggctcaccggcaggccatggcggaagcgtcggggcgaagctccgtgccgcagatcttcatcaatggcacccttatcggtggctccgatgagctattcgcgctcgatgtcagaggcgagctcgacaaacttctcgggcgcaacccgcctgccacctga

SEQ ID NO: 208705 - DNA, 282 bp, Klebsiella oxytoca; identical to SEQ ID NO: 160018

SEQ ID NO: 208706 - DNA, 267 bp, Klebsiella oxytoca; identical to SEQ ID NO: 160019

SEQ ID NO: 208707 - DNA, 375 bp, Klebsiella oxytoca; identical to SEQ ID NO: 54418

SEQ ID NO: 208708 - DNA, 1272 bp, Klebsiella oxytoca; identical to SEQ ID NO: 160021

SEQ ID NO: 208709 - DNA, 519 bp, Klebsiella oxytoca; identical to SEQ ID NO: 160022

SEQ ID NO: 208710 - DNA, 846 bp, Klebsiella oxytoca
atggatcgtttgtctaatttgctctcgcggttcggcgtgcgggccaatctgttctatgacggcgacctatgcggctctgcatcttacgatggcgccgagcggcgaggttatatccatctgcttcaggccggcagcgtgacgttgcttggtcccgatcgcaaggatttgcagctcactcgccctagcttgatttttatgccacgccccgccaagcatcaattgtttgcgggtgagtccgatggcgcaaagttgttgtgtgcttccatggagtttgagggcggaattgataatcctttgtcggcttcattaccggactgtttggtgctcgcactcgatgatctgcccatgctggcagacacgttggagtggatgtttgccgaggcggcaaatgtgcattgtggaagggaagccgcgcttgagcgcttatttgagctcctaatcattctgttgctccgttacctgctcgatcatcaccagttgcgcaccggaatgatggctggactggccgacatgcggcttgcccgatcgcttttacagatgcacaactccccggaacatgcctggtcaatagcagagctggccagtgagtcaaatatgtcacgcgctgcgtatgccgtgcatttcaagagagtcatcggacagacgcctgctgattatttgttgagttggcgagttagcctggctcagaagctgatgcgagaagggcgctcgattacgctgattgcagctcaagtcggctacgaaagtccttcggcgctgtctcgcgcatttagacgcaagacggggttgagccctcgtgactggttgaaagatctggcgggggaaaatgatggcaaaaaggcctaa

SEQ ID NO: 208711 - DNA, 282 bp, Klebsiella oxytoca
atgagccaattcaattctttggaaatgtgcgcaggggcagggggccaggcgctcggcctggaaatggctggcttcgatcatgcggccctggtcgaactggaaccggcagcatgtgcaacgctgcggctcaaccgcccggcctggaacgtcattgaggaagacttacgccgcttcgatggccgcccctaccagggcattgacctggtggccggcggcgtgccgtgcccgccgttctccaaggctggaaagcagctcgcccgagttcgacaccaaatgctgtaa

SEQ ID NO: 208712 - DNA, 543 bp, Klebsiella oxytoca
atgttttctgccattttgaatactagcaaaaacagcaatgcagagaaatacaaattcctttctctcagaatatggcgtttagttaccgtaaaaacagaaaatagcaccactccaaaaggatttatcgatggcgtgttaaccagaaatgcatttgacctccgcccaaatgaaaaatcagtatctttttcacgccttgagactgaagagagcataccaaatgactcgttaaaaaacaaaaaactcatggcatgcaagattagaacagcaaataaaatgcaaaatatcttcataagtgaagaatctgcaaacaatgaagatttgagattagatccagaaacaaacgaactgcttaaacacatctctttttcagaaacagaaaatagtaagttttcgaatgatggtataactggttttcattgggacttgttttttatatctaaaaatggcaataagttgcgctctggggatagcgagttgtctgaaaaacacatattagatgcaaaggatttgttgattgaaatgtcattactaccaaattcgtaa

SEQ ID NO: 208713 - DNA, 714 bp, Klebsiella oxytoca
atggacgtgcaaccaacatattacactcaagatgcagagatgcacgaaatcgtgatcaatatcagaaagcctagcactgaaaaaagaggtgaaggtaaaagttctattttttatacaaagacatcatctgtatctaagaccattgaaactaaatcctacactactcatcttaaaccattcattgaaaaaaaagataatgaagaacacttatggcttaaaaatctcgaacaaaaagcaaaattagccgcagaattaatatccaaaggagaaagcaacacagatatcataggagtaattacttcaagtttaaatcaaaataaaacactcgttgaagacttaaagaacgccattgaagctcataaagagtcgatgaaaaatgttagtgacaaaaataatgaaagtgaaataaaaggccctaatataagtttactatctctattcaacgcactcaaattctatcctgtaatatcaacattgccaaaagaaatggtatctcaatacattgatgcagatgcgcacattgttgggatggttattggagacaataataacaagataaatataaactttatgtctacaggagagcttttatttaggcacattgacaaaacaacaggtagagtacgcataagcgggagtgctttttttggaaaagatgaaaacataaaagacatgaaaaaaataaaaaaactcatttccttcgtaaaaatataa

SEQ ID NO: 208714 - DNA, 564 bp, Klebsiella oxytoca; identical to SEQ ID NO: 120976

SEQ ID NO: 208715 - DNA, 564 bp, Klebsiella oxytoca; identical to SEQ ID NO: 95289

SEQ ID NO: 208716 - DNA, 1104 bp, Klebsiella oxytoca; identical to SEQ ID NO: 95288

SEQ ID NO: 208717 - DNA, 795 bp, Klebsiella oxytoca
atgcgcttccacattaccagtgagacaaattcgttagtcacatcgacagttttgtttgtggactcagtcaccgacattgatgaaatccgggacgaaaacagccctgatgaatttgaaaacctgtacatgtgcgagttcgtcaaagacggcgaaagcgcgttcaatcttagccagttactggggtgcggcgctgacgggtatgacgactggcccgactggaaaccgttcgccagtcgccctatgggccaacgtgaggtgtggctgggctacgacgccaacggcagcagcggcaatggtgatgccggtgctctgtccgtgacggtccctccccttgtggctggcggccggtttcgcacggttgaattgaagcaactgcgaggacttgagtttgagcagcaggcggcggtcatcaaagaggcagccgagcgctacaacgtcactcacatcgccattgacgggcaaggcgtcggggaggcggtctggcagattgttaaaaactggttcccggcggctatttgctaccagatgagcctctcttccaagcgcgccctagtcctcaaaatgttgcaggttatacgagccggccgctgggaatatgaccgcagcgagcaaggtctggtcagagccttcaacgctgttcgcaaagttgttacgcccggcggtttcatcacttacgaaactgaccgatcgcgcggcgtaagccatggcgatatggcgtgggcaaccatgctttcgattatcaatgaaccgttgggccaggaaagtggcggcggtggtttcgcaatgggatggtaa

SEQ ID NO: 208718 - DNA, 627 bp, Klebsiella oxytoca
atgtggactaaaaagttccactatgtgtccgttcttgttctttttgcggggtggtatatgtctagcgatgattcaaaaatttctaccgatgccatcggggatgtaaatgaatatcttttatctccgactaaagggggggcgttgaaggtaaccatccctgatgatctaaatgatgacttatcagcctacgcagctggttacaacacatcaaagtctgaagtagtgaggaatagcgtagctagtttcatggggaacgatctacgctggactcatcggcaatactttttccgaccacgtaggaaattagttagttttgaagatcttagaatgtgtactggctttgttcaagtcgcttgttttccaaaagatcttccaaggaatgcctctggagttacagttaagttacttaaatatgagaaaaatttttcgattataacttttgatcttggaaatggtgttgtacctcacccaccctatccgattcaggggggggatatcgatctcggacctggttctttagttatgcccaccgtagaacagagtaccaatatctatacaatgaacattatatattacagaataaacaatgacttaatctggggtgtgtgtccagcgattagtaattga

SEQ ID NO: 208719 - DNA, 468 bp, Klebsiella oxytoca
atgagaaaagcatcactcggttctgaaggaattggtgggctcatcgaaaatttaccgcagatgttacatggtttttctgaacagttgcattcagtgtctatcttaatgtctgcatgtatggagccagtcaccgatgatcatgacctccaagaacgtatggcgattattgatgaattgtattcttgtgcagaagatatcgatcatgtcgctataaaatttgccgatcttgtaaccgatcgagtctatgagtacgagaagaaaaatcgtaacgttcctaacgtcagccccagtgaggcgttgtcttatttcataaaggaacgggggcttcgacaagctgaccttaaatctgttgctagtcagagcatcatatctgaactcatcaatggaaaaagggttatgaacatagatcaggtgaaaggatttgctgcgttttttgatgttcctgtggaaacgtttatggggacataa

SEQ ID NO: 208720 - DNA, 342 bp, Klebsiella oxytoca; identical to SEQ ID NO: 133363

SEQ ID NO: 208721 - DNA, 126 bp, Klebsiella oxytoca
atgatgatggcgggggaagggaaatatcttcccctcactgaccggcgcgggatgaccgtatgcgataaggatgtcaccgtgccggctccgcattcacccggcccggtctccgggccttttgggtga

SEQ ID NO: 208722 - DNA, 360 bp, Klebsiella oxytoca
atgaatttccttatgatcatgatcctatggtggatatcgtcattcatcacacacatgatgaaagttggaaatgtcagagagtacggtcctactaaaagccatttgctgttgatggttactacgcttcctgctggcgttggtgtttttatctatccgatagtagaggtgatatggggagatctgtcgttactgaaagttgctggttatacctttttatccctcattgttggcggacttcttgccaatatcattgttcgcggattatctgcgacaacattcggcattttgctcgtaaatccattagcaatgatatgtagcattgccggactgatagtccttgctatccaacatttaccataa

SEQ ID NO: 208723 - DNA, 501 bp, Klebsiella oxytoca
ttggtatccgcgttggcctgcggaatatccgagtcgctgtcagagtccgagtcgctatcggaatccgagtcgctgtcggagtccgagtcactgtcagagtccgaatcgctgtcagagtcagaatcactgtcggaatcggaatcgctgtcagagtcggaatcactgtcggaatccgagtcactgtcagaatccgagtcactgtcagaatcggagtcgctgtcagaatcggagtcactgtcggaatcagagtcactgtcggagtcagaatcactgtcgctgtccgaatccgagtcgctgtcagagtccgagtcactatcggaatccgagtcactatcggaatccgagtcactgtctgaatccgaatcactgtcggagtcggaatcgctgtcggagtccgaatcactgtcagaatcggagtcgctgtcggagtctgaatcgctgtcagaatcggaatcactgtcagagtccgagtcgctgtcggaatctagactggccccatga

SEQ ID NO: 208724 - DNA, 750 bp, Klebsiella oxytoca
atggcgaatttattagaaaagacgactctacctaatattattaaagcttcacaagttgtttcagatagattaaatttcttaactggattggaacagctattgtttgatgataaaacaaaaaagaaatttttagaaagagatcaattacacaaactcctagaaaatgaagcatggctctttagggaggatttcaatttatcccgtagcgaaaatactctcaatcaagtgctacaatatcatgctgataaaataggtatcacttatgatgcagaacagcctgttgttagagaagatggaaccactggtagggttgatttgctacttagcaaagcgcgtcagccaagagaaggtgagcttgaacacttagttgttgaactgaaaagaccaacacaaaaaatagatttatctgttataaatcaagttgaaagttatgcttatgccgtcagtaatgacagcaggtttgataaacagaatacaaaatggattttcattgccgtatctaacgatatagctcctttagttcaggatagaatttctcaagatgatcgcccttacggacaattgtattctaaaggaaacgtttcaatatggatatatacttggggtgagttaataggacaagcgcgttccagactgatgttttttagtaatttattagacattgatattactcgtgactctgccacaaattatttaaaagagacttacgctaagttcattcctactgaagtcaatgaaccagaagcttag

SEQ ID NO: 208725 - DNA, 297 bp, Klebsiella oxytoca
atgaatatgtttctgaagcagcgtcagggcggccatgctgcgatggccagcgatgtcatcatccggaataacggtcacatcaaccagcgggaaagcgttgctgtagagtgtgcctgccagcgccgggtcgtcaaactcatccagccagcgggtagagtacggatacggactgcgtttaccggtatagaacaggaccggtatcaccagggggagcttcttatggcccgcttccagatggcgctgcatggcggccaccgcgtaacgtatcaggcgaaacgccatatgtttgtcgggtga

SEQ ID NO: 208726 - DNA, 267 bp, Klebsiella oxytoca
atgctcaatgagcacgtgaacgtagccatccccggcggtggttttcaggctgtagaggacgtcgctgaaatactggcggaggtcatcctcaacgaacgagccggattcgagtttcagcgtgctgaggtcacagatggcctgcagttctgccgggagatgcaattccatgaaatcccgggcaatatcgggttgcgtcaggaactgccggaatgtcgcatcgtgaggagtgggtgtgctgtttttcttcttcatcagccctggctctga

SEQ ID NO: 208727 - DNA, 480 bp, Klebsiella oxytoca
ttggcgatcgctaaatattttgtaaatagtccttataatataactttcgttggcgcaattaattcaaatgataaagagtatggtagagcattcttggatttgattaatttacatgaaaatatgacttatctaggtcgggttgatcctggaaaaatgccagatatttatatgaggagtaaaattcatttatctgcaagttggtttgaagttgcttcacttgttgatctagaagcatacgcttatggatgccatgtggtttcttcaattcacggacatacagatagttatttaggtaataaagcaacgtatttgaatccatgtaaactaaatgaaataggcgatcttttaaaaattttaaaagctcgagactctgatctaaaagaacaatattcttttatttctgataatctatcttgggaaaaatcatatcgggcgctattttgttcgcttaatgaattagaatcgctaactaaagcttaa

SEQ ID NO: 208728 - DNA, 714 bp, Klebsiella oxytoca
atgaatctgcttaaccgtaaaggcattgtcgttcgctcccttccccgccacgacgatgccgccctgcgtcagttcaccgcggcgggagtagccacgcttcacgaagcttacgaccgtcagggacttatggccccgcacatcaggcccatacaacagggcatatgccgtgccggaaatgcggtcacagtgctggtcacgcccggcgataactggatgttccacgttgccgtcgagcagtgccgtccgggcgatatcctcgtggtggcccccacctcaccctgcggggatggcttttttggcgacctgctggccacgtcgctacagtcgcgcggcgtcgtgggactggtgggtgatatcggcatccgtgattcgcataccctccgcgagatgggctttgccgtctggtccaggcaggtttacgcccagggcacggtgaaagagacgttgggctcggttaacgtcccgattatctgtgcaggccagttggtgacgccaggggatgtgattgtcgccgacgacgatggcgtggtggtcatcccgcacgcgcttggccgcgaggtgctggcaaaagccgaaacccgaatggcgaacgaagaagcgaaacgagagcggatgaggagcggggaactggggctggatatctacgcgatgcgcccgcgtctcgctgaaaaaggactgcgttattacgacagcgcggaagatgcggagagttaa

SEQ ID NO: 208729 - DNA, 555 bp, Klebsiella oxytoca; identical to SEQ ID NO: 171127

SEQ ID NO: 208730 - DNA, 966 bp, Klebsiella oxytoca; identical to SEQ ID NO: 131552

SEQ ID NO: 208731 - DNA, 423 bp, Klebsiella oxytoca
atgaatccagttaattcgtattacattatagtagaagtatttttaacagacattgatggcaattctccttcacatgatggaattatatattttatcattgatgtagttaatggtatatgtattgatacattttcttcatttgacgatgcggtaaatgagctactaattattttaggaaatgcagaggtagttgaagactttaaagaaaaattgcgagattcaaaatttcaattttactctttatgtgttctaaataattcatctcaacttcagtcacatcatgcattgttagccaaaaatgacattgcaaactcattagtttccagctcaaaacttaataaaaaacatgatgtaaaaaagcttattaataccagcattgagaaacacataattaaatctcaattaaagccttccgttccttaa

SEQ ID NO: 208732 - DNA, 135 bp, Klebsiella oxytoca
atgtgggtaatgatgaagcttaaacgcactggagaagaggtgtttttccagtattacgacagcagggaagcggctgaaatggcggttaagattatgaactccatcgccagcggctgggaattctatatcagataa

SEQ ID NO: 208733 - DNA, 576 bp, Klebsiella oxytoca
atgagggcaattaagaacttttcagagcaaaacttaaaacgcataccggaatttttgaaatatgaccctgagacgggcgaatttagccggataagagtaatcggtcaccgcttcaaggtgggtgatgaggccggaaccgttaataagcaaggttatgtgcgcatcatgatgtttggtatgggatttcaggcgcataggttggcgttttacttcatgactggtgagctgccacctggcgacctagaggttgaccatatcaacggaaatcgctctgacaacaaatggagcaatcttcgcctggttactcatgcggtaaacatgcagaactccagaaaaccaaaacataacaccagtgggcaccctgggattctgcagaacaagaaaacagggaagtgggctgcgcgcatatcagtgagcggacgaatgattcaactgggtgaatttctggataaacaggaggccattaattgctatctggctgcgaagcaaagaatgcacgaaggatatgttggatttgaagggaaagccgcggtgctcgaacaccaacggctttcaggtgcaaaaacgaagaggtaa

SEQ ID NO: 208734 - DNA, 816 bp, Klebsiella oxytoca
atgaccaaatcaaccacaaccagagaagaaagcattcaggccgtatttgatttaaaggttggctatcgtcttgggtttgccgacatagagattctcaagcgagtggcccgcatggcgctggccgcaatggacagcgagtcttggtgtttgcctctcgactacttacagggacacaaagacggcctggagtgggcctcccaactggcagaagccaaccaccatgaaaccggagactggctttacgatgaccctatcgagctggcaaaagctattcgcaaaggtccagatatgccgccagcgcagccggtagcggacagcgagccggtggcgctcacggcaaacattgaacgagatgcccaacgctaccgttttttgcgagaaagagatgcttttggcgatgacggtgagccaggacttgcgagctgggatgaccttattgaactcgacacgaatgattttgacgcagcgatagatgcccgcatggcgcatccaagcgttgatttcctcacgctggacaatgctcttcagaaacatgaacgacgccgctgcaaagacagaaactgcaataagcctatctacggatattcagtcgatggtctgtgcgaggactgccatgcagcggtatctcagcagccagcgccggtagtgccggatgatgtgctgaacgcattgcaggaggttgcccaaatacgcgtagacctgaatggccttgatggagattgccgtggtgtaggtagttgtctttgggaggctgaagagaggttgcttgagatagtagcgcagcgctcagccatgctcagcggaggtaagtcatga

SEQ ID NO: 208735 - DNA, 678 bp, Klebsiella oxytoca
atgaaattcgaagaatggttagcacaacaggatgacgtcattgaggttgagtgcggctgtgttaccactgaggctttttatcactggatgcgcgtagcttatgaggctggcaactctccggtagtgccggatgatgtgtcgatattcgaagcggcaattgaagaatgtaaaacgtgcgactcaattgatgagcatgcatggaatcatggcgttttggctgtgatagcaaagtatgaatcctgccgcgccgccatgctcaaggctggcaactctcccgcgctaaccgtctggtatggagatatgccagaaacgaacggcaaaacgaactggactgcaatccttcaccgcaagggggaatgcctttctaccggcatcactatcgatcgatcagagtatcctgaccgtgttcgatacgaagctgaccgcatgcgctacctgataggtgatctggaatatgagccagacattctggaatacgattctgatgcacatagcggatatgttccgccgacggctgctcctggcaactctccggcaattccggatggttacgttatggtgccgaaggagcctacggaggaaatgctacaggcttcctatcgtgaagcgtccgtatatagcccaacagcttatcgagcgatgattgcagccgccccgcaggaggttagtgatgcctaa

SEQ ID NO: 208736 - DNA, 912 bp, Klebsiella oxytoca
atgagatattttatcgcaatacctacttataatggtggacgcatttggaaagatgttgtcgacaatattcaaaaatatgcaccgccagaatcaacagttcatatcattgattccagtagtaaagatgatactgtaagcatagcaaaaaatgccggattcttagttaaggtaatagcaagctcagattttaatcatggcggcacaaggaatcttgctgtaaatgatcatgcagaagattatgatgttgttatctttttgactcaggatgcgattccagaagccggttttattgacaaaataactagtgcatttgaagatcctaatgtggcatgtgcatggggacgtcaattgccacacaaggatgctaatcccatagctaggcatgcaagattttttaactatccagcagagagtcatacttgtagcctagaagatagtgctgttcttggattgaaaactgtatttatgtcgaactcattttcagcttatcgcattaaagtatttcaagagctaggaggttttccttcgaacactattttgtgtgaggatatgtatttcacggctaaggcaatattatcagggtataaagtcgcttatgtggcagatgcagtagtgcatcattctcataattatcttcccatggaggagtttcgaagatactttgacattggagtatttcattgcgatgaaccttggattcgtgactcatttggaggtgccggtaatgaaggtaaaaaatttattatttctgaattttattacttatttaaaaatggaaagttatacttgccggttgcatttattaataatttaatgaagtttttaggatataagttaggccaaaaatataaatatcttcccaattcgctcattaaattttgtagtatgcataagcgtttctggaaattttag

SEQ ID NO: 208737 - DNA, 828 bp, Klebsiella oxytoca
atgattgttaagtgtgaagatgtttttgtagactctcttacaggcgagattattaaccctttagattactgtctaccagaaggctacgatgtgtcaccagcggtgacagaggctttaactggcctccctttgaaagggacttatactactactgccgaaattaaaaaaggtaaagggcgtaagcctaaagagattcttaacccgtattgctctatcttccaaaaccttgagcgtaaagatgttagaactactactgccgaaattaaatcagtagctatcctaccgtcagttattgatgatgtagtgaccggagagttacgcttgaatgaggcaggggacaacacaactgtcccgcgtaatcagctcttgtttgttcttgcccatttagaatctctgtcagtagaaagcattcaaagactgttcactgctaaacgtgagcttaaaggtgatgctattccgggggagagatattgccgctacatcttgcgtaaatgtgaaagcgtcattcgcagcctgtcatatcatattgaacgcggtaacttctctcagcgtacatcatttgatttcgctcaggatgctaaggattatgaaaagtatggatgcgtgccctcttgtgtaatttctccagctccatttactaaaggggataaagagataattcgtaaacttgctattgaagggaagctcgtagaagcggataagtaccttaaagcagtatctgatgcacaggataaactgatgaagaagttctccgctccaacattaaaacagattgaagctgagatgaatgctgagtttccgtatgacccatacattaggcaatattaa

SEQ ID NO: 208738 - DNA, 213 bp, Klebsiella oxytoca
atgaagatcatcccccttatgaaagcgctgcgttctccttccgggagcgtccccatgtctgagcttatggcccacttaaatatctccagagagcatttaatgctcgatattaaatgggctttcatcaatcgcctgtttgatatgtacatcaataacgatgatgaactggtatacaccctcctcccggaaggggaattcttccgtaacgcgtaa

SEQ ID NO: 208739 - DNA, 576 bp, Klebsiella oxytoca
atgtcttacatccctcgttcaatctctgtaggcgacattatcccaaccaacaactgcggcgacattcgtattgttgaatacaagaatgctaaacacatcactgttgaatttcttaacactggctctctcaaggtagttaaagcttcatccattaaagcgggtaaagtagaggataagatgaagcccacctttatgggagttggttgtatcggagaagggaatcatcctacacgcattaacggaaaggttactcgtgaatactctgcatggtctaatatgattcggcgggtatatgggaatcaccctaagtatgcctcctacaaagattgcactatccaccctctgtggctcaacttctctaccttctgcgatacgcttcctcaattgattggttatgctgagtggaaatctaatgagaaagaatgtgccttagataaagatgttctctttattggtaataaagaatatggccccttcacttgtatgtttgttgatgcggctctcaattcattagagagtaacatccgccgttggcgtaaagagcacgctgataaagtagaaggggaggctaagtga

SEQ ID NO: 208740 - DNA, 246 bp, Klebsiella oxytoca
atgaccttcacttatacgcgccctacttctgaacacttaactaaatcacgtcaagcttccgctgagaaataccagcagactgtacgtcctattgtggaagaactactcacctttggttatggctatcaggccctgtcaaatgtcctcaatgctcgcggaattttcactccacaaggcaagccctttaataaagagaacgttcgctatttactctccattctagagctaaccactggcaatcaataa

SEQ ID NO: 208741 - DNA, 207 bp, Klebsiella oxytoca
atgaatgaattaatcaaactggtttccgacatcgacccctttaagggcagtttccctcaagttaaacgctcccctcataatccagatgatgctcgttcaagagcagcaaggaaatatcctaacaaacaaagcccgactgagtataagaaaagctatcataaacaatacgcatataatgaattcatgccatttgaatatgcagactaa

SEQ ID NO: 208742 - DNA, 297 bp, Klebsiella oxytoca
atgaattatacagaacatagcattaaactactaaatgaagaagaagcagctaagcattccccctttggcattgcttatgccctttcaactaaatatcccctaatggacagcaagcattgtcagataatcagtgaagcattattcctcactggcattgagacgtcattgtatgagcgccgctattgctccccattgaacgctgtagcttctgacatacattttacagcagaagaattagacacgctcgcagagctgctggaagcgtttaaagacatatcaaaaagaaaaggaaaataa

SEQ ID NO: 208743 - DNA, 288 bp, Klebsiella oxytoca
atggcatacccgtttgaagagatggtacagaaacttattgaagctggttattctcgtgaagatgctatggcggctgtagctgctgatgctcagcgcgtagcagaagagaagcgagccattgcaaccaccacaacactacgcaatcaatatggcggctttgatttgagcaaggctaaagacttcttctcccacgctcgtaagcaggaagaggctaagaagtattttgacccactggaaggaatgcagtctgtagactccatgtctaaacatgagcagatggatatgtag

SEQ ID NO: 208744 - DNA, 312 bp, Klebsiella oxytoca
atgaccggacgtaacagacgcaattttagccccgagtttcgcctcgaggctgcccagcttgtaatcgatcagcattacaccgttgccgccgctgccactgcgatgaatgtcggcaaatccacgatggataaatgggttcgacaactgaaagaagagcgagcgggaaaatcacccatagcttcccccatgacacctgagcagattgagatacgtgagttgaagaaaagacttcaacgcgttgaaatggaaagggatatattaaaaaaggctaccgcgctcttgatgtcagactccctgaacaattctcattag

SEQ ID NO: 208745 - DNA, 285 bp, Klebsiella oxytoca; identical to SEQ ID NO: 200647

SEQ ID NO: 208746 - DNA, 426 bp, Klebsiella oxytoca
atgtcaatcaatagtatgagccgtgcagggcgtggacgtgaagcgctggaacaggtttccccattacaaattgaacacgaggaactcacagcaattcaggaagatcaagcacctgttagggataaactcactccctgggaagtgttgttagccactgtagaggatttagatgtaaatcagtctctattcctgctagaagcttataacgacttctataataacccctctcaggggactcttaaatatgctgtagataaaacacagtatattaatcagaagatcagaggaattaatgtaacacttaactggtttaaccaaagtcagttctgtaagacacccgaataccaggaggagatgatgtatattctcgatgtcctcgttaatattcagacggaaatcacacagtttgtagacaatctcgaataa

SEQ ID NO: 208747 - DNA, 222 bp, Klebsiella oxytoca
atgattgagtatgaaagcatttattcaatgtgtcaggcatacgccgattggtgtaatgagaatgaccatttgcacggtagaacaaatagcgatgattactacttgtattttgtgtctaagaaaatttctggaaaagatacaaaagacacagtgacattttgcttcacaggagcaacaagacccgacggaagccatccaggctacctgattcaaacatcataa

SEQ ID NO: 208748 - DNA, 369 bp, Klebsiella oxytoca
ttgagtaaaaatagaaatattttaaatattaacaaattacaacttagagcagtaggcagaagtaaaagaaaatctaaagagaagagcgtccctaagtgggatgcaaccccagaatatacagaatccccacccctcacacaagaagaacaagaaataattgatagtatttgtgataacaacactgtctattataacccccgtaaaaaactgaagacacgttttaatgatgagctagagcactggcaggctatgggtttcctaactgagcacgattatattggatggctacggtttaacaatctgactgagagtgaaaacacaacctatgccgatttatccgaaactatgaagaaaaatatacaaggatag

SEQ ID NO: 208749 - DNA, 639 bp, Klebsiella oxytoca
atgactacaacagttaacgacacttccagcactaaatcaacatccagcactaaagcagagaatggcttctgtattatcgcctcaatgtcaaatgacgcaagcgcaagctatattaaagaatacagcgccctttcatttgatagcgtgcctaagatagggattaaacgctctgctaatgtaacaagttatgcagtggaaagcggtaacgaagtgagcgatcacattcagattaaaaacgataaaataaatattagtggctggattacagagagtcctattgaactcaggggtgatgcaatcgcctcaaacggtgcaaatgggacacgtgttaaacaagcaattgattacctcaataaagtgtttgaggcccgtcaaacaatcagcttaataacaagagacaaggtatacgacagcatcgttctcactggaattgattacagctacgacgaggccgttgacgctatgctctttaacctggaatatgaacgtgtcaggctggtcagtagtaaagaggtggatgtaatcgccaccaaaacaaaatctactactaacaagggtaaaaccgtcaaaactaaagccaatacagctactaaaaaggacactactgtttcagatatttcatctaaatacaattcctaa

SEQ ID NO: 208750 - DNA, 366 bp, Klebsiella oxytoca
atgtcacgaactaaatcaagagatttagagatctacaactattttaaagaaaataaaatccctctctattctataaaatccctctcagtaacactcagtatttcagaagaagatattaaaaagaaccttgcctctctaaagtttggtgatcaagtgacctttgaaatgtttgggaatgatatatttcgagtagttagcctttctaattcattcgatggcgggcagacagatgaaatagagaagcgctggaaaaagcatactaagaagctcattaagatttacagagagcagggctattctcctgaacaatgttcagagattagtgatatcgaactacaaacagtaaacaaatattggagtaaataa

SEQ ID NO: 208751 - DNA, 189 bp, Klebsiella oxytoca
atggccaaacgcctttatgaaaacgtcaacgatgttttaaacgctctgctctctggtgaattaaaacggtatagagcaatggcaaattttcacgcaaacaaacagcgtgaaagcttcgaactagcagagatgtatcgaagagctatcgcactatacgatcagattgttgcgattaagaaaattaaataa

SEQ ID NO: 208752 - DNA, 303 bp, Klebsiella oxytoca
atgtcccgtacccgcatgcccgcgctgtttttaggtcacggtagcccgatgaacgtgctggaagataacatctatactcgcgcctggcggcatctgggcgagacgctggcgcggcctaaagccattgtggtgatctccgcgcactggttcactcgcggtacaggagtgaccgcgatggggcgccgaaaacgattcatgattttggcggttttccccaggcgctctacgatacgcattatccggcgccgggttcgcctgaactggcccagcgtctggttgagctgctggcgccggtgccggtga

SEQ ID NO: 208753 - DNA, 189 bp, Klebsiella oxytoca
atgagtaatttcaaatactatgatgttcaggcaattctcgatgctctactgtcaggtgaacttaaaagaattaacgcaaaacgtagtcaacacacagcgaaaagcatgggacacttagacagagcagagcgttatcgtaaagctattgcactgtttgaccagattgaaagcattaagaaaatcaaataa

SEQ ID NO: 208754 - DNA, 786 bp, Klebsiella oxytoca
atgctttctaataaagaaattataactaaatatgaacataacgatgtagagcaagaaaaattctttaagtcttaccataacatttataacatctacactatttactcaccagatattgaaacaggagaaatgaagttctcattgcaaatgaagacaatctactcttacctgttaagttggcaagaaaacggactcacctgttatcaaaatcaagaagatcttgcaaagctatgtgatatgtctcgacagcgttttgttgaaatgacatctaagatgcaaaaagcaggtattttaaagaaagaaaggattggaggtagacgtaataaagaattaatcgcacttcctattacagactctcatataaacccacctgaatcaatccatgcaagccctgtagaagacgttaagacgattcctgatgcaatcccacagactaaatcagaagagccagcacagagcgatacagaagctctcagcgacgatgtagaagaatgtccattctttaccacctcagaagaagccttcaagaatgaatcagaggatgaatcgggggtattttcattaccttatgcaggaagtagtaagaagaaggaagttgatttagatgctatatgcaacactctaattaattgtttagatgcaggtaatagaaaatcagatgagaagtttacaccattcgctaaacggatattagaagatttagggattaccttcccagcgggattagagatttacttctcaaaaacctatcccggaatatacgaagacctagataccccattttaa

SEQ ID NO: 208755 - DNA, 222 bp, Klebsiella oxytoca
atgtcacgaactaaatcaagagatttagagatctacaactatcttaaagaaaataaactttctctttattctataaaatccctcgcagtaacactcagtatttcagaagaagatattaaaaagcttgttagtatttataaatcacagggatacactcctgaacaatgttcagagattagtgatatcgaactacaaacagtaaacaaatattggggtaaataa

SEQ ID NO: 208756 - DNA, 558 bp, Klebsiella oxytoca; identical to SEQ ID NO: 200702

SEQ ID NO: 208757 - DNA, 579 bp, Klebsiella oxytoca
atggcggtgattgatgactgtggtgtgccggttgaactgattgaaaccacgcttaccgatgaggagttgtggacacgtgctgcatccgggcaggggagtctgtaccgaaatccagtaatgcacgggggtgtgaaaataacgatggatgacgaataccacaaaacagtgaccgggtcattatccatcgtttctggtggcacactgttgatccagaggagagcgggtgtcagggttatcgccacccgcgaaccttcgaagagacatttaggggggagcttggctgctcttcgtcactggatcatgtcacgtatcctgcgcatccagccgaggacttcaccctcaggatcgcgctcatggatcatgggccgcagtcatcagcgggaaagccctttccgccagtcgggccttggcggcgttatctttcatcacaccgtcaaagcgctgagccagcgaataggcttctgcaaacacttttggtgttgccttacctccgacgggatggtcggtaaccgcgattgtcactccaaaggcttcataaatggcatcgggatgaagataactttcgacttcatgttttag

SEQ ID NO: 208758 - DNA, 276 bp, Klebsiella oxytoca
atgtcgccgcctttaaggctctcagtaaagcactgcatgcagaagacaatacgcttcctggacctggggagtgatgaacgtgtggcgtttatctttctgggtggcggaacgctcaagcactgggtcaatgaaaattatctacgcgccctgaaccgtaagcgtgcagcaagaaccgtattgacggggatgtgttattcagtcggcagtgctacgcgccaggggagcagttcgccgacccggtttatcggccagtcggctatgacgtcaaggacatag

SEQ ID NO: 208759 - DNA, 486 bp, Klebsiella oxytoca
atgcgactgaaaagtatggcagttaaaaattttcgctgttatgcacaagaagtaagcgttgagtttgatgacctgacaacctttgtcggacgcaacgacaaaggcaaatcgacgatccttgaagcactggagatcttcttcaacaacatggtatctatcgaaaaaggcgatgcctgtattcacagcggacaggacagtgtggagatcacctgcgagtttatcgagcttcccccttccctcacgctcgactctggcgcggaaaccacccttcaggaagagtttcttctgacgggaaacggctcactgaaaatccgtaagatctttaactgcagtaacaaaaagccgaccgccgagatttttgtcattgcaaaccatcccacggcagctggttttgagaatctcctggaactgaaggaaaaagaacttcaggccagagtgaaagagattggtctcgatgtttcgcttaagggaaatcccgggatgtga

SEQ ID NO: 208760 - DNA, 306 bp, Klebsiella oxytoca
atgtacgccaaatctttcatagcacttgacggtaatggtcgtcctaccggggccaaaacggcacaaaggtatccgtatgactgctacacctgccatctgtgcggcagtgcgctgcaataccatcctgaatacgacactaaacgaccttactttgaacaccggtccgacatgctgacagataacgggcgtcagcattgtccgtatgtcaggcccgaaccatacctgatgtccgcccgctggtttaccagtatgactggcactgcggtggctgcggcagcaattaccatggcgagcgctactgcctga

SEQ ID NO: 208761 - DNA, 375 bp, Klebsiella oxytoca
atgacatcaaaatctgcaaatcgttatccgcctgaattacgtgaacgcgctgtctgcatgctgctggaacagcgagataattacccctcagaacatgccaccattaaatctatcgcgcctaaaatcggctgcattcccgataccctccgcgcctggttgcgtcagcatgagcaggactcaggggacatgcccggtctcacctccgatgaacgccagagactgaaggaaatcgaacgagagaaccgtgaactttgccgcagcaacgacatcctgcgtcaggcttctgcttattttgcgaaggcggagattcagcgtgtcactacatacagccattatcaatgtgataggcgttatatgctggcaagtacaccatga

SEQ ID NO: 208762 - DNA, 282 bp, Klebsiella oxytoca; identical to SEQ ID NO: 144616

SEQ ID NO: 208763 - DNA, 573 bp, Klebsiella oxytoca
atgtttgccctggccgatgtgaacagcttctatgccagctgtgaacgtgttttccgcccggatttgaaaggaaagccgatagtcgtcctgagcaacaacgacgggaatgtaatcgctcgcagtgccgaggcgaagccctggatcaaaatgggaactccgtggtttcagataaaaaacgaaagatacccggaaaaaatatatgcgttttcaagtaattatgaactttacgcctcgatatcggcgcgcgtgatgaactgcctggaggaactggcccccagggtggaacagtattcaattgatgagatgttcctcgacctgaccggcgtggagcactgtatggggcttgaggacttcgcccggcagctgcgtcagcaggtgtatgactgtacccgcctgaccattggcgtgggcgccggaccaacgaaaaccctcgcaaaatcagcccagtgggcctcaaaagagtggaaacagtttcatggcgtactcgctctgaccaggggaaatccgcaaaggacgcggaaactgctttcactgcagccggttgaagaaatctggggggtgggtaaccggtaa

SEQ ID NO: 208764 - DNA, 684 bp, Klebsiella oxytoca
gtgctgggcataaaaaccgcgctcgatctggctctgacgaacccggccttcatccgcaaaaatttttctgtcgtccttgagcgaacggtacgggaactgaacggggaaagctgcctttcgcttgaggaagcccctccgacgaaacagcaaattgtctgcagccgcagttttggcgtgaagatcacggagtacgagtcactccgtcaggctatctgtcagcacgcagagcgggcctctgaaaaactgcgtaaagagcaccagtattgccggcatatttccgttttcatcaaaacgtctccgttcgccattaaagagccttactacggcaacgtggctacggaaaaacttcttacacccactcaggacaccagggacatcattgcagccgctacaacggctctggagcgtatctggagggatgggcaccggtatgccaaagccggagttatgctgaatgacttcaccggctccggagtttcgcagctgcaactgttcgacgaacgcccgccacgccctcacagtgctgagctgatgagggttctggacgggatcaacaactcagggctgggtaaagtatggtttgcggggcggggtatggccccggaatggcagatgaaacgggagatgctttctcctgcttatacgacacgatggtcagatattcctgcagcgaaactggcgtga

SEQ ID NO: 208765 - DNA, 186 bp, Klebsiella oxytoca
atgccaccattaaccactgaaaccgcccttaatattctgatcgactggctgcaggacaacatcatcttcgataacaatgaaaacaacacagattcagcggcgctgttgccatggattgaacaggcgctcagggatgttcgcgatcttcgtcatcttcagcttctgcaacaggccagtacagattag

SEQ ID NO: 208766 - DNA, 492 bp, Klebsiella oxytoca
atgaagctgtccctcaccgtggaggccgataccctcaacgtactggccctcaacatgggccggatcgccgtcgatatcgacggtatcgaactggctgcgctgattgatgtggtctgtgacaacggttattcacttcgcgttgctgacgagcccgggaagctggttgttgaagatccactgccgcctgtcacgcgcattaacggcatccagtgcagtaccgcgcatattacccgtcaggataacactattctggaccagacctctcttcagcgacatgacggcagcaacagcgactggatattgtacaccggctacggctatctgctcaggctgaacgcccgcttatacccggtcctggagctgaagcgaatggggttatcaaaggcctgtcgccggttagtggtgacgcttatgcgtcgctattccgctgacatcatccactttgatgcttcaggtgaagtgctgcccggctttaccacctttgactggtga

SEQ ID NO: 208767 - DNA, 360 bp, Klebsiella oxytoca
ttgtcgaatgagataccggcagtaaaccacgatatcgctgaaccctggtggggccttaagcccaccgtcacaccgtgctttggcgcacgactggtgcaggagggcaaccaggtgcactatctcgccgaccgcgccagcatcactggtcagttcagcgaggcggatttacgccatcttgaccaggcctttccggtgctactcaaacagctggaattgatgctggtttccggtgaactcaatcctcaccatcagcacggcgttacgctctacgcaaaagggttgacctgcgaagccgattcactcggctcgtatggctacatttatattgcgatttatccaacgcctgcagcaaccgcgtaa

SEQ ID NO: 208768 - DNA, 480 bp, Klebsiella oxytoca
atggaactacagttaccgttgtttgcccgtgaattagcccctgccgaccagcagaaggttcgggaagccttaaccctgctggcgtgccagctacgtgagccaggcgcgccatttacctccagtcatgccgtccgcgactggctacgtctgcagcttgcgtcactggagcgggaagaatttaccgtcctctttcttgataaccagcatcgcctgatagcccacgaaaccctcttcaccggcaccatcaaccatacgcaggtccatccccgcgaagtggtgaaatccggtctcaggtataacgcagcagctgccgtgctggcacataaccatccctccggggaggcggagcccagtcaggccgatcgtcaggtcactatgcgtattcagcgggcgctggaactggtggatatccgtctgctggatcacctggtggtgggtggtatggaaatcacctcgtttgcagagcgtggctggctatag

SEQ ID NO: 208769 - DNA, 471 bp, Klebsiella oxytoca
atgaccgacaaaacacagccactgtttacccctgaagcaaccgttcctgttgcagctctgcagcatattgtcgccacaccggtcaccgatgagaaccgcatcagcttctggccgcagtacttcggcagcataccgcagtggataatccttgagccgaccatcttcgcgtggatggaccgcttatgcgcagactactgcgggggtatctggcagttttatacgctgagcaatggcggcgcatttatggcaccggacgcggagagtgatgaactctggtcgctatttaacactatgaacggaaatgacgcggagatgagcgcagaggctgccgggattgcggtctgcctcattgcctacagccatcacgccagccgcactgaatgcgacgccatgacagagcactattaccgtctgcgggactacgcgctcaaccacgcggaatgcaacgccatcatgcacatcatcgactga

SEQ ID NO: 208770 - DNA, 192 bp, Klebsiella oxytoca
atgcacaacaccgacagtccgttactgcccgaaggcgcgtttccccacaggcaggctgaggtcatcgtggcggcgtaccagaacgtcgcgattgaagatgaccaggggacacactttcgactggccattcgcgacagcgataatcagttgatctggggagcgtggaatgttgaagccaacgccgtggtttaa

SEQ ID NO: 208771 - DNA, 222 bp, Klebsiella oxytoca
atgacattactcaaaatactgctcgctacgctggagcgggcactgacgtggtgtgccagcagcaaagcacaacaacttgtggaagaccattttcgcgaaaaaggctacgacgaggacagtatttatatcgccagacagacggcagccctgctcgcaggtgccttaatcgcagcgctgatagagcagatactgcaacgcatcgccacatacgtcacccattga

SEQ ID NO: 208772 - DNA, 471 bp, Klebsiella oxytoca
atgcgatttattcacaccatcctgcccgcaggattaatggcctttaccataaccgcacaggcagtccccaatatgtggagtagcggttttggtatgggcgtcaccgaatacatcatcaccagtccggaaaaggtgatgctgaatctgagctgtaccggcaaccctgacgaccagaatatcctgcagcaccacgtcatgctcaccctgccggacggtacagaagctgattcacaggatgaaaaaaccgtcatgaccgttgtgacgagtgaccagcagtatccgttgccgtcatccctgggctggcgtaacggtgacaacgactggctgtcgtttattgaggccatcagcaaagcaacctcatttgatatttacgtcaacgataacaaggtcgggcactttgccccttcaaccggcaacgtccacaaagtccttgccgatatgtccggctgtacaacgctcaccgccgggtaa

SEQ ID NO: 208773 - DNA, 312 bp, Klebsiella oxytoca
atggcactcgtcattaagtatttcactattgctttcagtatcgcgctggtcgtggtgctgtttaacgttatcagtgccaccggcgaaatccgcagttttggtcaggggatggggtatctgttctggatgacgctgggtcccggtaccggtatgaccatcggtgccgcgctgcgactgtggctgatgccggatgcggtatacaccagcgaagggatgaccggtctgctcaaagcccgtctgttctggcttgtgggaccgcagtgcattggctggctggcgggactgattatcgtgagcaaacagcttgtatag

SEQ ID NO: 208774 - DNA, 303 bp, Klebsiella oxytoca
atgaacatacccctctctggtggttcgcgcagcccggtacgcgttttgtctgtactctgcctgcttctttctgctacagcactcagcggctgtggtgacgaaaagtcaaaagccgaaagccaatttatccgggactgtaaatccggtggtggcaccacagccatttgtggctgtgtttacgacatcctgcagacgaaatatccgcatagcgagctgcttaagatgaaccaacagtacggctatgcccctccgggctttatgaacaacatgctcagtgcggcacaacagtgccgtaagcaataa

SEQ ID NO: 208775 - DNA, 438 bp, Klebsiella oxytoca
atgaaacacatcaccgccctgcacgacgcccattatcagcactgcggaaagcccgtcttttatgcgcagaccctgaaccacacaagggaggtcgaaatctgcatcgtcaccccgtcggtggcgtattcgttcggtaagaccggtgctgagcataaggcgatggatattaccgttccggttcagatgacgggctacgcgtaccagagcaaccagattatcagcctgcaggggtttaccgtccgtaatggtgataccacttacctggcctctgccggttcggatgatgaaagcaaaccctttgccgcgctcgatgtgtaccgggggacgcccgataccggaaagcatctggcgacccttacgcttgacccaaacaccgtggttaacgacatcagccacgggctacagaacgaaggtctttccgaacaggatggcctttaa

SEQ ID NO: 208776 - DNA, 285 bp, Klebsiella oxytoca
atgtattgtccgaattttggaacgcccgaaatccggcttcaccatgtgggtaaaaaagacaggcgaggtgattggcgcaactaccggggactggctggtcctgaaggggcccctgccggtgtactgattggctctgccatccccatggtttgtacactggccggagggctcattggttttctgtccggtgcctgtactggcgtcgtggcaggatatgttgcaggagagaacctggacgggacgatatttgatgaatatggttgcacgtactgtgagcatacctaa

SEQ ID NO: 208777 - DNA, 966 bp, Klebsiella oxytoca
atggctcttcacgaaaaacaggacagaaatggactcatcaggagtagggatctgagggtttgtactttttatgccaagtggctgaatgttaatagcgaaatcaacaccaggaacgttccccgtcaggatgttgaaagttgccggagagaattaaacctgctgattaacagagccattccggataaagcgaaacagacgagattgttgtctgatatggagattggccgggaggaaaacattctcctgcaggagagttttgactgggttagaatggatgagcgtgctgcattctggctgtgggcatatctttgtgaaacacgagactcgttattggaaattgattctccatcaactccggaattaactaactggtatcagcgcctgaatctgagtgtgtctccggtgagtcactctgagagggtaaatctcattgttacgttttttgacagtattatcattcccgcaccacctgtgaaatatgttaagaaaaaggtgatggaaaaactcaaagatcagtggagagtaatttacaataagcctcttccattaaaatggttaccggatgaagaagatgctgtcctgtgggcctggaataatcttcaaaaagtacagagggataatccgttgggtatcagtcgttccttaatgagacggaatgcatcaggattaacaacctggtttacaccattcaatcatgctgaacgtaacctcgcgttacgtgctgcactggatttatgggatggaacacaggatacaaagcgtttatttctccttaatcttaacaaggcctggaatcagcagaaattacgtcaatctcgcaccgataaaaaagcgctcaatacttacctgaagaacgaaacaaaaaaccgactggacctgatggctgaacgtagcggggttcgcatcagcgatatgctcgaaaaactgattaatgagcattaccgtaaaatgatcggcggtgaatga

SEQ ID NO: 208778 - DNA, 1071 bp, Klebsiella oxytoca
atgcccgttgactttctgaccactgagcagactgaaagctatggcagattcaccggtgaaccggatgagcttcagctggcacgatattttcatcttgatgaagcagacaaggaatttatcggaaaaagcagaggtgatcacaaccgtctgggcattgccctgcaaattggatgtgtccgttttctgggcaccttcctcaccgatatgaatcatattccttccggcgtccggcattttaccgccagacagctcgggattcgtgatatcaccgttcttgcagaatacggtcagagggaaaatacccgccgtgagcatgcagcgctgatacgtcagcactatcagtatcgtgaatttgcctggccctggacatttcgccttacccgtcttttatatacccggagctggataagcaacgaacgtcctggcctgcttttcgatctggcgacagggtggcttatgcaacatcgtattattctccccggagccactacgctgacccggttgatttcagaggtaagggaaaaggcgacgttgcgcctgtggaacaaactggcactgataccgtcagccgaacaacgttcacagctggagatgctgctggggccaactgattgcagccgcctgtctttactggaatcactgaaaaaaggccctgtgaccatcagtggtccggcgtttaatgaagcaattgaacgctggaaaactctgaacgattttggcttgcatgctgacaacctgagtacactcccggctgtgcgcctgaaaaatctcgcacgttatgctggtatgacttcggtgttcaatattgccaggatgtcaccgcagaaaaggatggcggttctggttgcctttgtccttgcatgggaaacgctggcgttggatgatgcactggacgttctggacgccatgctggccgttatcatccgtgacgccagaaagattgggcagaaaaaacggctccgctcgctgaaggatctggataaatctgcattggcgctcgccagcgcatgttcgtacctgctgaaagaagaaacaccggacgaatcgattcgtgctgaggtgttcagctag

SEQ ID NO: 208779 - DNA, 2502 bp, Klebsiella oxytoca; identical to SEQ ID NO: 203646

SEQ ID NO: 208780 - DNA, 558 bp, Klebsiella oxytoca; identical to SEQ ID NO: 200702

SEQ ID NO: 208781 - DNA, 519 bp, Klebsiella oxytoca; identical to SEQ ID NO: 200701

SEQ ID NO: 208782 - DNA, 321 bp, Klebsiella oxytoca; identical to SEQ ID NO: 203648

SEQ ID NO: 208783 - DNA, 2298 bp, Klebsiella oxytoca
atgactaatcgcactcaacgcttaaaagatcgtctgttcgccaacccgcgcgaaatctccctcgagcgagcgctgctctacaccgccagccataaacagaccgagggggagccggtgatgatccgccgggcgaaagcgaccgcatgggtcctcgatcatgtgcagatttcgattcgtgatgatgaactgattgccggcaaccgtacgatcaagccgcgcgccgggatcatgtcgccggagatggatccctactggctgctcaaggagctggaccagttcccgacccgcccgcaggaccgcttcaacatcagcgaagaagataaacgcatctaccgcgaagtgctgttcccctactgggaaaatcgatcgatgaaggacttcatcaacgcccagatgaccgatgaagtgaaggccgccgtcagcacgcagatttttagcgtcaaccagaccgataaaggccagggacatatcatcatcgactaccctcgcctgctggaaaacggcctcgccgcgctggtggcggagatgaaagcggtgagtcagcggcacccgcagaacaatttttatcaggcggtgctgatcctgctggaagcctcccagcgccatattctgcgctatgcggcgcttgccgatgacatggccgccggctgcagcgacgggcagcggcgcaaagagctggagaccatcgcggacatctcccgccataacgcggtgcaccgcccggaagatttctggcaggcctgccagctcttctggtatatgaacatcattttgcagtatgaatccaacgccagctccatttcgctgggtcgctttgaccagtacatgctgccgtactatcaggcttcgctgaatcgcggccaggatccgcagtttcttcaggagctgctggagtcgctgtgggtgaagtgcaacgatattgtcctgctgcgctccaccagcagcgcgcgctactttgcaggcttcccgaccggctataccgccctgctcggcggtctgaccgagaccggacgcagcgcggtcaatatcctgtcgtttttatccctcgacgcctaccagaacgtgcgcctgccgcagccgaacctcggcgtgcgggtcaacgagctgatcgaccgtccgttcctgcgcaaaaccgccgaaaccattcgcctcggtaccggtattccgcaaatctttaatgatgaagtggtgatcccggcgtttctcaaccgcggcgtctcgctggatgacgcgcgggattactcggtggttggctgcgttgagctgtcgatcccggggcgcacctacggcctgcacgatatcgccatgttcaacctgctgaaggtgatggaaatcgtgatgctggaaaacgaaagtaaccctgacatcacctgggatgggctgatcaaccagatccgcgacaagattcgctattacattaagctgatggtcgaaggcagcaatatttgcgatatcggccaccgcgactgggcgccggttcccctgctctcttcctttattgaggattgcgtgcagcacggccaggatatcaccgaaggcggcgcgcgctataacttctccggggttcagggcatcggcatcgctaacctcagtgactcgctgcacgcgcttaaagggatggtgtttgagcaaaaacggctcagcttcgctgaactgatcgcggtactgaaagccaacttccagacgccggaaggggaaaaaatccgcgcgcgcctgatcaaccgcttcgagaaatacggcaacgatattgacgaagtggacaacatcagcgccgatctgctgcgcttctactgtaaagaggtagagcagtaccgcaacccgcgcggcggtcgctttacgccgggctcctataccgtctctgcccacgtgccgctcggctcggtcgtcggcgccactccggacggacgcctggccggagagcagctggcggacggcgggctgtcgccgatgctcggccaggacgtgcaggggccgaccgcggtgcttaagtcggtcagcaagctggataactttctgctctccaacggtacgctgctgaacgtcaaattcaccccggcgacccttgccggcgacggcggcctcaataagctggccgacttcctgcaggcattcaccaggctgaagctgcagcatattcagttcaacgtggtcaacgccgatacgctgcgcgaagcccagcagcggccgcaggattttgccggcctggtggtgcgcgttgcgggctacagcgcctttttcgtcgagctgtcgcaggagattcaggatgacattatccgccgcaccgcgcatcagctgtga

SEQ ID NO: 208784 - DNA, 876 bp, Klebsiella oxytoca; identical to SEQ ID NO: 203650

SEQ ID NO: 208785 - DNA, 342 bp, Klebsiella oxytoca; identical to SEQ ID NO: 203651

SEQ ID NO: 208786 - DNA, 1185 bp, Klebsiella oxytoca
atgaaaattaaaaacatacatgtgacgttatgggggggagctctcttttgcttctactttttggatgctatagataaattcaaccgatcattgggggattcaaaggtagcatttatagccagaatgttgactatagctattatagtttgtttttttatttttaaacctaatatcctctttagggaaaagcgaatcctttattttgttatttttacgtctattgttatgcttggttatcttgtttcaggtatatatgaaaatgattctttaggccagtccttctacatactggcaagatatgtttcatttataatattcatatattatgctcattattgtttgcaaagctgtgataattcttcatttatctttatatctcgtatcatggtttttatatttttaatcaattgtatatttgcatggtttggttttatttttgggatagaaatccttcgcacatacggtcatatagctgatcttgaagctggttgggtggatcaacgttttggatatgatggcttcttactcgagcaaaacaatgctacatatttttatatcatcgggttaatcgcttgttattggcttcattctgaaaagagattaaatatactctggcttttattcgggtttatatcttgttttatagtcggaacaaagtcattgtatgctgcagtattcttattgttaattttaattatctttaaaaaaagaaaaacaagagtgttactattctctacaggctccacattatttttatgttggttgctattttcaacatcagttattgataaagtgaatttcacattaatagattcaaccttatctggacgtatgagtaactacatattacatgtatatcctttgcttgaaagaataaatttagctcaaatatttttaggattccaagggggagatccaaaaaaatacctcgtagaaatggaaatgatagatataattttgttttttggattgcttggtgggtttatgtatttgtttatcgcattaaaggaaatttttaatattattaaagatagccctttaaaattatctatggccagtatatctgttatttttattgtttcatttttttccggtcatctcttttatgatcctgtttcatcctattactttgcaactcttgttttactggttgggttaaataaacatcgaataaaaggttattaa

SEQ ID NO: 208787 - DNA, 279 bp, Klebsiella oxytoca; identical to SEQ ID NO: 127157

SEQ ID NO: 208788 - DNA, 291 bp, Klebsiella oxytoca; identical to SEQ ID NO: 16838

SEQ ID NO: 208789 - DNA, 219 bp, Klebsiella oxytoca
atggcacgcgaagggttcaccgatctcattgcactcatcacagtagctcaaaccgggagtttcacacgtgcagcagcccagcttggcgtcacacagcccgcattaagctacagcatcaaagggctggaagaacggctgggggtaatgcttttaatgagaagtacccgtaatgtcacactggatttgcccctatatttccagacacctgttatcacttaa

SEQ ID NO: 208790 - DNA, 1023 bp, Klebsiella oxytoca; identical to SEQ ID NO: 102293

SEQ ID NO: 208791 - DNA, 765 bp, Klebsiella oxytoca; identical to SEQ ID NO: 102294

SEQ ID NO: 208792 - DNA, 174 bp, Klebsiella oxytoca; identical to SEQ ID NO: 107918

SEQ ID NO: 208793 - DNA, 207 bp, Klebsiella oxytoca
atggaaagtaaaaccactgaattttttgctgatcttgaacgcgaaaccgatgaaatgattaccgtacttaattatcttctggcagcaagtgaagaggataataaggcgtttcttgcctatacccatgtgaacgatcaccccagaaagataacgcgaaagcgtcgagctgctcaggtgtccacacaaggcggggtctgcctgcattga

SEQ ID NO: 208794 - DNA, 438 bp, Klebsiella oxytoca
atggcggtacacacggtcactgaggctgctaaattagcgggtgtcactaggagaacaatataccgttatatcaagcagggtaagctctcaacggtagtgacaggtagtgactctgcccagattgaaaccagcgaattgctacgggtttttggcaacctgtcacacccagaagagtctaaagtatccaccggatcacaccaaaaagagcctgaatatgtcacacgtttaatggctgaaatgtcacagatcagggatttggtccaagggcagcagcagttattgcttgaggataagcttgagactcaaaagctgcgagaacaggtgaccgggttgcagaatgaacgtgatgccgcgactcaggaactggacaaggtgaaggcggaacttgaggctgaaaggaagaagggattttggcggcgtctgtttgaacgaggatag

SEQ ID NO: 208795 - DNA, 267 bp, Klebsiella oxytoca
atgcacaccgctttttcttccccgtcttctgcccctgccgcgccgctgatgccggtctctgacaccgttcaggagcgctttattcgcctgcccgaagtgatgcatctgtgcgggctgtcccgctccacgatttacgacctcatcagccgggaggctttcccgaaacaaatctcgctcggcgggaaaaacgtggcgtgggcgcagtcagaaatcaccgggtggatggcagaccgtatcgccgaacgcaaccggggctatgacgcatga

SEQ ID NO: 208796 - DNA, 123 bp, Klebsiella oxytoca
atgaatgcgaacggattcaagaaattcgagcatgacagtccttacggccggttcggtttcagacaaaatctgccggtatgcatccagcatcatggctccggcatcccctccggcacgccgtag

SEQ ID NO: 208797 - DNA, 237 bp, Klebsiella oxytoca
atgtcattttcagcaagaacggcgcaaaaagcagcagagatttctgatggaaaagatactttcagtggcggtctgtccattgatttaacctacacaaagttatccacaaggttgcgtggtgtttatattcttactgaggcggccatgtcggcacttgtcagtggtcgggtaaagctaacgttcttcaaccttcctgatgatggctggaaatcaggaatggaaaaggtgaaaaagtag

SEQ ID NO: 208798 - DNA, 222 bp, Klebsiella oxytoca
atgatttatcccttcgatgcgtcctatgctcaggaagtgctgagaaaacattatcagtatgcggatgtcctcgctaatccccgcgaaagtcttgccgcaaagacaactgggctcattgatcatgacaggcttctgtcgaaatgggatggcgataaaagcacatctgaaattcgcaggaagttgtcgagaagcgccgaagatatagaaaccagggcgtcataa

SEQ ID NO: 208799 - DNA, 543 bp, Klebsiella oxytoca
atgacgaaagacgacatttttgacgcaatcctcggcaaagagggtggctacgttaatcaccctgatgacaaaggcgggcctacgaaatggggcatcacccaggctgtagcgcgagcacatggctataaaggggatatgaaggacctgacccgccagcaggcgctggatattctaacggctgactactggaccggcccgagattcaatctgattgctgctgtatcacctgcaatagccgctgaactgtgtgatacaggcgtgaacatggggccttcagttgcggcgaaatggttccagcgttggctaaacgccttcaacaaccagcagaagttttatcctgacctcattgttgacgggcaaataggcccgcgaagcattagcgctctggaatcttatctgactaccagagggaaagagggtgacctcgtgttacttcgagccttgaattgcagtcagggccagcgttatctggaactcgccgaacaacggccagcaaacgagtcatttgtttatggttgggtaaaagagcgggtagcactatga

SEQ ID NO: 208800 - DNA, 345 bp, Klebsiella oxytoca
atgaacaaagaaccccgcatctacggcagcaaatgggagaaagcccgcttatccttcctgcgcgccaatccactatgtgagatgtgcaggcagcaggggagggtcacacctgcaaccgttgttgaccatattgaacctcacaagcttaaagatgccctgaagtccaataacaggatcgcaatagctaaggctcagcatctgttctggagtaaagagaactggcaaccactatgcaaagcccatcacgattcaaccaagcaaagaatggaaaaaggtggcgtgatcattggttgcgatgttaacggctatccactcgatcctgcatcacattgggctaaggaatga

SEQ ID NO: 208801 - DNA, 492 bp, Klebsiella oxytoca
atggcagaaaaaagaactcgctccgacagttcgtcggcagcaattcaggccatgcaaaatgcgactgtggacaccctcgatcccccgtcacatgcgggtctggaaaaaaaagccgaacctttttggcacgataacatcagatcgaaagctctcgacagttggacaccagccgaccttttagccgcggtagaactggcaaataatcagctttatatcacggttttgcgtaaggacttgaggaaagaggagcgcacacgcggtgagggtcgggacgaaagtctgataaaagatttacgtaagcagatcgtagaattacagcggactattcttgcacagcgccgtgaccttcagattcattctcacgctaccaacggtgaaagccgcgaccagaaaaaacgcaatcagaatgaccgaagtgcccgctcagttgttggcaaacacgcttcacctgcagatgatggcaatctgatagctttccccaaacacggataa

SEQ ID NO: 208802 - DNA, 1515 bp, Klebsiella oxytoca
atgacgcgaggtgagcgcgtgatagcgttcattgagcgctattgcatcgtgccagagggtaaacttctcggccagcccatgctgctggatgagtttcagaaagatttcattctggcaatctatgacaatccggccggtacggatatggcgatcctcagcatcgcccgaaagaacgggaaaacagggctgatagccggaattctgttagctcatctggtcgggcctgaggctgttcaaaatacccaaatcgtcagcggggcactcagtagggagcaggccgccattgtcttcaacctggccgttaagatggtaaacctgaaccctgaacttcaggaaatagttcatatcactccgagtgggaaaaagctgattggtctgccgtgtaacgtagaatataaggcgctctcagcagagggtaaaacgactcatggcctttcgccggttctggccattcttgatgagacaggtcaggttagagggccgcaggatgacttcattgatgcaattaccacagctcagggagcgcatgaatcaccgcttctgattgtaatcagtacccaggctgcaaatgatgctgacctgttgagcatctggattgatgatgcccttaaatcaaaagacccgcatattgtttgccatctttacgtcgccccggaagatgctgatattagctctcgcgatacctggctggcggctaatccggcactgggcactttccgttcagaaaaggatatgagtcgccaggctgaaaaagcagctcgtatgcccagctttgagaacaccttccgcaacctgaatctgaatcagcgtgtgtcggtgatttctccgttcgtttcgcggctaatctgggaactatgcggcgatgaaccgcaacctattaccggtctctgttatgccgggcttgacctttccgagaaaaaagacctcaccgcctttgttatttgcgggcagtctgacgatggcttatggaatgtctacccctttttctggacaccagaaaaaactcttattgaaagagccaagaccgacagagccccttatgacgtctgggttaaacagggatacctcagaaccactccaggcgtaaccgtcgattatgacttcgtggtgaatgacataggaaatatccttgctgattttgatcttgaagcaatcgcttttgaccgatggcgaattgatattttgcgaaaatctgcggagtcagcggaactctctctgccccttgttccatttgggcagggatttaaggacatggcaccggcgctcgatacgctggaagaggttctcttaaatggcagattgcggcatggcatgcatccggtgctgacaatgtgcgcccagaatgccgttacggttaaagatccggcatcgaatcgcaagctcgacaaatctaaagccacagggcgcatggatggcatggttgcgctgacgatggctatgggtgcatcaaatggagacgctgttgaagatgatggcgatctggatgacttcttatctaaaccgctgagcatgtaa

SEQ ID NO: 208803 - DNA, 1272 bp, Klebsiella oxytoca
atggctgatactcaatattctatcgatcttcgcacgaataatggctggtgggcccgaatggcttcctggttcgttggcggaagattagtgacgcctgaacagggctcacaaacaggtccagtttccgccggtggggcactgggtgactcaataattaccgatgagcgtattcttcagatatccacagtctggcgctgcgtatccctgatatcaacactcacggcatgtctgccaatggatgtgtttgaaactgataaaagtgataaccgcagaaaagtagacttaaacaatccgctggcgcggttgcttcgttattcgcctaatcagtacatgacagcgcaggagtttcgcgagtcgatgacaatgcagctttgcttttacggcaatgcttatgccctcattgaaagaaacgctgttggtgatgtgataagccttatcccgctgatgtcggccaatatggatgtcaggcttgaaggtcgccggatagtttatcgttacaggcgtgataaggaatatgccaacttctcacaaaaagagattttccatctcaaaggatttggcttcaatggactaacagggctttcacctattgcacatgcctgtaaatcagcgagtgttgcagtagcgatggaggatcagcagcgagatttttacgccaacggcgctaagtcccccaaaattctctcaactggtgatcgcgtactttctgcggagcagcgcgggcagcttgaagaaaacttcagagagatatccggtggcccggttcgtaagcgtctctggatactggaggctaattttcaggcgcatgacatcggcgtaagtccccaggacgctgaaacgatggcctctcgaaaattccaggtcagtgaattagcccgtttttttggtgttcctccacacctcgtaggcgacgtggagaaaagcacaagctggggatcgggtattgaacaacagaacctgggttttctccagtacacacttcagccatacatctcgcgctgggagaactgtatccaacgctggttgataagaccagatcaggttggtgtgtatcacgcggaacataaccttgatggccttctgcgtggtgattctgcgtcaagggctgcattcatgaaagcgatgggtgatgccggactgagaaccattaacgaaatgcgaaggctggataactatgcgccgctacctggaggggatattgccaccaggcaatcacaatatgttcctattactgaactgggaaataacaaacctcgcaaacgcggggtttaa

SEQ ID NO: 208804 - DNA, 288 bp, Klebsiella oxytoca
atggctttcaagttatcagcacctaaaaccgttcagatccattatctcggcgggtatctctgtgaaaaagaaatcaacattgatctgatttacgccgtcgaaagcgtcagacaagacgacgctggcgtggtcaaggtgtcgttatccgtgcgctacgatgaccaggccaaaatcaatgttggtgattatccggtgactctggatgtctcatcgtctcagtcatgggcagaacaggctgaggctcagattatggcactggatgagttctctggttcgactgcgctataa

SEQ ID NO: 208805 - DNA, 198 bp, Klebsiella oxytoca
atggaaagggtattaggaatttatgttgtcggtattattgtgagtgccggtttcctgtttatccaagaagttaggaacgggaggcgcagaagttacaccgaagaaggtgcgtcaatgcttgtcggcataatttgtgcgtttttgtggcctttagttttaattgcatatttttttgataaaaaaaatgggaaattatga

SEQ ID NO: 208806 - DNA, 528 bp, Klebsiella oxytoca
atggccggtggtgttggccagcggattttccatcacctctgctttcagcaccatcgcccggaccagtggcccgagggtgtcattcagcgcgcggttaagctcttcctcagcatatttactcagcacagcatgatgcgcctggcggaatgcccgtgcggtgctgttgcaggtggctttcagctggtcacgttcaaaggccagcacgtcggtcaggttgccacattcctgcgccagctcccggcgggccacgcgttcgatatggccgcttctcagctcatcggtcagcatggcgcccccggcacggaaagcagcgcgccatgtgcgggtgtcgctgccgttgtcctgctccagcgccgctttctgctcctccgcacgggtgatggccgccagggtgtcctccatccggcgggcctgttcaagatgggccgttctggcggcggccagtcgctccagcgccggtttcaggtaatcagggataaaggtggtgtcggtcatggcaggtttcctcgtggtttcaacatgaggtga

SEQ ID NO: 208807 - DNA, 738 bp, Klebsiella oxytoca
atggaaccaacattgtcattaaccgtgatgttctgtgctgcagtgggtgcttcagtatcagaatcgctgtcggaatccgagtcactgtcggaatccgagtcactatctgaatccgagtcgctgtcagagtcagaatcgctgtcggaatccgagtcactgtctgaatccgagtcgctgtcagagtcagaatcgctgtcggaatccgaatcgctgtcggaatccgagtcactgtcggagtcagaatcgctgtcggagtccgaatcgctgtcagagtccgagtcactgtcggaatccgaatcgctgtctgaatcggagtcgctgtcagagtccgaatcgctgtctgaatccgagtcgctgtcggagtccgagtcgctgtcagagtccgaatcgctgtctgagtccgaatctgtgtcagaatccgagtcactatctgaatccgaatcgctgtcagagtcagaatcgctgtcggaatccgagtcgctgtccgaatccgagtcactgtccgaatccgagtcactgtcagaatccgaatcgctgtcagaatccgaatcgctgtcagaatccgaatcgctgtcggagtccgtatcgctgtctgaatcggaatcgctgtcggaatcagaatcgctgtcggaatcagaatcgctgtcgctatccgagtcgctgtcagcatccgagtcactatcggagtccgaatcactgtccgcatctgagtcagtttctgaaatcgaagagtgctga

SEQ ID NO: 208808 - DNA, 276 bp, Klebsiella oxytoca; identical to SEQ ID NO: 207402

SEQ ID NO: 208809 - DNA, 1935 bp, Klebsiella oxytoca
atgactaaaagtgccgcattatcatacagaccagatatagatggattgagggctatcgctgttttatctgttcttttgtaccatgcatttcctactattattagaagtggctatgttggcgtagatatattttttgtgatatctggtttccttatcacaactataatacgcaaggaattaatgcgcgatgatttttcaatactatcgttttatcaaaaaaggataagacgtatatacccagccttgatactaacgcttagtggtattttatttttatcttggtttttgttatcaacagaagagtatgctgtaactcttaaacatgtgatattttccagtttgttcacggaaaacttcttgctatggagtgaggatggctattttgataaggcgtcaatatttaagccaaccctgcatatatggagtttatccatagaagaacaattttatatattctggcctttcataatagcatttcttgttagaagaaagttagaaataaaaggtattcttctatttattttcctttcatttctaattaacttatatgatatttataatcatcctgccgcagcatattactcccctttaggtcggtcgtgggagctaatgattggtagtttgttttcggttatttatacagatatgaagcctaagtggtctgtaaagagagggtctttccttgcgaccgcaggttttgttatggtagttctctcgatattttttataccaacgcaaaagtatttccctggtttttctgctataccagtcgtcgttggttctgctctgattattctatatggtgaaaacaccataataagcaagattttaaccttgaagaaagtagttttcataggtttaattagctatccgttatatttggttcactggccattaatgagcttctcttccattattcttggtagggaatccagcaaggcaaatgccgcatgtctggttttgtcatttattcttgcaacactaatctataaattagtagagcgaccgattgcaaagacaaagctaactgtctcatacgctttgttctgcgtaatgcttatcatccctatttcctctttcgtgctcataggttcacaatcaagagtaaatgaggttaagttagccaatgaaactgaatggtcatttcttaaagggcagtataaaaaatttggcttgactgagtttaataataacgggaccggtatttatactctttcaaagaatgtaagcagtgactcatacattttccttggtgactctcatatagccaacattgctgaatatgtagatcatcagataaatacttcgcaaaatccgccttctgtattgatcgctgcaggtgggggatgtatcccgatgcctaatgtttataccgatgacaaaaggaggcaaagctgctggcccatgcgttcgtctgctatcaacatgataaaagataaaaacataaataacattgtaatcggtggcgcgtggttcatgtacttcttcaataagaaagattactactatgtgaataatggtggtaaatattcaataaacacgcaacaaggaagagatatggctatttctgacatgatgcagatgattgaggacttagttagctctggtaagaatgtatattttatcaaagatgcgccttacatattagatgtgtcacctggtatttaccgggcgagacttaagccatttgtgtcatatgacgctcatgaagatttaaatgtagatattgataagtcgcagcaagaattcatttactcactagctgaaagagcaaaaaaatctggcgcaaaagtaatcaatatctttgataaggtttgccttaatggtaaatgcaaacttatagatgatgggcagtatatatatgccgattcagggcacttcaatccatcatggctaaggaaaaactacagtattcttagtgacatacatatataa

SEQ ID NO: 208810 - DNA, 1128 bp, Klebsiella oxytoca
atgaatcttttcaaagggatttcgattttcatgccagcggttttcctggctggatgtactgtttatccaggttctacgatatctaccttctccaaagataagcaagaagttgctgatgccgattttaagattgacgagcgcgtcgatatcatacccatgacgccagggcttgttaacagcatgacgcctaaacttgttcaggttaaagcgaatccagagttagatactggacgaagtctttatgcctacaaaattggcgtaggtgacatcctgcggatcactgtatataaccacccggaactaaccaatccccagggtcaatacagaagcgcaaaagaggctggcacaattgttaaaaatgatgggacaatttttttcccatacgtgggaaatgccaaagttaatgggatgaccatagaacaagtaagaacgctcatagctgacaggctcacaaagtatgtagagtctcctcaggttgacgtaagtgttgccgacttctcatctaaaaaagtatatgtgtctggagaagttaataaatccggtaagcagtcccttacagatgtcccattaacgattgtagaagccatcaataatgcagaaggtatcactgcagatgctgactgggagcatgcggtttacacccatggcgataagaaagaaattatttccctaaaatcaatactgcaaatgggagatatgacacaaaacagggtaatgaggcctggtgactctctgtatgtgccgcgtaatgacgaattaaaaataacagttatgggcgagacaggttcacagaaaacattaaacatgggtctatacggaatgacccttgctgaagcgttggcaagtgcagggggaatctcaaactctcacgcagatgcatctggtattttcgtcatcaggccaactggtacaaataaggaaaagatagcgcgcctatatcaactgaatgccaaagacgctacggctatgatcatggcaacgcaattccagttacagcctagagatattgtatacgttaccactgcacctatcacaagatggaatcgagtgataaacaaaattacacctgaaatcagcgcgttaaatgatgcaataacaacaactcgctcgataaaaacctggccataa

SEQ ID NO: 208811 - DNA, 1482 bp, Klebsiella oxytoca
atggtaactcgtaggaacgttcttaaaattgcaataccagcagctgcagctataccagcagttgctctcggggcgagctcgactactggtaaaaatgtatttctgagcgtttctgacttatcaacgtataccggcggaaatggtgatatagggtttctcgtatcgtaccacgaaggtaagatgacaggtggaggaaccctaatccataccatcagctccgaaaaaccagacatgatcaatacatttccctcaaagaatgggttatgggcaaggcttcaggatgcaagtggctttgtagattgttctcattctggaatgttggcagaagaggggtttgataactccccctatcataacaagttgattaagtatgccgatgataaagggctaacgattacatatggctcaggtatctatgagcatcaaagtgatgttttaaagcctgagtcatactcctgcccatccatgatcgggtgcggtgggcgtcactggaaaaaagggacgatacttaaattcctcaacggttccgttttcaaaattaaaggcgggtccggatatgtttgtagcacagttattgaaggcataaccttctctggagacaaagaaactgacggcgttcttacaatagctgatcagtgcgggatttcagttgaaaggtgctattttgataaatgtaaaattggtgctctcatggtaaatgagagcaaaggcggttttactgaattcgatgttcttactgaatgttacttcacatcgacctgtgtcacgggatttgcctatagaagacttgctggaaatgaatcattccatggcacaggcatgaaggagtgctcttttcagcagcaacagagagacgataacgctcctcatatccatattggaccacgttgcatggtctataatgcgccaatgaccgtccatgtttttcgagaatacacagcatcgccaatcataaggcatgagggtttttccagatctaatgtttatggtgtgattactgtagaaaagaagccaaaaaatacagtaagccttgtagatggcagccctctatacatccttggtagcatctcttgcctcagcgagaatctcaccacaaataatgctattctgtgcaacagattccaggcaaattccgatggttcggttaatttcataagaaacccagcctctttgtcaggtgggtttaatggcgatagggagccggtcatacatcttaatgctggagaaagtgccttcatggacgtgactgtggtatcaaatggtgtcgtgagccgaggtttaatatttatcgctgttgacactaacggtaaaggtaagataactgacacagggatgtcccctgtagagaacaaaataaagcatgacagctattttgaatttaacaactccacattgtttgtaaagagtaatggcgatgcttccgctcggtggattgcagacatctcatttgtggctagtcgataccaatatacattaaaatga

SEQ ID NO: 208812 - DNA, 1185 bp, Klebsiella oxytoca
atgaaactaagtaaaatacacctgattgctttcatgtcaacaatgctagtaagcgttgacatactatcagtggcaggcttaaggataacattattgccgttgctggcgtatggtttttatattttatggagaaataaatcagtagatagatgggccttttatataattgcattttctgtagcatgccttccttcgctattctattccgaagaattctataaatccgttgggtatataatctggttgtttttcaactatatagcgcttactgtggtatataagcatcttataataaagtcattagataatacccttgctggcgttagggacgcatatcgcctacaaatacttttgggatgtgctctatatttcacgggaatacaggatagggcggcggttctgtactatgaaccttcttactttgccttatctcttacaccgtacgtggttatgattgtaagctcttacataaagtcgaagggatatgttggagatgttgtaaagagaacctcaataatagatgtgtttttattattagcagccctatatacaactaaaagcgcaaatcttatgcttgtgtgcggactgtcggttcttatcatttcctttcttggtaaaggaaaattcaaaaaaatatgcctccttgctgtgataggttgtgttgctatcgcagggctttacttctactcaaagagcagtgatgacctcatagctgttactatcaataatcttttctcatcatcagatcctataaaggcaatccttgataggacaggtaacagatggccacgctatgagctcgcatacgacactgctatgtcaaacttttggggggttgggattggtgcgtatgaaaaatacacattaagtcacaacttcttcaactatgctgaccttccgttttacctgagcccaatagggtatcctcctataaacatatacctggagcttgcagccacttgtggttggattgccctagctgtatggttaatctggcattttaaaatgattagagcggctaacaggagccctatcggtgggcctgtaatcgtatgctctctgattgttgctatgctcgctcttatcatagagtcaagcttcatgcgtccatactactggatgttgataggtatggttgctgggcagattgccctaaacaaaaaagccagagaagagaagaggtaa

SEQ ID NO: 208813 - DNA, 228 bp, Klebsiella oxytoca
atggagatcgtaagctacgaggacttttatttagttaaaagcaatggtgattttattggtgggcaatatgattcagaattatcagcatcatatgccattgaaaagcttgacgctcgcctggctgaggagttgtggtcaaagaaagtgtctggacaaaatgaatcaccaacaaaatatatatcagtagaggatattgatagttacttactggaagcatatataacatga

SEQ ID NO: 208814 - DNA, 1959 bp, Klebsiella oxytoca
atgcacatggcagaagttccattaccaacaccgacacaggctcctgttccaagtactgacattcgtaacgctgtatttgcaggcgcaaagcttgacgaagaggtaaccggaaccggtgatttttatattgaccgtttgggcgtaaagcatcttacaaataacggtaggagcaatcagttccaacaatttctactgtcgtcaggatatgttttccttggggactatgaagatggcccatatcagtttgacgcacgaaaccaatacatccgatacgataaccaatattatcggctcaacgcctcgactgatgttggttttacgacaacagggacgaacgatgccagctttcagaatgatgtcactcattttgttttaatggatggagatacgcttagacaaaacctggcggcatcgtctggattaagcctaattggagggttgggatacgtcacgccgcaaatgtatggagccatatcaggaagtagcgctgttgataatactgttgcaatgcaagaagcaattaatgctgcgagtggcaaggttctagatctgcgtggcgggccatggcgtgtatctgcaacgctcgattttaccaatttacgcgggataattactgattataccggaaggatattagtaaaccccgttgggttttccgctcttcattcgcgtaaatttgcggttacattcggcaaccctgacactccttttggatcaaatcggtgtaaccatttcacttgcataggataccttttagttgagtcagataatcgtgatgctgaacttagcggagtctatattaaaggtgccctaatgagtttcgggagcattcgtgccactaggtttaatggtcacggactgcgagccgacgcgtggtgggattcctcagttgcatccatttcttacgaattatgtgggaatacatctttatacgcactggacttaaacccctatggggatacttctaactgtttatttattggtaggattcaggttgaacaggcgtatcaaaaacagatgaacattaatattattaggtcagtgatagggtcaatacactctgagcgactaaaaatattaacgttggatgacggcactacaggattaccgtctggcttaacttatcaaaatacaaatataaacataaccaatactacaattggtcaaatgattttagatgccgcggaagatactgcagcagggacggttagcgtgactccttccgtcagattaaatttatatgagagcgaggtaagtagcttttatctagcgacaagtgttgtttcaagtacattcggacaaaacggggttgttaaatcgtcttcgttctataaatattacaacccatcttactcggtaacgatgatcggttgccgagtcacgcgaacagcaggagatggtctagcagtagtcggcggctcgggctttttggcccttaattgcacctttgatactttcacgccggactataactcctctggaataacgttacaaaaatgcaccataaatgccacctataactcgacaaataccggggtttcaggggttgtatttgatcagactacgtttaacggcaacgtaagtggaaccggtccgactgaggtctccaaacctactgaattcaggtcctgcaatatccttggcaccttttcagggacatttcaacacagggcaatcataaaaggtggatatattaatgcggtgtctcttgtatcaagagcctatgctgagtttgaatcagttaaaggtggatcgtttacgtacaccggagatcgggcttttgtgactcgcggatgtagtttcacaactgtaactctctgggggcctccaacatttggagcctacaaggtgggccagaggactcaaaggataggtgccatgccatcaggaactggagttgagtatgttaacactactgatgcaggtgctaattttgtcgcaatttctactattccataa

SEQ ID NO: 208815 - DNA, 639 bp, Klebsiella oxytoca
atggttaacgatgacgagcgcaggccatatccgccagttaacttcatcgcctccgacaactggcagccatacaccaggctcattcccgcaaatgaagtgcatgagtgggtaagccgccaaatcctcagcgataccggcagcattcataaccctgaccacggacatctgttagaggctgatctctgcttcatgtgggcgtccgattcgttcgcgaagaaagggcgtttagtcctcggtcaggccgagcaggtaatgctccgcgccggtggatggcagaaagccagaatggaacagcagatgcatgaatggttcggacgcatcccgaagttcatcatcacgctggcagccgactactgctcacaatgcagtgaccttgaattctgcgctctggtagagcatgagctttaccacatcgcccaggccaccgatgatttcggcacgcctaagttcaacaaagagaccgggcagccagtgctaacactgcgcggccacgacgtcgaagaattcactggtgtagtacgtcgatacggcgccagcaaagaagtgcaagagctcgttgatgctgccaatgcgccagcagaagtggctcacatcgatatagccaggtcatgcggtacatgcatgctaaagctggcctaa

SEQ ID NO: 208816 - DNA, 339 bp, Klebsiella oxytoca
atgggtattgaagagaatttgctcgaaacactgttaaagcatgatgttttccataatgaggatggaaaagtatcgggcattgccaagcttgctatcgacaaaggatatgcaactttatcaccagcacaaaagagagtaatacaaccgtttatgagtcatggttgtgagggttacactgatcctggtggacatcacaacggttgcggaaaggttcttgaaggtgcagaacttgatgaagcttatgaacatacctgggagcatggaggcttactctgcgaagactgtcgagaacaaagtgattatgacgattaccgtcgtgataagttcatgaaagactaa

SEQ ID NO: 208817 - DNA, 798 bp, Klebsiella oxytoca
atgtcagtaagtcagttaatctcaaaatctacagttagaattgagtgtgatgtagttggaggtggcgtgtcggttggtacgggattttggtttggtttttcaactacagaagattcaggtctgccattactcgtaacaaacaaacatgtgattgctaattccactaccattcgtattagattaaacgtttcatccactgcgcacccacaattaaaattttatgacgtaacaattaataatcctaatgatttcatacagcacccagacccaaatattgatctttgtgccttacctataggtccttttctaaacgagttaggttcgcaagggatagaagttgataaatttttcttcacagatcgtagttttcttaaccagcatcacgttactccagttgaagaagtttttatgactggctatccaaatggcttatgggatacggtcaataacaggcctattaccagaaaggggatcactgcctcatcattgcttgaagattggcagggcaggcctgaattcatgattgatatggcctgttttgggggatccagcgggtcgcctgtgtacattatgaatgaaggcggcttttcaacctcagatggatgggcgatcggaaatagatttatctttttgggggtgttatatgccggcccaactcttgatgtaaatggaagtattaacatagtagatgttcctactgtagctacgccagtggttagcacaacgttaatgatgaatttaggtatggtgattaaggcagagcagttgaatggactcaggccgttgctaggtatttga

SEQ ID NO: 208818 - DNA, 471 bp, Klebsiella oxytoca
gtgattagcgcactggttaagcgttactggctgcaactgattgtggtggcggtaatcggcatgctggtgctcttcgtgaaccactaccgcaacaacgccatcgcctacaaagaccagcgcgataaagccactaagaatctcagcctggctaacgcaaccatcaatgatatgcaggcccgacagcgagatgtcgctgcgctggatgccaaatacactggagaactggctgatgcgaaaaagcagcttgatgatttgcagctttgtgttcgcactggcaagtgtgggctgcacgtcaacgccagatgtcccgcgaacggagcgaccagcaccggcagcctgggcgatgcttccagccccggacttactgactccgctgaacgggattatttcaccctcagagagcgaattgtcacagtgacgaaacaggttggatatttgcagggctatatcaaagatcagtgtatgaaataa

SEQ ID NO: 208819 - DNA, 327 bp, Klebsiella oxytoca
gtggataaatcatcacgcctatgggagcgctttgaagatgccgctcacgataacgctcagcaaatgaccagtattgccaacgatgcgattacggcacttgaggctgcagagagccgtgtcgcagaacttgagcgaaaacaagagtctcttcgcccggtcggcgtaatgagtgagaaagcgtatcaccgccttgaaaacagagagtcacgctttattgcactctggcctcgccccgagatctatttaccgcgtaagcgcccggaagatggtgtgatcgtctacgcacgaacgtcttttgtggctgccaacaaagcggaggctgagtga

SEQ ID NO: 208820 - DNA, 222 bp, Klebsiella oxytoca
atggaaacaatttctcaacgcctcaagcaaaaacgtgaagagatgaatctgtctcaggaccagctggcaaaactggcgggcatgaaacagcagtcacttcaggccatcgaggccgggacaactaagcgtccacgttatttggttgagcttgctcgggctctgaaatgtgaacctgaatggcttctttttggcgatgagccgaataaatcaacagccgcctga

SEQ ID NO: 208821 - DNA, 633 bp, Klebsiella oxytoca
atgagccttgcggatcgcgtaaaacaaaaaagaattgagctggggttaacccagacggaagctgctgagaaggccggtattcggcagcagtcatggcagagcattgaagatgggaaaactctcaagccacgtaatataattggaatagccaaggcgctaaaatgcgatgctgattggctaatgaacggcggcgcatttatgccgatggcagaggtcaacagcaggagagttccgttgataagctatgtacaggctggagcgctggctgagaaaaaccctatcgaggcctttgatggtagccttgaatatatactcactgatctggatgtgtccgagcacacttttgcgttgcgcattgaaggcgactcaatggaacctgacttcaaagcaggagacgttattatcgtcgatccagaggttgagccaacgcctggagaatttgttgtagcgaagaacggcggtgcacaggcgacctttaagaaataccgcccgacatgggtagaccctctcggctgccagcactttgaactggtcccgctcaatgacgactaccctgtcattaacagcgatcaacagcctttaaccattatcggtgtaatgattgagcaccgcatttaccgccgcaaacgctaa

SEQ ID NO: 208822 - DNA, 189 bp, Klebsiella oxytoca
atgcacaagtgtcaattctgtgggtactttctggcatctgaacagatgcagagaatatctctaaacatggttggcaggccttacaacatctgcattccatgctcagaaaagtacaaaaataaaggcctgtgggattcggcaaagaacgatatcgactggaaagctcttccatgcgtcgatgagacataa

SEQ ID NO: 208823 - DNA, 240 bp, Klebsiella oxytoca
atgagcaacaaaactggagggcgcgctttcccgtgcgattctatcgtggagcgcgacgaagttggtcacttacatggtttcgaagtcagctctggcggcatgacgctgcgcgattacttcgcagctaaggctatgcagggtcgattagcgaatcctgagtggttgtgtagcgatgaccgcacggcaaccgaagcataccaagttgctgacgcaatgctccgcgcccgggaggcatcatga

SEQ ID NO: 208824 - DNA, 1362 bp, Klebsiella oxytoca; identical to SEQ ID NO: 98090

SEQ ID NO: 208825 - DNA, 2985 bp, Klebsiella oxytoca
atgaaacagctcaaatctattaccctctccaatatccgccgttatggtgccaacaccaaaatcgaactcagcccgggagcaacaattcttcttgccccaaatggcacagggaaaaccgcgttcttcgaagcgattgaatttagcctaacaggtggtatctcgagactgggggcaaatctttcacccatcatcagggacaatcagtccttggctaaagttattctggatttcggtgatgtaagcgcctctgcccaggtaactccccaaggaaatgtagaaagggcgggtgatctcagccccattttcccggaaacgaacgcggaagatatcccttttttactgagactgacccatttattggatcagcgcgagggagaatggcttgtcaaagcagaggccaaaattgcgggctcgcagctggaacgtttaccaatcggtaaggacggatcccaggtcagcacggctctgggcagtattcgccgagtcctgaatgataagcttaagcatgcaaaggaggcagttgagcttctcgaaacagaatatgcggaatggcaaagcctagtgcttgaacgggatatggccgcaacccaatctcagggcggtctgcgcagtaaagaaagcatcgcagaatccatctcgaacatcgcgaagcaaactcagggctcagaggcattacctgcaggactattggtgccgccagtgggagtggatagcctggaaaccatgcgcgatgcgttagagcaaacagtacaagtcagtctgaaaagactcagggagcaaattgaagggcttgtggaggtggatggactgattggccgtttcattgctgagcagacgcgatcagaacagcttggtcatgaacttatagcggccagacaggctttaacgcaaaaacagcaggaacgagcacttatcgtcgggacacaagagcgacttcagcgtgagttgctgcaggcagaaggcgagcgggatttaattatccagcagcttaaccggcttgaccgggaggcgcaaaccaaagaggcccttaaacaacgcaagcaggccttggaagtggctgataaagcgttaagcgatgccgaatctctagcctcaaccttccggaatatacatgaagggagtgaacggctcagtgccgagcatgaactcatcaataaacagcgtaaggcactgcagatcattgatactgagcttttggccgctcgacagctcatcaggcgctgggaggataaccttcagcaccttatctccattacctcagccattacacaggaagaatcacaagaaaaattactgcaggagcgagttgggcaagcaactgtattaaagaccaacgctgaagcagagctactgacgttgaagcaggctcacgaaacgttaacgtcaacggctgataccataaggcaatctgttgcatccattgcggcatatttgcctaaagatcgaggggactgtcctgtctgtggcgtagatcacggtgctgcaagtctccatgaaagaattaccaaatcattggaggctatcgatccgaaagttgtcgaggctgaacaacgcgttaagattgcattggatcagttacgccagtacgcggaggcagttactaatgccaaagctgaactagatacgtgccagcgtaacatgactgagttgagctcccgacaatctcttttaacatccgaaatcaaccaaatcaaaacggacatacttttagaaggtgatacgattgaattagcaaaagcagctattcagcgtcgtgacgagtcaaatgcttcagccaagcttcagctcgacgaaaaacagcataaccttgcatctcctcctacacctgaaatgcttgaagcgtcaaaagcaactcaccaatcggcgatccattctgtggatacggctcgggaggctcgagcgggggccctggcaagccttgagcaatcaacagccgcattagcagcaatcattgcagatgcgcgtcccttgaggacactggatgaattgtcggcggcgcaaagcaaaaatttagcccagctcagtgaactcgaaacgaaagctgcggcagagcaatctgctttaaaccgacaacaaattcagttaaccgaaactaatgaccgactgactggcgtcgaagaacagtttactgacgcccaggctaagctggcagcgatccgcttctcatggcgacagctgtctttctccggcgatcccgcggtcgacgtggcgaagagtaaagagactcaattacaatcatctgttgccgagctatcacgccaaacagaacagttacaaacgctcaaagtcgaaattggagcctggtttaagctggagcagaaacgtatagcgcaaggcatcatagatcgtcgtcgtggctccttatcagaggaagagtttgttgccagcctgcggcagcgcattgaaaacgaaaattcgagccgaatgcagttgttgcaattatctcaagcaatggagacgctcaataccaaactgtctgccgaaatatcgaatgtgcaaaaacatgtactgtcggtcattccaaggtggcagtcgctcctgaagcgcgtcgtcagagagcagcgttttacgggtaccaaactaggttttcgcagtatttacaaaaaggggcatgctgaagtgtccgtgcctttacatggaggagttgctccggtcccggcgattgcaagcgaagctcagttgacagatctgcagttgacatttctgctttcaatggcgcttgaacatcagtggtcctcatggcgcggcctgctgctggacgatcctacgcagcatcatgatctagtccacgccgcgtccgtattcgacttgctgcgtgattacatcgttgaccatggttttcaggttgtcatcgcaacgcatgatgcccttcaggcgcgttatttcatgcgcaaactgcaaaatgatggcattgatgcacgtttgtggtcactcgttccaacacctgaaggggtgacggcatctgagatgcggataacaaggtaa

SEQ ID NO: 208826 - DNA, 600 bp, Klebsiella oxytoca; identical to SEQ ID NO: 98087

SEQ ID NO: 208827 - DNA, 1908 bp, Klebsiella oxytoca
atgctcagaaggttccggttagagcggaagtctgattatgagaagctggtgattgctcaacgtctggcagatatgcttgaaaatttcttgatcggcaggcttacacctcttgcaatcggtgccgaacagggaagcattgaggagtgggacgatgtggtgattatgtactcaacagaccactacgagcatttacagattaaacgtcagtcaactgacttttgtactaaaaatcctgatcagactaaacagcccaaaaagaaacccagaaacggctctgtagacaccgaaccaaccccctctgttctagacactgcattctcgagcctagcccgcaacgctgcatcgggtaaacttgacgaaacaccagaccgcaagttcaaactaatcctcgtcggtctacacctttttataaaaaacagtctctccgttaatcacctcgaagaactttgtgaactttgccgtcgcccagggctgagtcttgatgatcttgccagcagacaggatattccaactcagaatgcgtacttatggctaacgacctggtgtggatttaaagactgggaccagataagagatgtgcttcgccgagttgagatcgtttgtgtaggtaacgatgcaacactaaaagaacgaacgcttcattcgcttgggcgtaactttagcaatccggaacgcacactgcagcgtctgattaactacattgctaccgagacaactgacgtttcggcgataagatgccatgacgttgtcaatgcactgcgaagcgaacttcggcctgataccgtaacttgggctcagtatcagttaagtgacggttcttcagcggccagcggcccttggtcattagctggtacgctcgatcttgccaatactacagtcagtccagcaaaggccattgtcgaacacatgtgggggattaattctgccccccgaacactcagagtgtatgctgcatattcccaacctcccgtagctaatctctctctttcctcagcgattgtgcgtatggctttgcatctgccaaatggcattcaggtcctgatgttaggtgaatccatatggcgaagcagcattgcccaggaaatcggtcacacacttggtggggccgaggatgatttcagcggcttgccatggattgagaatacagaatgtctaacatgcgcgcaggatcatgaattcaatacgttgcgcactgtcagggaagaagctgaagcactcgccagagctatggacgatgtgctatggcagcgtctgcttcagcatgtggcggacaaactcggcactatctccgatccagcactcgccgatgctatggacgcagtctggaattcatggttagttggattcacggctgtacctgaaagccgccgcagatttctggacaggcttttgtatccgaaaacggagaataaaaatgaaaaacatgcgcttcgcttgggaccccgaaccttaagcctgctcgttgatgcagtggaaattttgttgttggtatctgtgggtttttcaactcgcaacaaccactgggaattctttgaggatggagggacagtaatgagtatcgctcttcaatactggtctggcccagctagcggtcgaactggggtccgtgagttgtctgatgatccgttaatcgacgtgatcggtcctgaccctgatcctatcatcatcctgtctggcgtgcgggcaccatcatcaatgttattaaatgcaggaatggctgacgacgctgagacagcgactagcatggcggctgagcgtcagccacatctgctcgtgacccgatctgaaatgtatcgccatttgagtagggggacgcttgagtccgtacgcaaatacttcggccagcaaaggatagaaaggcaacgcgcgcgtgaagcggcaattgataagacgacaaagggagcctga

SEQ ID NO: 208828 - DNA, 768 bp, Klebsiella oxytoca
atggaatcaagagggaattacttagtaaagcctattgaagagcttggaaatggagcatttggacgcgttgaaagaattgaactttataatacgagcggccatttgtgcggagaatatgcacgtaagctactgtgcgttaaagatgatctaatcggttctctctttagttatgatgattggcgacgaagatttgagcgcgaagttaagtatcaagccgaatgcgtaaactcgcatgtggtaccagtatgcattcaccacttggcaactgaaaacccatggtttgtaatggaattggctgaatccgatttgagaacagccttggttcgaggtcagctaaacgatagcgaaaaaattgaaatcattatgatgatgcttgaaggtgtcagctatgtgcattctaagggttacctgcacagggacctcaaaccagagaacatcctaaaatttaaagatggacgttacaaaatctctgattttggattggtgaaaaacactaatcttgaggctcagtctgaagtgttaactaagatagctgttaagatgggtacggacgggtatatggctcctgaggctcagaagggtatttacaccgaaaaaacagacatctatgctcttggggcaataattcatgagatcaatgtgggcaacatagacggtatcgacacaatgattggtaaggccacaacgttcagaccagctgaacgttatgcgcatgtgcaccagatgattgctgatttaaggaaaataatccaaaggagaacggcatga

SEQ ID NO: 208829 - DNA, 738 bp, Klebsiella oxytoca
atgagtcatctgcttaattgcggcttcttctcataccccaaagatgtcgaaagaggtaatcaagactctttcctactccctaaacacatagatggcggatatgttttggctgtggctgatggtgttggatcgtatcttggtgcaagagaggctgctgatgctgccatttttactacagaaattttatcctcgaacactttgcgtgacgtcgcaagcgcatttgaagcaataaagaataacgtagatattttgacagaacgcaataatcaatggttcaaagctgcaacgactttgtcctactgctttattgatgatgagtatttgcattttggacatgtaggcgacacaagaatctacttcaaatcaggtgctagactgattgccctgaccagagatcatacgcagcaccaagagttgctagatgagggcatctacactaagcgtgaattgcgggatatgccgggtaaaaatgctctcacgtcagcaatttcaaaaaatttgcctttgagatttcaaaaggaaagaattccattatcgagaattgcagatgaaaatggtgtcattactctgtatttaatgtctgatggtgcacatcatttttgggaaaagcgcccaaggctctcggttaacactttgtcaaaaggaccgctttttgcatcaagcttacttaagcgaatagagaggaatgaagctatcgatgattacaccttgatagccgcatctttcaaagtatcctaa

SEQ ID NO: 208830 - DNA, 348 bp, Klebsiella oxytoca
atggatgataaaaggtctatagatgtatacgctaacagtattgatgaccttgcgaacgctctttcaaccgtgcctggctgggatgtaggagcaggtagtacccctgatttccagattgctctgataagaggtaatgattttataaatttcagagtagaggaaactcagtacggagttaaggcgcattctgtgaatatcctgcctcaggatacagcacctgcaccagccttagctcaggatgaaatttataaagtttaccaaatgttatcatcccttccccaagaatacggtattggagttcacattaacgtatcggatcaggatgtcgaaaaactatccaagctttaa

SEQ ID NO: 208831 - DNA, 564 bp, Klebsiella oxytoca
atggcactcaccgacaagcaagaaatgttctgtcgcgagtacctcatcgatttaaacgccacgcaagcggctattcgggcggggtacagcgcaaagactgctaaccgcactgcgtccgaaaacatgtcaaaacctgacattcaatccagaatcaccgaacttaaagcgaagcgcaacgaggatgtatctatcaatgctgagtatgtcctcaagcgtcttgtggaaatcgaccagatggacgtgctcgacattctcaacagcactggcgagctaaagccggtagctgagtggcccaaagtatggcgcacaacgctatcaggtctggaagtcatggaaatggcatccgaaggcaatgcggcggctcttctcaaaaagattaaatggcctgacaaggtgaagaaccttgaactgcttggcaagcacatcagcgtgcaggcgtttaaagagcaggtcgagcagaaggttactgcgactcataacgtcatgcctgtcccgacttgtgacaatgtggatgaatgggaggcgacagcccagaaacagcagagcggggttctcggtggatga

SEQ ID NO: 208832 - DNA, 1113 bp, Klebsiella oxytoca
atggtaacggcgaatgagaaattacgcgatgagtctatcgctcatgcaatctgggtaagccgctacagcacgggcgttgctaatcgcatggtcaaattgctcaacgagagtgacgcagagcttacggcgcgtttactggtggcaatggatacccttgatgctgacagcttcactgtgacgcgcttagaggctttactgtccagtgttaggcaggttaacagtcaggctgtgcagtatatgcagtctggactgtcaaatgagctactcaaacttgcgcagcacgaggctggttatcagctcagtctgttcgagtcagccatacccgacaccatcctgaaccttcacccacttctcggcatctctcctgatgctctgtatgcggcaacgatgtcccagccgtttcaggggcggttgctcagtgaatgggcctccggtctggaagccgacagaatgacgcgcatcacaaatacggtgaggcaaggatttctgctgggcgacacaaccgagcagatagcgaggaaggttcgaggtcatgccaacaagggctatcaggacggcgcattgcaactgagccggtctaacgctgccagtattgcaaaaacggcggtgggccacatggcggcgacagcaagaaagagcttcgccagcgccaatgatgacattatcaagggcaagcaatggctttccactctggacaaccgaacgtctcaccagtgccagatacgcgacaggttgaaatatacgctcgacggcaagccgattggacacaaggtgccatatctatccggcccggggcgcatccacttctgctgtcgtagcaccgaaacttacatcctcaaatcagccgaagaactcggtattgatgttcgtgaattgcctgaaggtactcgcgcgtcaatggatggacaggttgcaggtgataccacttattccgaatggctgcagcgtcaatcgttcgccaggcagaaagaggtcgttggtgaagcccgcgcccgtctgatgcgcgatggcggaatgagttacgatgagttctacaccgataagggtgaatggctcacgctggaacagttgcgggagcgtgacgaacgggcatttcaggatgccggaatttaa

SEQ ID NO: 208833 - DNA, 546 bp, Klebsiella oxytoca
atgctgcgatactcgccctcgatgatgcctggcgggatgcatgggcagcggagcaggaaaaacgctctggctcgaaatagctccgatcttgcctcacctcttctctatgctaacctgtgtgcaaatgttaatgatggggatagggatatgaaaattctggggtacataattggagctttttttgtgattatcgtgctggtggttgtggtgactaacgtatcagatccttccccaagcgatgccacttcttttgttgaaaaaggggtgcgtaatatgatgaaagaccctgactcagcaacttttgataatgttagattttatccagattcaagtccgcagggtgaagagataagcggtgctgtctgtggatatgttaatggaaagaatagctttaatgcatacacgggaagagtacgattcttttcaagaataaccgtatctaacaatggaagaactgccgactattcacgcccaacgattgaagatccgagtaatccaatctctgttggaggaatggataatgcttggggtgagtcatgcaaatag

SEQ ID NO: 208834 - DNA, 327 bp, Klebsiella oxytoca
atggataagagtttttatgttaaaaatatgttttggggctatttttcagccgcatgcattttattttttagttacgatagctatgaaacaaaaatgacttaccttaaagtttttgcaattttaagtgcgcttttatttccttttgcaaagtatttaatagagcagatttctttaaagtatttacagcgtaatgttatgcgccctggcacttttgatgtcccagatacctataaatttaccttatattgtatatttaattttttattcgcaattcccttggggatcgctttcttagttctgcaattgaagaaagccattataaaataa

SEQ ID NO: 208835 - DNA, 1215 bp, Klebsiella oxytoca
atgccagaagaaaatatgacagtaactcatgatgtaagcggtaataaaatcagtggaggtggtgttcattggggaggcggaggtaatactggcaaccatgacagcagtagtggtagctcatcgacgcaaagcccaagtcaaacacaggctggaaatatcattaataatcctacccttcgtaaaaaatttgaggactttgttaaaaaagctaaattaatcaaccccaaagctaaactaacactcaataagatcgaagttaatggcgatttatccattggtatagaaaacatgactaaggccgaagtatcgcaactaggtgtcggatttgtgggtgtgcctacaaacaccggatacacggctgcagttaccgtgaagacaggttataaaattccaagttaccctcgtgattacacgaatctgaatgcagacaatgcaaaattatcagctgttggggtttacatttctgttttacagggaatgctgcctcctggatataaaattgaaggcggtaaagttacgaccgaggtaaccaagaaagacattatgactgcaggaggtaagggaggtggcgttcgtgtcgttacgcttaggtatcgaattgcaattcctgttcttactgatgcatggaaaaagagcgaagctcttaagaaagagataaaagaaaaggaagctcaagctgtaaaagatgctgttaaatttacagcagatttttacacccaagtctcgaaatcttatggggcaaaggctgaacagctcgcaaaatcaatggcaagtcaggttaaaggcaaaaaaattcgtaacgttgacgatgccctgagagcgtatgataagcacaaggctaatatcaataaaaaaattaatgcaaaggatcgtgcagctattactaatgccctaaaagcggcagatatgaatactgttgcgaaaaatatagctaaatttagcaagggagtcggctacgtaggcccagctatggattctattgatgcttttaatgaacttaaaaaggcagttgagactgataactggcgtcctttctttgttaaagtgcagacaatcgctatcggtttagccgccacgcatcttgcagcattagcttttgccgctgttttgtctggtccggtaggagtgctgggatatggtttaattatggctggaattggtgctatcgttaacgataccattgtagaagaagctaataagattatcggcatttaa

SEQ ID NO: 208836 - DNA, 282 bp, Klebsiella oxytoca
atgcaaacagaagctgaggttttaacagatcataatgagctaatttgctcgaccagcattgagcgtatcgtcaccggacgcgatgctgcgctgaaacagattgaggcgctgatttgtcagctagatgacgtttcccgactcacttcagaaattggcggcgacatagcgagtcattgggcgatgcggcagggccatgctttcgactgctggctggtgcaacctgtaataaagcgatgcctgtcatcacccgtaatatcgaccgtagcatctggcgtgacctga

SEQ ID NO: 208837 - DNA, 813 bp, Klebsiella oxytoca
gtgactcggattccgacagcgactccgattccgacagcgattcggactctgacagcgattcggattccgacagcgattcggattctgacagtgattcggattctgacagtgattcggattctgacagcgactctgactccgacagcgactctgactccgacagcgattccgactccgacagtgactcggattcggacagcgactcggattctgacagcgattccgactctgacagcgactccgattccgacagtgactcggactccgacagcgactcggactcggacagcgattctgactctgacagcgactcggattcggacagtgactcggactctgacagcgattcggattccgacagcgactcggattccgacagcgactcggactctgacagcgattccgattctgacagcgactctgacagcgactcggattctgacagcgactcggattctgacagtgattcggattccgacagtgactccgactccgacagcgactccgattccgacagcgactccgattccgacagcgactcggattctgacagcgattcggattcagacagtgactcggactctgacagcgattctgactccgacagcgactcggactctgacagcgattcggattccgacagcgattccgactccgacagcgattccgactccgacagcgactcggactctgacagcgactcggattccgacagcgattccgactctgacagcgactcggactctgacagcgatattgaggccaaccccgatagcaacagcccggacgttgtcgcgctggaaggtaacctga

SEQ ID NO: 208838 - DNA, 573 bp, Klebsiella oxytoca
atgaaagttatcaagtattggaaagttcagctgctgcagctttctcagccttccagcaagcctcccggcattatcaacgcccgcaatctggtagaaagcctgttgtttgaggggtactcgaaagataaaccgaaaattaacctcggttccggagtaaatattgagttatttacagcacccgattcgctggaaacccgtatctttcgtgaccacctcgttgacagtgtgcgttgcttcccggtgtgtgaagatgatgatgaaactgacggaacccaggaagagcagactaagccgccctcacgcgaagcgatgattgaatatatcaagcggtctattggggaaggctatcagcctaaactcttccatgagctcgttagcaatcctgacctgctttgggaattgcatgacgaggcggtcgattatgaatatcgcgcttgttggcgctggtaccaaaactaccacgtatccgacgttaataaggctcgcagcccctccttcgaagacgtcgtgaagccggtaatcaaacggcttaacgaaaacgccagtgcttatacatcagtttatatcgactga

SEQ ID NO: 208839 - DNA, 759 bp, Klebsiella oxytoca
atgcctattacagccattttacttgatatgaacggtcccgtcataccggggatgaaaacccttgatgactttactatttcaaactggttcgtcggactcccggatgtcagtgcaacaccgttcgctggttattattttggagagccagtgcctgatatcacttataactcctataacaaaaacgctccggccgtcatcaatggttctctgaataatgctgacggttatatctctgttaacaatactgattatctggatacaaaccagaaagcacctttgacgctgacaatctgtggtgtggctaaacggaatgccggaggggcttcactgaacgcccatatgatcgcagatttttcaggtagcggttcagcagcgagtggcttttcaattggcttcacgaacgggaccgggaatctcttttgtgtaggccagaataatggtcagtcctcggccgggtatgcctatgcggcattcccggcctctatcgccgtaggtgatctgttcgcgtttgctgcctcgataacccaggggacggtaaccgttgatatttacaacccgcagaccggggcactgatatcatcatcagctgctttctctgggacccgagtggccggaacaaataatgtcctgctggggaggaaaactgataacaacaacgaaacaacgaccaagtatatcaagtcggttttgttgatggagggcgtgcttacttcagcagagaaggtttctgttgcgcagttcttattgtcgatggaataa

SEQ ID NO: 208840 - DNA, 195 bp, Klebsiella oxytoca
atggctacgatcctcaccccgtctcacccgcaatttgtcttcgtgtttgccggtgttcgtcgcgcagaccgtcagccccgtatctgtatgcttcgtaccgttgccggtgacgagcacgccgcacgcctttccctcgttcgcgattacgtcctctcgtttgccggtcgtctgccggtggcggaggtgcgcgaatga

SEQ ID NO: 208841 - DNA, 876 bp, Klebsiella oxytoca; identical to SEQ ID NO: 174736

SEQ ID NO: 208842 - DNA, 420 bp, Klebsiella oxytoca
gtgcagccgattattgctgcccataaactcggcggcaaacagcgttctcgggctgccgtacatctcctgcggcgttccctgctgctcgatgacgccgttattgagcagcaaaatgcgatcggaaatcgccatcgcctcattctgatcgtgggtcaccatcagcgccgacagacccagcttgacgatcagctcgcgcaaaaagacccgcgcctcttcccgcagcttagcgtcgaggttcgacaggggttcatccagcagaatgaccggcgggttatataccagcgcccggccgatggccacgcgctgctgctgtcctccggagagctgatgcggatggcgattgccaagatgccccaggcccagctgatcgagcacgctctgcacccgctgtttgatctccgcggcggcgaccttacgtag

SEQ ID NO: 208843 - DNA, 612 bp, Klebsiella oxytoca
atgtgtataagagacagcggtaatctgccagcagccttcatcttccgtcaggtagccctgggcaatagcggcatcgatttgcgggcggatcgtccgctcgtcgaggccggtaaagcggctgaattcatcccgtggcgccgcttcgagcaggcggaaacggttcataaagaactcaaacggtttatctgtgttctcaacatcatgctggcgctccaggtaacggccttccatatagccgcgcgggtggcgggttttcgccgtccgcagaatgcgtccgtccgcaaacgtcactttaccgtgcgcgccgcagccaatgcccaggtagtcgccaaagcgccagtagttcagattatgctggcactgatatcccggttttgcataggcggaagtttcatattgccggtagcccgcggcgctaagcaggctatgcccctgctcataaatatcccacagcgcatcgtcgtcaggcaggaccggcggtcgcgaaccaaacagggtatttggttcaatggtcaactgataccaggagagatgcggcggattgagcgcaatcgcctggcgcaggtcgtccagcgcctcttccagagactggtccggcagaccatgcattaa

SEQ ID NO: 208844 - DNA, 1764 bp, Klebsiella oxytoca
atgtatcaagcgggtggaacaataagatcattactcgacaaggttgctgagcaggaatacctgttaccggccatccagcgagagtttgtatggcgaccagaacagatctgtcgtctatttgatagcctgttgcaaggttacccgtttgggacctttctattctggaagataaaaccagagaaccgggatagttatcagttttatcagttcatgcagcattaccatgagcgcgataactaccattgtgaaaatgtcactcagttaccggaacgcgagttcattgccgtcctagatggacagcagcggattaccgctttgaacatcggcctacgcggttcatttgcgtggaagctgacaggtaaatggtggagcaatgatgacgccttcccagtgcgcaggcttcacttgaatctgttaagccagcccgacttggaaactgggtcgatgtatgactttgagttcctaaccgacgataaagcctctttggatgcatctgaacaatactggttccgtgtaggccggatcatggaagaggaagaagatgcacttatcgatgaagttgctgatgatgctaggttgagctcggagcaacgcaaagaggctcgctcaactcttcgtcacttgtatcgaactatccatgacaaagataagatttcgttttacgaagaaagtgatcagagccttgaacgtgttctgaatatctttatccgcatgaatagcggcggcactactttgtcctactcagacttactactttcaatagccgtagcgcagtggagctcgttagatgcccgtgaagaaattcatgcattagtggatgagatgaaccgtgttggtgatggattcaacgtatcaaaagatctcgttttaaaagcaggcttaatgctctctgacatcggtagcgtgggctttaaggttgagaactttaacaaggaaaacatggcgattctcgaaaagaactggacgccaattcgtgatgcgttattgctctcaatgcagctacttgcaagttttggttttaatgcacaaaacctcagagcaacaagtgccatcctcccgttggcctattacctgcaccaccgaaagttaacggcaagctacctttctagggttgaatatgcggtcgatagagaatgcatcagaaactggctcattaggtcgttgttgaaagcgtcaggcatctggggaagtggtttggataccctgcttactatgcttcgctcagacattaaacaatcgggtgatacgggtttcccgctagcgaaaattgaagcgaccatgcaacagcgtggtaaatcgttgcgctttgacccagaggaaattagtgaactagcgcagttggattatggtaatccgcgtacctttgccttgttgactttgttgttcccaggattcgatttttcacgacactttcatgtggaccacatttaccccaaaggtttgtttacgcgtaacaagcttgcaaaagttggtgtcccagctgaacagctagatgaactcatcgaggcatctaataagctgccaaaccttcaactgttggaagggacaatcaacaaccagaagcggcaaaaaatgccccatgaatggtatgcgcagcagtggcctgatgtgaatgcaagacaagcacatctgcaatcgcaagccataacatcattacctgaacaactaaaccagtttatggacttttaccgcgagcgtcaggaaacactgcttgcccgcattagaactgcattacaacccgcaagcagcgtagagacagaataa

SEQ ID NO: 208845 - DNA, 3678 bp, Klebsiella oxytoca
atgaaaattgaacagattttttccaagaagttgacgcgtgatattaacggcgttgttaaagcggaacagaaagacaatgacagtgtgtatgtcgaacttgatgagtatgttgtaacccgagagctagatcgacattttcgcgctttctttgaggcttacgttccatctgtgacgcaaagtggcgcatcaatgtcaggaaaaattggtgtgtggatctctggcttctttggttcgggtaagtctcacttcctgaaaattttgtcttacctcctcgaaaataagtctgtcgaaaaggatggccaaggccgtcaagcatttgagttttttaaagacaaaatcaacgatgccatgctgttggccgatatccaaaacgctgttaccaaagacactgatgttattctttttaacatcgattcacgagccaatacggatgaccgagaaaatgccattcttaaggtcttcctcaaagtctttaatgagcgtgtaggatactgcgctgattttcctcacattgcgcatttagaacgcgagcttgataagcgtaatcaatacatgtctttcaaggacaaatttgctgagttgactcaatcaacttgggaaaaggagcgtgacgcctatgacttctatcgagacgaactttcagaagcactcgctcatgccagtgagcaatcattagagtctgccaaagcgtgggttgaacaggttgaaaacaatttcccgctagatatccgaaacttctgtaagtgggttaatgaatacttagatcgaactggagatcgtaaccttcttttcttagtcgatgaagtcggtcagtttatcggtaagaacacacaaatgatgttgaagcttcagaccattactgaagatcttggcacatattgtggtggcagagcttgggtcgttgttacctctcaggcagacattgatgctgccattggtggtatggataagcgcgatggcgaggacttctctaaaattcaagggcgttttagtacccgcttgcagctgtcgagctcgaatacctcggaagttattcaaaagcgtttgttgtccaaaacggaagaagctcgtacacacctcatcgatgtgtttgctgaaaagggcgacattcttcgtaaccagctgacatttgataaaacgacaactgcgtctctaaagggctacaccgacgctccgtctttcgtggacaactatccgtttgtgccttaccactacacgctggttcaaaaagtgtttgagtcaattcgaacaaaaggcgcgacgggtaagcacttagccatgggtgagcgttcattacttgatgctttccaatcagctgcaaaacagatgaaggactctggccttgatgtgttaatcccgttttacagtttctatgcaccgattgaaagctttttggagccagcggttaagcgaacgattgaccaagcctgtgagttggattccttaacagaattcgatggcaagattctaaaaactcttttcttgatccgttatgtggacgttgtcaaaagcacactagacaaccttgtgacgctgtcaattgatcgaatcgatgcagataaaattgcgctgcgtaaacaaattgaagagagcttgaatcgtcttgaacgccaattgctgattgcgcgtaatggtgatgaatttatcttcctgaccaacgaagaaaaagagattgaaaacgagatccgccacactgacgttgaaatgtcagaggtctctaacaagctttcagcaatcgtatttgacggtattttgaaaggtaatcgtgcctatcgatacccgattaataagcaagactttgcggtgagccgtttttgcaatggtcatccaaaagatggcaccacgctggaagatctagtcattaaagtcatttcacctttggattcgcactttgaaaattactcccacgatcaagcctgcatcaatcatacgcttgaggctgatgggtgcgtgctcgtcaagctgggcgaacataaacgtctttgggatgacctgacaacctttataaaaactgaccgattcttaaaacaaaattcaggacagcgaccagagcaagaacaccttctccgcgaaaagcagatggaaaatattgagcgtgaaaaacgcttaagaacggattttgaagctttgtttgcagaggctgacgtttacgctatcggcacaaaactaccgaagaaatcagcaacgccaagtgccatcgtcgaagaagcatacaaatacgttatcgaaaacaccttcgctaaattgaacatgctcaaggcgacgcctggtgaagttttgcgtgagctacaggccgtacttgttgctgatgatattgctcagagtggactggatcttcaagcggatgaatgtaacccagaagctacgcgtgaggttgagcagtacgtaacgctaaaagtcgagcgtaatgagcctgtttacttacgtgacatcgttgcccacttcggcaagcgcccgtatggctggccagacaatgaaatcttattgctcactgcaaggctgggcttggctggaaagttatcttttagtacccagggcacagatctggcgttgaaaaaagcttacgagccgtttaccagcgtgcgtaaacgcggtgagatccgtgtacataaaatcaggcaacatgacgagcgccaaatcaaaaaggctgctggtcttgttaaagagatcttttcaaaaacctttaccggctctggtgaaaaggagctctacgaattagtgcgcgatgaattactggcttggaatgaagagcttaaatcattcagaaccaagtcacagacaggccatttcccaggtaaatctcaaattgacgatggtcttgcattggtcgcgggtattcttgagcaaacttcaagcttcgctcttatcacccgattcttagaaaacgctgatgcccttgaagagtttgctgaggactttgaggatcttgatgacttctacaatagccaatttcaaacttggcaagcccttgctggcgcattgaacgagaagtttaaggccaatagacccgcgttagaaaaagacagtgaagcattaaaagcgctcactgaattagaacgcatttacaatatgccctcaccgtatgagcagctgcgccacattaatccgcttatcgagcaggtggcaaaagttaactcaacattggttgaagaaaaacgcactcatgccttagagcgtgttgatctgcgcatcggacgtgtaaaagaagcgttagctgaagctcatgcaccgtctgaactacagaaccaagcactgcgcccgttacaaatgtgcagacagcgcattgaagcgacctcttcaataccacaaattatcagtgagcaaactgaagcggaaggttacgaggacgaagcctatgagttgctgaatggctttatcgaagatcaacgcaaaaaagctgaagctgagcaaagacatcgtgaactcgaacagaagaaacgcgaagaggaagcagcgaaagccggtaaggcagctccagcacctgagccagcccccgaaccagtacagccacagccggttgcaaaacgtactgtaacgattaacccaaccgatgccatggcaaagtcagtaacaaccggattcattgagagtgaagccgaagttgatgcctatcttgccgctttaagagagcagctgattgctgcggtcaaagctggcgaccgagtaagaattaagtaa

SEQ ID NO: 208846 - DNA, 585 bp, Klebsiella oxytoca
atgaaggctcttcagaccaggcttgatctgatactggaacgaattgaaagccctaagtttttgaaaaacgatggcttgggcaatgaaattggattttgggtatttgactatccagccaagtatgaactgcttgtacgagagcacattaagcacgttgacgaaaaactcaacaagcgtggttaccgctttgtccatctcaatatttttgaagtcttgatagatatgcttgaggagcgaggccttttcgaccgagcttgccagcgtgaattgcaagtcggtgttgatggccttcgaaaaacactagccgggcctctgagccaagagaaagtggcaaggtatatcgcggacaaatataagccatcagaacttgagtttgtgttgctgtcaggcttaggcagtgcgtggcctcttatccgaggacatgagttacttagtgctctgcaagacgttatgggtagcacgccattagtgcttttctatccgggtgaatatagcggaagggatttgcatcctttcggcatgatcgaatctaaaaactactatcgcgccttcaagcttgtgcctgaagacggtaaaaaaaattaa

SEQ ID NO: 208847 - DNA, 600 bp, Klebsiella oxytoca
atgaatataaaagaatatttaggcgatcttatcggaggcagtttattgataactgaatctagaataatcgcagaatcgctattgaaaaaacttccagaagatgagtggaagtcgctgatcgttgagcaaaatgttcttcagaaaaaatccggtcagacggctattcgttatgccagaacaatccgttggcgtattgaaggcctgggtgatgagtttatgactgatcttttagccgcgagtgaacgtgcctatgtccaaatgctgatgatgtcattactcattcattctccggttgtcgcttattttatgcgacttaccttagccgaagctcgtcgcacctataaaccctctttaaccgctgatgcatggtctgagttttatgacacgagagtgcgggcatatgctgagcttggcggtttttctgactcaactgtcaaaaaaatgggtaacaacgcaattaaggcactggttgatagtggctacctgagtgatagcaggacaaagaaaatacaacctgtttacctaatgccagaagttaaagactggttagttcgtctgggccgggaagatttgattgaggtaatggagtgcacaatatga

SEQ ID NO: 208848 - DNA, 888 bp, Klebsiella oxytoca
gtgcaagacaacactggacttgaagagcttagccaagcacagagagaacgactcgctcatattgatttcactttgttatttaaaggtgaagctgggcgtagttatttaaccgagcgatttagcgtagcgccgtctgtggcaacacaagattttgcgcggtacaaagagttggctcctaacaacgttatgtatgacgaaaagcgcagagtgcacttgaagacgagcgcattccagccgttgtttgattatgacgttgttcgaactcttgcgacgataagccaagggttcggtgatggctttcttggcaaggccaggccacctatggcttgtgaagcaccattccatctcaataagccgaaattggaagttgtagcggctattagtgaagccatacataagcgcgctgtgattaatattgagtacacctcattgtcgagtggtcatgggagcaggcaaatagttcctcataccctgattgacaatggcttgagatggcatgtccgagcattcgatagaaagcttagagaatttagggattttgttttaaccagaataagtgaagttgagttgttagaggatgaggttaacgacgaagttgagactcttcagtgggataagcaatggaaccgaatcgttgagctagagctgatacctcatccaaaactagcacatccagaagctgtatcgatggactacgcaatggaaaacaataggttgcgtgtagagataagagctgcgttcgctggatatttactgcgtttatggaatatcgattgttcaaagaattgtaagagcaatgggcgagagttccatttagcacttaaaaatccagaagcactatacggcgttgacaatgctgcactcgctcctggatatagcgaatcgtga

SEQ ID NO: 208849 - DNA, 972 bp, Klebsiella oxytoca
atgcgagttgaggtgatgcaattttacggcctgacaaatccgctgactcaggccggatactacgaaacggatacgcataagcaactgacgaaagatatcagagccgccattctggaagggaggctgatcgccctttgcggtgttgtgggttgtggtaaaaccgtgacgctccggcggctacagcaaatcttacgggaagaaaaccgcgtcactgtcgcaaaatcgctgtcggtggaaaaaagcagcatcaagctggccaccctgatttcagcgttgttttacgatctggttcaggacaaggccgtccagatcccgaaacagggtgaacgtcgtgagcgcgaattgcaggaactggtgaagaagggaaaacgcccggtggccttgtttgtggatgaagcacatgaccttaacgggcacacactaatcggactgaaacgcctgatggaagtcgttgaagatggcggtggccgattatcggtgatcctggccggtcacccgaaactgcgcaatgaccttcgaagacccacgatggaagaaatcggatatcgtacggagatttttacccttgacggcattgccggcagtcagcgggaatatattcagtggctgctggcgacctgttcagagcagcaaaatggtgacgcgcccatcctgacggaggaggccatcgatctcctggcgacgaaattacgtacgccattgcaggtacaacagcatatcactcttgccctggaagcgggttacctcaccggagagcgccccattacagcggaactggttgacagcgtgttgtcacgtaaacttgacgatctggaacccactctcacccgccatggttatcgcctgaaggatatggtcgaacagtttgatgccaaaccggcagaaatcagggcactgttcaatcatcagctcgatccgacgcgcaccgccgaactacgggatcgcattctggccgcagggttacccatttaa

SEQ ID NO: 208850 - DNA, 1425 bp, Klebsiella oxytoca
atggaacgttactgtgagctggtcgctgcacttaagtttcgcaccaccaacaaaaagggccgccatctttccacccgccgggcgattgaattactggaggattacggtgttgatactgaacaggggcattttcaggctccaaaaggtgtcctgacccgcagcaccgttaatcggtggctttccggctggcacctggaccagccccggttacatcgcccgccgccagcggttcgttttcaggccgaacacagtaatgagtgttggcagtttgatatgtcaccctctgacctgaaacatattgatgcccccgaatggattgacccgacaaaaggtgaacccacactgatgctgttcagtgttgtcgatgaccgtagtggtgttgcataccaggaatatcactgcgtgtatggtgaagatgcggaatccgccctgcgattcctttatgccgccatggcaccaaaagtcgatcccgcttttcccttgcagggcaggccaaaaatgctttacctggacaacggccccgtggccaaaagccgggtattccaggatgtaatgctgtctctgggtgtggactggcagacgcatctgcccgccgggaaagatggtgaacgggtgaccgcccgttcgaaaggtaaagtggaacgtcccttccgcaccgtcaaggaagcacatgaaacactgtaccattttcataagccggaaaccgagcagcaggctaatgaatggctgctgagatatcttcttcactacaatgaccagcctcatcgctcacagccgcattcacgccgcgaggactggctgctcaatctccctgaagaagggatccgtgaaatgtgcagctgggaacggttctgtcattttgcccgggagcctgagcgtcgaaaagtgggtattgatgccagaatcatggtggagggaacggcatacgaagtggatcctgaactggcgggagagcatgtactgttgctgtgggggctgtttgataacgaactgcatgttgaattcgaaggcaaccggacggggccttattacccggtctccggcccaattccgctgaaccgctaccgcgccttcagaaaaggtgcaatcagccagaaggctgaacgtatcagaaacctggcgcaacaactcagtctgcccattgccgcactgaccggcgagaatattacactgataacgcaatctgctccccccgacattcccagacaggcttttccggcggccgctgaagactgctatgccagtacgattgcggccaaactggcgattgccggtgaactggctaccccgctggcaaaactatcgcaggtggacaggctgtttattgaacagttactgagtgaaacgctcatacgccggattgtgctggaccgcgtaagggagtatttccgcagacagaaaaaggaaggcgatcatgcgagttga

SEQ ID NO: 208851 - DNA, 165 bp, Klebsiella oxytoca
atgcttcaaccgcttaaccaggtctttgtgccagtcttcaaacaatccatctacagttgtgagttgcttagggcgattgagtttccgttcagcaataggatcatctccggtggcaacttttcttcgagtatcctcagcgaggctacgtacctcagacagagatag

SEQ ID NO: 208852 - DNA, 135 bp, Klebsiella oxytoca
atgtcacgctctgaggcgtatgaatggcttgcgtccaagatgggtattccgcagcaagaatgccattttggctggttcacagcagagcagtgcaatttggcaatggcccattgcaacgacctttttaaacgataa

SEQ ID NO: 208853 - DNA, 189 bp, Klebsiella oxytoca
atggaacagattcaagttgaaggttgttctgattttggttgcggtcgcatcggtaagcgttcagtgctggggtggcgtatgagcaagcatggcattcgttcactgatttactgcctgctggtctgcggcgttatctggacagcggtgattatcaaaattctgcacgttacgggggtgttcaatggttag

SEQ ID NO: 208854 - DNA, 735 bp, Klebsiella oxytoca
atgattgaacacatggttcaaaatgaaaacgtgcgcattgaatttgctcagcggttagcgcaggcctctaaggaagctgggttggacgaacacgggcggggaatggttattgccaaggctctggatgtttcgccaaaagcagtcagcaagtggtttaatgctgagtcattgccgcgtcaggacaaaataaatgccctggcaaactatctaaaggttgatgttgtttggcttcagcatggcatagggaaggatgccataaaatcggaagattcactctcctatgcggggaaaatgaaaaagggacttgtgcgagtggttggggaggctgttttagggactgatggtgcagttgagatgaccgaggagcgtgatgggtggctaaaaatttacagcgatgatcctgatgcatttgggttgcgtgtaaaaggtgacagtatgtggccacgcattaagtcaggagaatacgtacttatagagccgaatactacagtatgcgcaggagatgaggtgttcgttagaaccatagacggacacaatatgataaaagtacttggcttcgaacgcgatggacaatatcaattcacaagcattaaccaagatcatcgaccaataaccctagaatatcatgaagtttcaaaggtcgagtatgttgccggcattctaaaacagtctcgccatcttgatgacacggaagctcgtgaatgggtaataaatagcttaacgacagcggactga

SEQ ID NO: 208855 - DNA, 1821 bp, Klebsiella oxytoca
atggtagctaagtcgatcgtcgacattgacgtaaatgacgacaagtttgtcgcgtttatggaaaggtttcgcgagtaccagagcgcgctggatgatttaccagaagcctggcgggtggccgccgtaggtattggtgaaagcagtaaggagactgaaaaagccaaaggtgaggcgaaggggttgggcgcagagtttaatgccgtggccgaggccattctgaccatcaacagcggtatcgatcggctcaataccaacttggaagactcgaagaaaaagcaggacgaattcaacaaaagcacccgatctgcgaagggcttcctcagcgatgcgacgaaagacgctaaatcgctggcagggcatatcaaggaagcgacggccagccttctttcctggggtggcattgtcgggatatttaccggcgtcctgggcgttggcggcctgtttggcatcaaccgcctggcggccaccaccggcgcccagcggtttacctctctcgggctcgggacgagcattggcgcgctggattccaccgccataaactaccagaaagcgctgggtaatccggcggggacgctgggcgctatccgagattcccagatggacctgtcgaagcgctggacgtttcaggcgatggggattaacaatcccgaccaggacccggccaaactgctcccgcagatgatccgtaatgcgcgcgatatcttcgtgcagaacggcagcacgctgcagggcgcacaggcgcacggcctgacaaacttctttacgctggacgaccttaaccgcttcaaaaacatgagcgatgaggaggtcaccgccatggagaagcgcgcgcagcaggatgcgcgcatgttgcaaattaccgaccagcaggcgcgtcagtggcaggattttaacgtccagctcgattacagcagccagagcatcaggaacacgtttgtgcgtggcctgggtccactcacgccgcagctgagcaaactgtctgatgcgctggcaggtgctattgataccgttcttaaatcacccgaactcggtaagtggattgatgcgctggccggtggcattgagaggttcggtaattacctggcttctcctgaattttccacagatgtaagcaactttatggacaaagtagagaaaatgggaaatctaattggcaaggttattgattgggtaacagggaaagcgagtatctctactgcggatatatcatccgggtcaacgatgttgagcccaagcaccatcatcgatccgaaaacgggaaaatcctatactcctggaagcaatgatgacccgcatgtatggggctggctcaagggtgttaggcgcttctttgaagatggaaccgttaaagctgttgatcccacacctgcaaatacttccgacagaaacaggactattgcagatcgatttaataatccggggaatctgcggtgggctgaaggatatagcagcgagaatacgagaagcggtaaatttgccgtcttcccaacgctggatgaaggcgtactggcggcgacaaagcaacttcaaatgtatggcgctaaaggaataaatacggtaggagatattgcaagaaaatgggctcctcctaatgaaaataataccgctgagtatattcggcatgtggttaaaactactggatttaatgagaatcagaaactgaatctcaatgatcctcaggttatcgcgaaactcatttctgctatgtctcaaaaagaaggtgccggtaacagggtgactgagagtgctgttatccagatttacaacaatacaggtgggaacgccattgtctccggcgcccttcttagcggagtgcgatag

SEQ ID NO: 208856 - DNA, 276 bp, Klebsiella oxytoca
atgacgacggatacctacacgtttaccggcaatgaaagagagagcgtagcttttactccgacgctggatggaacggtttataactgccaggtgaagtggaatatcgcggcacaacgctggtacatcctgatcaccgacaattccggcaataccatgctgaacaccccctcggtgggctctaccaatggagccggaataaatctgatagctggcgttttctccggaacaaccatgatctggcgggagcaaaatggcgtaattgaggtgaccagctga

SEQ ID NO: 208857 - DNA, 969 bp, Klebsiella oxytoca
atgaggtattacgatttccagatttttgaccagaaagggaagttataccgccagtacaaaagccttgatgcctatggaaattataatcctggctgcctgatggtagagttcgacattcagcgatatggaatgtccactccggtagggtcaagcctcgtcagggtgtttggcgtcagcattaaagaaatgcagcaggcagagcaaaacatgttcggcatgaccattaagggatttgtcggtatgtcgaaaggtttgccgctggccaaatcctcccagagcggaatgattcttgaaggtatcattcagcagccattcggtaactggcaggggatcgatctgtcgctggacatgattattactgcaggggctggatcagtagctcagccagtgaacattacaatgccgtggataaaggggcaaaagctgtctgttgcgctattttttgcgcttcaacgtgccttccctgagtacaaaataaatatcaacatcagcgacttgctggttctgaactacgattccccgatttactgctcgaccatgcagcagcttgcatcgaaccttaaaaacctgagccgtagcattatccgtgatgagaattatctcggcgtggaaatggccatgttcccggggaaagagatcagagtatgggacagcgcagcggctgagaaaaagaaaatccccattcagcttgaatttaccgatctcgtcgggcagccggtatggattgaatacaaccgggtgatgatcacctgcgtaatgagggcggatattcaggtaggtgactacgtgaggatgcctgccggcgcaatggcggtaacgcaggcctcatcatattctcagtatcgcagtaaaagcgccttttccggggtgttcgctgtgcagacctgcagatgtgtaggaaacagcaggcagccagacgctgcaagttgggtaaccatctatgaggcgtatgtgacgcaggaggcctga

SEQ ID NO: 208858 - DNA, 519 bp, Klebsiella oxytoca
atgaaattatttcctgtggtgctatttttatgttttctttcatctggttgcatgacttcatccgagtatcataaatacttaattgataggattgatgaaggagaaaaccaaaaggtcgccagaatattaaaagaaaatgaggaacaccaaggtggtgaattcttatgtaaaacatttggctcagaatttaaaggcctgaaaccaaattcgacagttaaagtaattgatgaagttgttagatttaaagtgtatgaacaaaacaacctcgtatttacaagccctaagctttccataaattcaaggaccaaaggcagggcggcatcattagatgatgaaaatattactgctagtgttttcgccggttacagggaagatggcgtagggtaccggtatgaagttaagtttgaaagcaaaataaaagacggttcattatataaggttgtttacggaacagcacatcaaatattaaccccagtttatgcagggaacatcactataagtgaatgtagaaaaatatag

SEQ ID NO: 208859 - DNA, 753 bp, Klebsiella oxytoca
atgacaacccgtatttacgtagataatggtgttacagccacacgttaccttgatacttatccatatccgaacgacattacacaactgcctgcgctgatccccggaattatattgcaggcggattttgatgttagcgaccctctttctctaacccgaaatagagttggtgcagggatgtcagttattggatctcccgttttgggaaattatggggttactctgacggaagctaatcacatcaatactaacattgatattgcatcatataactcttcagatttgacaatgatttccatatcaattcaccctggagtcgttagcgcagttatgggccgggctcagatgaatgctccacaacggtctagggcgacacaaacgacatctacagggtggcaggctaaatggttgacggcggccggggcggcacagcaggccattattgtcccgtccagtgcagcagtagatggtgaaatgtcagttagtcggtttgtgcgagataacggtagcggctcaatgctgacgaagcttgatttgccgcgcacatcacagtcagccactggcaccgcagcgactacaccatatgcggtgccctcatctggtattttattaggggcatcggtggacggtgctaccagtgcaactacgtttatgcgagcatgcctgattatctcccggtcaattactgatgcagagttagcaactatatataattactacaaaaactattatttcctgaaaggcataaatatctaa

SEQ ID NO: 208860 - DNA, 195 bp, Klebsiella oxytoca
atggcgacctatatagcagattacatggctacaaaagataaccaggttatttattctggtacgctatctgtcgaatcagaaggaagtaactcagcaataaaggaagctgttctggctgagctgaatgcgatcaacattaagtacggcggtggggtacctgatgctgtcacggtgaactcatggacagctgaataa

SEQ ID NO: 208861 - DNA, 1032 bp, Klebsiella oxytoca
atggcgctaaagctattagttaataataacgctaagagtgttctcgctgcgggtattagcgcgtccgctaccgttattaccgtggggacaggtgcaggtgctttattccccgcgccggtttcgggagaaagttatttcaaattaacggtaaccgacgccgccacgaaaacaattaacgaaattatgcatgtcacatctgtatctggtgacgtgatgacggtaattcgtgggcaggaaggaaccacggcgcgcgtatggtcaacgaatgacattgtcgcaaatttaatgactgccggctcattgttatcgttcctgcagatcagtaataacctgtcggaaattaaagacgcaggacagaatgcggtaaatgaagcccgttataacctcggaatatctgattcctctggttttgtcgggcgttcacttggcgctccaaaagctttctatgcaagcggaacctatacgcgatcagcacttgcccgttttgcaaaaataacgatagtcgggggcggaggcggcggtggcgggtgccaggcctctaacaacaccgaaaccttttccggcgccggcggcggcgcagcggcaactattgttgtatgggttgacctctctgtcgccagctcttacgcgataactatcggtaaggggggtaagggcggtgtaggtgcagtcagcgggggcgatggagaaaactcctcgtttgcgggtctgttctcggcaccgggcggtaatggtggtgtgaagtctggtatctcaaatactgccggcggcgctggcggtacggctacaactggcgacgtcaggatcaacggcggtactggctccgacgggcagacaggctcaagccttttgccggggaatggaggagcatcgttttttggcggcggcggccgggcaggcgctcaggctggtatcgctggaacggctcccggatcaggtggcggcggtgcctatgacctcggatttaccggcacggcatttaccggcggcgatggtgctaatggcatggcgatcgtggaagaattcgcgtga

SEQ ID NO: 208862 - DNA, 156 bp, Klebsiella oxytoca
atgcctgacgttagcggggaaatgtcccccatccgtagaagtggagtttgtcgctttgcgactagcgtgccgtatgccgatgtgctgtgcatcccggacgccgatttgctgggcttactgggcttacaaattgtcgaagttttattatttagttag

SEQ ID NO: 208863 - DNA, 1071 bp, Klebsiella oxytoca
atggcaaaatacagcgcagtagtgaccgccgccggacgggaaaaaatggccgctgccgccattaccggccagccggtgggatttgcctttatgggggtgggagacgggagcggcgtggtgccatcgcctgacccggcacaggtcagcctggtgaatgagcgctatcgtgccgcactgaacagagtggttatcgctgaccagtcagccaacattattcgcgcggagatgattatgccgccgcaggttggtggattctggctgcgtgaggccgggttgtttgatgaagatggcgtgtgtctggcggtggcaagtctggccccgtcctacaaaccccttctggccgaaggttcggggcggttgcaggcgctgaatatctggatcgccgtcagcagcaccgccgacgtgcaactgctgaccgacccgacagtcattattgctacggtggaagaggtgaaccgcgcaaaaagtgaggcgaaggactacgccgatcaggttgccggttcattaagtaccgatattcagcaggcaattgcggacgcgattacggcagcaaagcgtgatttctgggaagacgataaccccgtcggtacggtgaaattttacgcgcagaacgtcaaccctaatgagcgttatccgtggtcgcaatgggtatacaccggcgagaacaaaacgatccgcgtcggcaaggctgacggttcgaacgtcggcgcgaccggcggcagcgataccgttacgctccagaaggccaacctgcccgcagtgcagattggtgtgagcggcgaaaccagtgagctgcccgagcaggcactgaccacgaaagcagccggtaaacataaacacggcggcgtacccagcagggataatccgtgggagattggcggcgatatcagccagcgttttaacccggcaaacctgggtgaaacggacgaggccggagaacatgagcacgaagttatccagccaccacacaaacacacgaccagcggtaaaaccgacaacctcggcgaaggtcaatcgttcagtgtggtggaagcgcacaccctgctgatgtgctggagccgcgttgcctga

SEQ ID NO: 208864 - DNA, 600 bp, Klebsiella oxytoca
atgaatagcctgttaccgccgggatcgtccgcgctggagcgcaggctggcgcaggcctgttctggtatcagcgatttaaacgtgccgctgcgcgacctgtggaacccgtggaaatgcccggcaaagttcctgccgtatctcgcctgggcgttttctgtggaccgctgggaggaaacctggacggaaaccgctaaacgccaggctgtcagcgatgccttctggatacatcagcgcaagggaaccgtggcggcggttaagcgtgtgatcgaggggctgggctactcaatgaccattgaggagtggtgggaagtggccgaccccgcaggaacattccgccttgagattgacctcaatgatatcggcatcactgaaccgatgatttacgagcttgagcgaattattggtgatgcaaagccggtcagtcgccatatatcgcagctgaccctttccgtaagtattcagggcatcgccagcatcggcgtggtggcatttgatggtgaggtgatttcggtctatccgccgggctataccccggatgacagtatttattttgacggcgaagcgcgttacgacagcaacttttatttcagcggaaaataa

SEQ ID NO: 208865 - DNA, 414 bp, Klebsiella oxytoca
atgagcattcatagaacaaggaaaacggctggaaagaaaagcacgccaagaaaacgtgtaatttattccagtggtcgagaacttctcaatcaatatcccaaagccttaagttcagatggggcaaaagtttttttggttttattggaatgtgggaagttgacggaaaaaggcgttgaaagaaagattaataaacttgagtttaaagaacaggttctttcttatcatcccgaattacttacgaccaaagcaggtcgtcgatttattgtttctgcgattcagacttcttcaactcgtttggagtttgaaaaaaaagttaaaaaaatagaatcgcaaaagattaaatttgacaaaattatcagcgaatcagccaagtcaaataaaatatatcatcctgtaatggctggtaaaaaatga

SEQ ID NO: 208866 - DNA, 570 bp, Klebsiella oxytoca
atgtttgatgtaaagtatgatcaaaaagttaaggagcatgccgggcaggttaatgaagcaataaattccatcaattatcttcttcacattaaccctgagttaatggcattaaatgtaaaagtaaaaagaacttcagaaacagaattgttattcgttgaaagagaatgggagtcaatgtctgggcgaaaagtggggtggagttggcgtgtaataattagtaagaaaaagaaaaaaatatggaggcttgctctttctattttatctggggagcaagtttgcggaatgcttttttgtacggggtctaggcatggtatcaatgtgaatataaggtatttggaaggaagtccagataacagtcacccattgaaaaaatttattttagatattgctattcaatctgcggagcaatatgcagaaagtataaaagcaaaaatgattactattcaaaaccccatacaggatgttgttggaaggtacatcgataagggttatgagtacaatcagaaggataggcgaaggaacagcaaaggactaacgccagtgtgtaaaacattggaaaaaatgctataa

SEQ ID NO: 208867 - DNA, 204 bp, Klebsiella oxytoca
atgggccagagccgccagtactggcgggctttctggcctatcatgcacctgcatgaaaaccattccacaaagcgggcaggcgtggcggggatacgagcgcgcgcgaacactccaaatgtactacatatgtttatctttatgttgtttgaggttatgatttacactgttttctcattgaacggaatggaagtatgtttgatgtaa

SEQ ID NO: 208868 - DNA, 567 bp, Klebsiella oxytoca
gtggatttcaatagcggtggtaagaaagttattgagcggcttgtggaagcatacggatacagtacccgtcaggcgctatgcgaccatttaggtgtgtcaaaaagtacaatggctacccgctacatgcgcgatatttttcctgccgactgggtattacaatgcgttttggagacagggacccccattgaatggctagcgtttggtaaaggacaaaagttgcctttaacaaaaccagaaactatcgccctaccaaaaaaaataattcttgatggcaaagttgaagatgaagggagtatattgtttgacccgtcattactccctgactatcttcagaaaccaggaataattacaaatgatgggacaaattatctcattgaacaacagttcaacgatataactgacggaagttggctagttgaaatcgaaggtaaaacaagcattagatttttaacaagaatccctattggaaaagtcagagtgagcaatagcgatggtttttttgagtgtcaaatagatgacattataattcatgcaaaatgtattttcgttttaatggcaaaaatttaa

SEQ ID NO: 208869 - DNA, 1242 bp, Klebsiella oxytoca
atggctggcaatacttttaaaactgaacgtgggataataacattttttgatttagagtactttggtttctataaaatgaaccaaggaaagccacatgaacttattgatcaagatgtagatggtatattctccgaactccgtgactggatagctaccagaactgttgaagactctgtaccatggggcaatgaaagtaaccgcagaactaaagctttttgtaaaaacctttcgtatgatgctgcaactggtgattatctatttgtaatatggaaaactttaggggataacgaaggtaacattcaaggtatagaagcaaatagcaaaattgatgatacatcagataatatcgtgtccgcgtctgaaactcaagatggtaaaaactacatctggggacttccatgttattattgggttattcctaaatacaaaaaaattgcatcaattagattccctagctcatatgctgatacggatttattttgccaatatgtaaaagcattcgttgattatcggcttcaacatcccaataaggttacacatgatatagaggtttccagagtaaactctccggaaccaataaagtataagaaagtgtattttgaaaaagataatagcagtttagtattcaaagtattaacaaataaaacccgtagaattactaaaggtgctaatattgaagagttgtgcaagaaaatcacgcacattgtttaccatgatgttattgagacaaatatcgccgataccagagggcaatggagaaaacttttcgacaaagtcggtggcatgatctctaatagctcaccaatattatcaaaaaaacataaagttgaattaattgttgaaggaacacctacacaagcagaattcgaaaaactaattgaggattatttagataatcacaacattagtaatgatcaatcagataatatagaaaaagacgccccctctgaaaaagcgaaaaaagatgaaaatccagatcaagtcagaataggtttcaaagttggaaaaaatggtcccaccacttggcttgatgaatacatattacgtcatgaaatacataccgatttatcaaatcgatataaacattattcatcttcatatcttcttaacattgttaaaagccacaggaatggtctcatacagtatcttgagcaagagatgcccgagccaaacgcaaataaaatagattacactgaggctaaaaacgatgatataattcctttaggggacttgggagaatga

SEQ ID NO: 208870 - DNA, 588 bp, Klebsiella oxytoca
atgctaagtaaatactataccgcacatttaattgcaatgattgtaatatttctcattgcatttaattttggaggtcactatagcccctcggatattaaggatatattatcaacattgcaaaatatatccgcaatgatatttaccatagccggcatttggttggcttatatttacccaaaagcaattgctggaattatgaaaccctccacagccaaagataaagaggtgttcacaactacattggataacggtgacattgttatagaaaaatctcaaaatacaatttcagaggaagataaaaaatccgcccagaaagatatagatagaatcaccatgatagttgaagctataataacatcagcaatagttatacttataattgtcatgggcaatgtcattaagccattactatatagtttcaacactaaagaaagcttgttggtaataagtaaaattggttgttttatttctctatctctcgtttatttccagatagtttctttaatgtctataattataagtaacttagtgtttgtaaatgacatccataatgagaagaatagtaaagagttggatgaattaaaataa

SEQ ID NO: 208871 - DNA, 276 bp, Klebsiella oxytoca
atgtttatgaatgagttacagaaacagggcttagagcttcgtactaaagctaaagttttggcacttgctgttctgtcaaagcatcctgatgggcaaaaaaatggcaaaggaattaaacaatctgaggtgttcaaactctgcggcttcgattggggagcaaaaccgaaggctactagttcgaatcagcaatattgggttgtagcgttgttacgtgaacttgaagaagatggattagtcgaacagatcaaagagagtggaccctggcgattaaggtaa

SEQ ID NO: 208872 - DNA, 159 bp, Klebsiella oxytoca
atgctgcaaatctcttgccaggaaaaagaactctcggtttttgccgttgaatgcaggcggcggcgtcagaaagcggacggcacttgcactttcccggtgcccgcgcgctggaatgtggtgcaaaaaataataaaaatccagctaatctttgccgattaa

SEQ ID NO: 208873 - DNA, 156 bp, Klebsiella oxytoca
atgcgtcaaaattgggtccaggaatggaaagggcgctatattactggatggtggaacgttcgtcacgtcctcctcacccttcattttgcggcttttgtgctgacggaacgagtgagaaaaatcaaaatagccccagttgccccgtcactattgtag

SEQ ID NO: 208874 - DNA, 174 bp, Klebsiella oxytoca
atgaaagatgaaggttttatacaggcgctaaaaattgtctgcaatggcttgctaaagcgcgagaatcgtccgagatttttatcaatgctgcgcttttttcaacgtcataaaaagcatttaaactttattgcctgctgctcggttaaagcaattcaggtaaaaagtccgaaataa

SEQ ID NO: 208875 - DNA, 132 bp, Klebsiella oxytoca
atggggtggggtgattacgttcgtaaccaggttgaaaaaatacttctgagcgaggggttttctgttccggtggctcagggggggggcaaggcatgcggaggacttatacaaccgaatgtcacaggcaactaa

SEQ ID NO: 208876 - DNA, 228 bp, Klebsiella oxytoca
atgcaaccgtcatggcagaacaaaaaattaatcatcatccaggccgttcagctttggtttaccttattgttagccgattgcgctgacccaggtcgcgtaaggtttctacgcttcggcaggcgtttaatgaccgccgtgaagcaagccgatttatttagggtaaagaagaaaatggcgggcgagcagggcggcggtaaaatttttcttcagatagaaaccgcgcggtaa

SEQ ID NO: 208877 - DNA, 1272 bp, Klebsiella oxytoca
atgaaagggatgcaaaaaatcaaaagaggaaaaacctttaacgggcttatttcttatttattgaaacctgcttcgcaccacaaatcagatccctatgtagtcggtgggaatgtcatagaaagcttcgcagaagcactaagtgcagagttcaatgcgacaaagcttctacgttcagatgtcagcaaacctgtatggcataactctttacgtctgcctgctggtgaaagtttaccaatacagcaatggaaacagatagctgatgactacatgaagcgtatgggcttctctgaaacgcatctcagatgctacatcctacatgacgacgaagacggccagcacatccatatcatcgcaagccgagtttctcttgatgcaggaaagctctacctcggcaagaacgagaatctggcaagcacaagaataattcagcaacttgaaagagattacaatctgacaagaaccaaaggaccgaaagcttctccagcagctccctcacctaaaccgaagctcaaaaaatcccgtaatgaagcgatgatagagaaaaggactggtgagctatgcccgaaaaccatcatccaaaacgctctggaagttctccttgccgataaaccgtcaaccactgagtttgtgcatcagcttgtcgcacaaaacatcagagcaattccgaacatcacttctaccggacgcatgaacggcttctcattcgaatacaacgggattgctttcaaagcatctcagcttggtaaaggctattcctggacggctttacaggacaaactcgattatcagccggaacacgataatgctttcctgtttaaactaaaatcctctgtcagagaaacatctgttagtgcaactcatgatatggcaataactacagatgcttctgaaatcttgacagaatacgttaactgccccatagaagcacttatccctaataacagagctgctggtcaggacgaattcaccaacgcttcagtcaaacagcttcacttagaagcaggtgctggtgctcaggaagcgtttgcaaccgaagcgttaaaagaagcccccgaccgaagctatgcagtttcagcgttcaggtggttggaatacatcccctaccttgatgtaatttatcgtatgttgaaaaacctcaaaatcccaacccttaaacgccctcgaaaacacaaaactatcactgacgtgagagtgatagagatttcgccctcaaaaccaacaaccgcccttgaaatttcctcagttcctcgtggaccatcgccaacaatgtaa

SEQ ID NO: 208878 - DNA, 1020 bp, Klebsiella oxytoca
atggcagatagtcaagcaccatattcatatgtaaacaatggcaatatgattgaagtacgcctatcctcagcacgttttagtccatatcttgtaaatgctggattcaaccgtgaatatgctttcaatctatacctttacaatgcccgtctgtcaaaagcttttctgtatcctttacatatacttgagattacccttcgtaataaaattaacgaaatatttataaaacaatttggcaaccagtggcctaaggaacacgtttttcaaactcacctgaacccaaatagtctaaactctcttcaaactgctttaaacagggcgaaatatgatactaccgatagtattgtatcaactttaaattttgatttttggtctaatctctttagaagtgaatatcataactgtttctggcaggttaatttatctgcactattacctcattcaactataaacctgagtacattgagaacacgcgcaaaaaatataaaccattttagaaatcgaattgctcatcatgaacccattcaccacctcaatatcactaatatgcataatgatattattgagatgatttcatggctttgtagtgaaactagtgattgggcaaagcattattcaactttaaatgacgcaatacgtacatcacctgatccgtccaatgaagttaaacctcattttatagataggattgataaaaacttcattgaagttcaagacaatatgaaattagacttatcaaaagggtttaatttcatcatatgtttagactcagagacaaaagatgtcatatcaatcattgataagaaaaacatagcagattttttactcaatttagtagattcttccggttgtatcatggaagatttaaatgaacatacttacaaagaaataatagaaaaacaaaaaataagaaataattttaatattgtaggctctaatgaaagtttccacaaagcttacaagttattcaaaggttttaaagctgtctcttatacacatctgacgctgccgacgaaggcttag

SEQ ID NO: 208879 - DNA, 303 bp, Klebsiella oxytoca
atgtatttagatcctccttattatgttaaaggacaggaactttatagaaacttctatgaacatcaggatcatgttgacatcaaaaatcaactcttaaagatgccaatcttgcattggattgcaacctatgacaacacggagcaaatcaaagagatatacaagggacaaacaataattgattttgatctgcaatattcagcacaatctaaaagagttggctcagaagtaatcattttctcaaagaatctaaaaattccatccgtggagttagggaagaaaaaaattaaagagaccgtttcttaa

SEQ ID NO: 208880 - DNA, 726 bp, Klebsiella oxytoca
atggcaaataaacatttaacttcgcccccaataggtgaattcgttatgtttgccagcggtgatgggaaagtacgcgtagaatgccgctttgaaagcgatacgctttggctctcgcaggcaatgatctgcgaactctatggtaaagcgaaagccaccatcagcgagcatataaagcatatatttgaagaaggcgaacttgaggaaaattcagttgttcggttttaccgaacaactgccagtgatggaaaaaattatcaggttcaacactttagtttgcctctgatacttgccgttggctatcgcgttcgctcccctcgcggcactcagttccgccagtgggcaacccagacgctccaggagtatctgatcaaaggctttgtgatggacgatgagcggctgaaaaatccgcctgttggtacatcggctgtacccgattatttcgatgagatgctggagcgcatccgagatattcgcgccagcgaacgccgggtttatttgcgagtgcgggagatttttgcattagcggctgactatcaaccatcgctaaaagaaaccacgcagttttttcaaaccatccagaacaagttgcattttgcctgtaccggacataccgcggctgaactcattcatcagcgtgctgacgccagccaaccgcatatgggactgtccagctataaaggtgaagaggtgcataagggtgacgtgacggtggcaaaaattatctga

SEQ ID NO: 208881 - DNA, 1008 bp, Klebsiella oxytoca
atggataacaagggattacttcacacagacgttgtcagacagcataccgttccgagatttttgcttgaaaatttcgctatcagctcggaaaaaaagaaacgggccaaacaggtattcgcgctgaataaacagacccgttacgttttaaaaatgaatgtaaatgacgctacggtacatagtcgtttttacaatcttcatgactatcccaaaatcgttagtctggaatcgttactttgtctctacgaaggcagcggcgcaacagttatacgtaagctaatttcgactaagaacatacagggtttgtccgaagaagaaaggagtgcgcttgcccgattcatcgccgtacagcatctgcgtgctcgtggtgaatacgagaaccagaggcacatcgcgcaaggattttaccaagcgatcaggtctagaggaatcatcagcgaagaagtcgaaaactattttagcgatgagaaatttgagcagaatattaagggtaactttcttaatcagattgccgattgtgattatgaaatgtcaattatcttgggcaaggaatgggtattgttcgaaacgacaccggatagaccattttatatttccgataaccccgtcaccatgtataacgaaacagagtttgccgacaggagcaatacaggaatagcactcctgggtatccagatttacctccctttatccgcaacactaatgcttgcaatgatatgtccttccctaaatgacaaactcaaagaagaaagagacttgatctataaatacatcgtgaatcatataggcggagagcatctgaacgtttttgaaaggctcgacttccttaaagacatgctggatagacgattggtcaatatcgaagactggaggttgaaccacctaaataatctccaagtctggcgtgctgaatattttatatttagctcgctggatgactttgaacgggtgaagaatcttatcgatgattgtcctgaattagtcggaggccctcgttccgttgttttataa

SEQ ID NO: 208882 - DNA, 687 bp, Klebsiella oxytoca
atgaataaaatagagcattataaatggtttcttagttcttttttttctatgaataactttggttttaccttggcaaccattaaaagctttaattttcaaactgaaaaagcaattaaaaatatgattgatgcttatcgcctggatggcccagcagttttcgattttgaaagtgaccagcaaggaataatcgattctattgaatccataccagaatcacttgctgaacttatggataaaactcacacagtttatcatcctagtttgatgcgtaggtctgcttttttaacaatttttggcatgattgagcatgaagtggataatgcatgcataagcttttcaaaaaagaacaagacaaacattaacattaatgaccttaaggggagtggttttgatagaagttttttatttattacgcgagttattggattagaaagatcacaacattacgctcttataaagaggatagtaaagttaagaaatagttgtgctcataatgatgcaaaatttataactccagatggtttggagattaaggaaattgctagtttaatgaaagatttcccgcaatatttctttaaagatggacgttcagttggtttccactctaaagttttagactttgttaccgaatcaatggaagcttatctcttggaaattgagggtgtcctcagtaaacatgaagagtaa

SEQ ID NO: 208883 - DNA, 639 bp, Klebsiella oxytoca
gtgttgattcctgatgatttggacgaggacgtttatccagattgctgctggagctatataggtaaaaaggattatttgaaacctaatacatacttacaagatgcgattgatgatttgaattcaggaagtgagcgccgaaatctgaataatgccgtgcgaaatgcaaaatcggcattacatatgagagtggatattctttgtcgagctttttgtggtgatgactacttccagaaaaatctaaggaactttccaaaaaagatggatttcctagaaggaattggaatagtcagacctagaataatagataaaataaataaaataagaaatgaaattgagcacgagtatcgagatgcaactcttgaggaagcagaagatttcatagatatagttttattgtttatggaggcaactagatatctaaattcaaggtttccatgtgaagctgacttctatgttttggcagtttctaatgaagtttatttaaggaagatagtatgtaattgggaaggtggggaattaatcttttactattcaaagcaagagtcacaccgacttgataacgtggaaacttactcaatgaaagtaggtgattatagatacgctctgtgggtaaaattcattctagatcattgcgattga

SEQ ID NO: 208884 - DNA, 1026 bp, Klebsiella oxytoca
atgaaaataatatctttatttaatcataaaggtggtgttagcaagacaactacaacttttaacatggggtggatgctagctaatctcggctataaagttttaatagttgatgctgatccacaatgtaatttgacagccttagcgttgggctattcgaccactgatgactttgatgaaatctataaaaataatccgaactgtgatatttatagttgcatcaaacctgttgtagatggttctttaggaaaaattataccatccgacccattagacacaacaaatccaaatttaagtttattgtgtggtagcatctatttatcagaaattgaaacgcagattggagttgcgctaacaaccagcgctgctatccccgcaattagaaatatcccaggcagtataggggcttttttgcgtgaaacagcacggaaacatgaatttgattatgttcttgttgacatgagccccagcgttggtgcattgaatgaatgtctcttaatgtgcagtgactattttatagttcctacatcaccagatttcttctgtgctcaggcaataaagtcactcgcgaaagttcttcccagatggaacagcgagataaatagttttagagatagcaaaatactatatccattccctattgaacctcctaaatttatcggatttatatctcagaagtatcgtccaagaaacaatttaccagtaaaatcttttcaaagatggattgatatcatcaaagatgaagtcactaatacattaataccagctttaaatcctatcaatatgtcaatttcagctgctgattttgaaaatgcctgcccgacaaaagagccttttaatttggcgaatatttcagattttaactcactaattgctcaatctcaaaaacatagcaccccggtatttgccctatcagatgcgcaaatagagcaaaatggagtaatactggatacaatgaaagaaaatagagaagagttcaaaaataattttagtgagttagctcgatcagttgctacgttggcaaattga

SEQ ID NO: 208885 - DNA, 339 bp, Klebsiella oxytoca
atgcaaatgattacctcacgacagaacagattattgaaatttctcctgccccgcagagaatacgttacgctgatgaaaattgctgaatatttaaatgtttcagaaaaaacggttcagcgtgatttacgctttttagaacaatggttatctgagtggaaaatgactatcgacaaacgctcaggcgccggcgtgatgctgatcgctgataatgtcacggatctgctgcaattagaccaattactcggtaacgaaggggaggacagcgatgtcatgatgaataactcccggcgtgtgaaaattgcttcgcagctcttaagtgagactccgcgggagacataa

SEQ ID NO: 208886 - DNA, 246 bp, Klebsiella oxytoca
gtggatttaactgaagtaaacagattgattatagcagccagcgatgcgtgggcggcatcacgagatgagggacacagtaatgcctctctggtttctcacgcacaatgtgttcaaaacgaagcgaatgttgcgatagcctcgtacctcaccgataaccccgatgcaaaagacgattttgttttttttgctggctctggtttcattccgaatgaaagcgagctagaaccagtaacccttatagggtaa

SEQ ID NO: 208887 - DNA, 1728 bp, Klebsiella oxytoca
atgtatcatctcgacaacaccagtggcgtcccagagatgccagagccgaaagaaacgcagacaatttccacgcgctggttcggagagagtcaggaacaaggcggtgtaagctggcctggagcggactggtttaatatcgtccaggctgaattgcttgccatcatgcaggcatctggtatttccccggacaaagcccgatttgatcaactatctgaagccataaaacaatataccgataagttgatttttcgggagcgtacggtctggcgcagacttgatgacacgacaagtgttctggattatggtcccgccacccaagcatctgatgctaccagcgatgcaattgattatctgttaagcattggtggcgggacattatttttccccagaggcaaatatactttttcgtacacgattgtcaggacgcttacagcgtccatcaagatagtgctggatgccaatgctgaactcgtcatgagtcaggatgctgaccttttctattttaaaaccaccaccagcggtcgtcttctgctctgtggtgaaggtattatccgcgcgggatttatcgggtctgaagcttccggcgtttcttccagtgcggctgtcgtcaggtttgaaggcacttcaaacgtgcgttcatttggcgttgaaggttcgctacgcatttcaaaaggtaccatgggggctttcagatatggatttcatcttacagatgtccaggacccgaaaattatcgggttacatatggatggataccagcaaaaaggggaacaggttggcatttacatcacgaataaaaacaatccgagtgttagctggtcttttgccaatctggatttttatgatgtcactatcggtgtccagattgtaacggcagtcgcccctggggtagaaggactcaagttcgttgattgtgattttgttggcgttaaacatggggtgacttacgtaaatacgtcttcatacatccctcctcagtacgaaatgatgggctgtcatgtcaatagttacgattcatgtgtcaagctggatcgcttgcttgatgtcaaaattattggagggctttactatcgtaaaggcattacggttggcggggttcttcagtctaatggttctttttttgaaatttcgaactgccaggatatagaaattaatggggtcagtggttccattacaaacagaaatgtcgatgtaccttttattgtgctggatggttctgcgatctcactggcgtttgcacgtattgataataatttgttctgggctaacgccagaaaatctgcctttctaacgctctcagggaacatccagaagattcacttttcatcaggtaatatcaaagactctgaaggtaaatggcttgtagaggatggtgtaacaaacccatcaggggctggtatcgtgatacaggaggggctgcagctcaatcctgcatatgacgggaacctgattatttcctatgttccctattcggggggagtggtcagtctcggcgcgtcgagagcgcctatggtttcagttactggggccacttcagggcaaagtatcaccgctttttctggtgggagaccaggtaagacatacaatgtgctctgcaataccgctggggtaaagctcgtacatggtagcggtattttgttgaaaggtggtgggacgtttacgtttgattctttaaacaccgttaaaaaattctattgcataacttcatcccagtatcaggaggtttaa

SEQ ID NO: 208888 - DNA, 1800 bp, Klebsiella oxytoca
atggcaaaccgcctcaccactgaaatactcatcaatctggcaggcaacctgaccgccaaagcccgccagtatggtgccaacatgtccgagttcgcccgcaccaatcagcgggcgatgtcggttgttaaagcgacatctgctgctgcaggtcgtggccttgatgcgctagggaatcgctataccactatgattgcagggtttgccggtggtgcaatattgcgggagttcgcaacaactgacagagcgttgactgaactcgggattgcagctgggaaaacacgtgaggagatgcgacagattttttctgacacccaagatgcggcgattaaattccgtgtggacgatgctgaagtgatgaaggctttggcaaacgtaaacaaaatgactggcgacctggattttggtgtcaaaaataaggagatgatggcagcgtcaatagcggcatccggctccgatggcgattctatcggtggattgtttgcaacttttcagaaattcaaaactaaatctgaccaggaaaatcttctggcaatggattttctaaatcaattgggtaaagagggaggctttgaattaaaggattttgcgcaaagtggcactaaaattttctcggcctacgcagggactggaagaaccgggccggaagcgctcaaggaaatgggtgcggtaatggaatcagcaatggatgcggtgggtgacagagatctggcggctacagcatcttttaacttacttaacgatctacgtaatcccaaaatcgccaaaattctggaagccagcggtgtaaagctgcgtgataaaagcggaggaatgctggctattaatgagattgttaaaaatatcgcgcaactctcaggtaaagatgggcctaaacgtcaggacgaacgtctggcaaaagcaggacttaccgattacagccggttgattatttccagcgtcaccacaggtaaaggtgcagaaaactttgcccgttacaacgctgtagttgcagacggttcaggcattatggcggatgctaaatatgcagctcaggacttcacttcagccatgaccagcctgaacgtcacatggaagaaatttgcgaacagtaaccttgcgcaccctgttcaggagctggctgatgcgatcaactcggtcgaccagaagaccgtccagaactggctggaaaccggaaagcaaatcgccatcgcggtcgctggtgttatcgctgctcgtaaagccttccagctaggtaaaggcgctctcgatctcttcggtgtgggcaagggtaagggtatccccaaaggcgtttcagatgtgttcggctcaggtgtcatgcctgtctatgtggtcaatatgggctccggtggtatgggtggcggtcctgatgttggtggccccggttgtagaaaaccgccagggcgcggcgtccccggtcgagcatactctgcgatgggctcagcctggatggttggtcctctggctgcaaccattccatttcttgatgagaaaccaaaccttaccgatgatgacaaagccagcatggtcaaatgggctcaggaccgggccaaagaaccatctgtatggtcccgtgttatggactggctccagcccccagctggttatcaggatccatcgccgtgggcgtcgatgcagccacaaaaccagtctggctacccatacctgcagcaacctgaactgaaaggcagtatcgaggtctctgttaaagatgatcgggttcaggtgaccagcgttaaggtcaatgctcccggcgtcactatgagtgcgggtaccggattacgcagtacggagcaagactaa

SEQ ID NO: 208889 - DNA, 870 bp, Klebsiella oxytoca
atggatgtagcagacttccgaaccatcatagcactggtagaaacaggtaccattactgcagcagcaaaggtgctctgccgagtcccctcagcaatcaccacacgagttcagaacctggagagccagctcggcactacactgtttgttaagtctggccgtcggtttcttccgacaagtgaaggcctggtgctttatgacaatgcactgaaaattatcgagctggtcactttagcagaacagcagatggtaaggccggtgcctggtggtcggttccgattgggtgcgctcgacagtatggcagcaacaaggttgccagagccactggcgcacctctaccagctacatcaatcagtgtcggtggagctggttaccgggataagccgcacattgctcgatgcagtacttagtcacgaacttgatgcagccttcattgctgacgcaccagatgatgacagactggaacgcatggctgtttacaaggaagaactggttattatcgccgcagcaaatttcccgccgatacgttctgcagccgatttaactcacataacattgctggtattcagcgacggctgctcttatcgcgaccggctaacaacctggttcagagaggctgggataagaccttacaggctggcagaaatgtcttcctaccatgctattctgggcggcgtcagtgcaggaatgggggcgggcgtaataccaacaacaatcctcgatacgtttccgacacaggaactcatcacaatccatccttttgaaagtgaaaatagccaaataacaacggaactgatatggcgtaagggagggctcacggctaatacatgtgccctgattgatattttgtcctcaaacgttggaagtacctga

SEQ ID NO: 208890 - DNA, 690 bp, Klebsiella oxytoca
atgaagaaacttggattaatcggtggcaccggacctgaatcaacattgctctactatcgcaaatttgtttatgaagctaacaaaagagttgccgacacattcttcccgtcgctaactattgaaagtatcaacgtatatgacgtcctggccatgtgcggacggaaagattatgaagcgctgacgaagtacctggcaaaggctgtcgggaatctggtggccgcaggggctgaagtcgtcgccttgaccggtaatacgccacatatcgtcttcaatgaactccagtcatgtacaacggttccgcttgtcagcattatcgattccacttgtgcagaagttcagactcagagcctgaagaaagtcgggctagtgggaactcgatttacaatggaggctgacttcttcaaacagcctttcactgaagctgacatccaggtggttgtcccgcatggtgatgagatagattacatcgcagataaaatccacgatgaactcgaaagaggcgttataaagccacagacgcgagacaagtttaccgctgtaattgagcggatgtatcaggatgaaggcattgaggccattattctgggatgcacagagcttccccttttgttcgcgggtacagagttacctgttaaagcactggatacggttgatattcacatcgaggcgttgtttaaagctcttcagtag

SEQ ID NO: 208891 - DNA, 1008 bp, Klebsiella oxytoca
atgactttagacgcgccaaggatactagatctgttaccttctatacatgcaactatcctgtcaatttatggagctgcaatccctgccttttacttttatgctttcgaaaaggtaaagaaatcaagagatgaactcactgaagtagtatctgaagcgagaccttattttagtggactaatacctatcccagataatttagatatttacacagatacaggaaaatttgactggggtgaaaaagcagatattttcttgatagaatcaataaattttgactattacaaaaatgaaaatgatgatgaactatgtgaaacagtctccacatttttaaactttcttgaaggtgtattaagcacacctccttgtttcggcattaatttttgtcagccatatacagcacccaatgaaataattctttcaagcgatgacatccaagaaattcatgaaacgatacgactgcttcatcatagggtgtttgtttttgaaacatgtttttatgacctctgcattcaggctgatgcatatatgaaagaaaaaacacgcaaagaaatagacgcttttttaaaaaacagtacaaaacctcatgagtcgttgatgtctaatccagaaatagcagctttaatgcaagaaagtgatcgacgtctttatgatgcccatatacacaatgacatttatgtcaaaaaactggaaaatatcaaacatcgatacgagtttattttaaactcagcaatacccagaatgaaagaaaaatgtattgaatatgaaaaatggagagacctactctcgataaaaaaaagagtaaagcaatctcttaaatatctatccatcggaatatttgttggcataatattgccattagtgacctcgttaacatttaaagggagaggtaactttaattcgtacagcatgatatttttagagtacacattgttaatggcaccgtttgcaatctatttatttattatattggggtattataaggaagttgacaggtcaaacacactatag

SEQ ID NO: 208892 - DNA, 771 bp, Klebsiella oxytoca
atgctattaaccagaacaaactcaaaatctgcgttttcaggtgctgatattccagtgttcaaagtatcagctgcggaggatgcattatttaatctgggggtttcctcatggatacaaacaggagaaagatttatcagaacagatgctgacggaaaggttacgggattacttgaccgtgctaacagcgatgtactggttcctgcttcggcagctccaacaataattaatgctggaattaaagctctgcgttttgcctcgtcacctttaattggccatgtagatgtattcagttcagataatattcagacggtgattaacgtttgtcgatctccgctgggcaatacccgtaccatcgtggccagtcaggcggcgtcaaacccgttactggtttatgttgatacacctgatactgcaggtattcgatatcttcaaaacctgtcacaagcaccagttaactcatcagcggcagtgaaggggctcgggtggttttctagcgtctgttcttataacctggaaggggcatcagctgatatttttcttaatggcaataaagtgactacagctgggccagttgttggtgctatatcaacctcgacaggggcgcgaaaaattgcggtgggtggttcaggagtgggtggtgcatcgttgatggggacgcatgattttgctttgtctatcgtgcttccaggtattgctgcgcatcaggatatgtctgtaatggcgaagattaacgcactgcttgcagagtttatggcaaagctgacttcgtaa

SEQ ID NO: 208893 - DNA, 687 bp, Klebsiella oxytoca
atgttgaaggcggtggcaggcaacgcgccgctaattaacctttccatgttcaccgtctttttttatattgcctataccgtgtggatggcgatcgctatttactttatcaaatatataattggtagcgaaggttttacttccaccttctttatgattcagtcggcggcttatattgtcggtaccgttatttcggaaaaaatcattgcgctgataggtaaaaagaaaatgacgctggtggcgctgtcgatcggcgttgcgggcgtactgatgcaatattttatcgctggcgacaatatctggctgatcatgaccggcgtgtgtctgtacagtattacgctggggatgggctttgtttcaatgtggtcaatgattgccgataccgtggaatatgccgagtggcaccatggggtgcgcaccgaaggcgcaatttacggtttctttaatttcatcaccaaaatagcgatggccatcggcggcggctgcgcgggctggatgctggactattaccactatgacgcgggcaacattactgccagcgcgattaacggcattaacgtactgatgacgctatttcccggcgcgatgtttgcgctcagcgcactgtttgtcgcctgctattcgctggatgaaaaaacctatcgcgatattgtgcaaaaaatcagcctgcgcaaacagaacgcgctttaa

SEQ ID NO: 208894 - DNA, 684 bp, Klebsiella oxytoca
atggaaacagcaggaaaactttcggcaagctatgtggttatcggcgttaaagaaaaaatagggtatggttttggcgatttcgcttctaatttatcctttggcttcgtttctctgtttttactttttttctataccaatatttacggcattagcgccgtacaggcgagcctgatctttgttattgcccgcgtggttgatgcggcctttaatattctgattggttttgccatcgataaaacccacagccgctacggtaagcttcgtccctggttgttgtatggttcaattccgctcggcttcttaacggtgctctgctttgtgcctttcggcggtgaggcgaaattctacttcgcactgatttcctatactatttattgcctggcctatacggcggtaaatacgccttattcggcgctgaccaaccgtttaacccagcatgaagcctcccgctcatcgctgtcggtataccggtttgtcctggcgattgttggctatctgattgtgtccactaccgcggacaggctgatttccccgtttagcgataaacagctggggtacgtcttcgccgtctcttgctttgcgctgctggcgacgtttttgtttcttgcctgcttcgggatgaccaaagagcgcgttggtgaagaagaggaagagaccccggcgccaacgctgcggaaatgttga

SEQ ID NO: 208895 - DNA, 1305 bp, Klebsiella oxytoca
atgaaaaatataaatgtgacagtgaaagaaactggtgctgaatacaccgtcgatggcaatcaagttaatctcaatacgcagtcagtggttctcctgcacgtcaagcgtgaggatattcgttcatatacccgacaaggtaatgatcttgttctaaaactccaaaacggtgacaccgttacaattaaaaactttttcgttgtggatgagcatggacagcacagtgatttagttcttatggatgatgagaccggcgcgctatggtggctagaaggtgcgggtactgatggggcacactattcgctgattagcgatctttcagaagtcatcgcgaccggtggcgcgggacaaagtattgccggttgggtcatggctggcgcggctttgctgggtattgcggcaatgttcgccggcacctcaaacaaagaccaccactcttcggtttctgaaagcgattctgatgctgacagtgattcagactccgacagtgatacggatgctgacagcgatagcgactctgattcagacagtgattctgattcagatagtgattccgattctgacagtgattccgactcggattcagattcagatagtgattcggatgctgacagcgacgcggatagtgattctgatgctgacagtgactccgatactgataccgagctacctaccgcggcacagaacatagcggtcattgacaatgcgggccccatcaccggtgtgctccattctggagatgtcactgacgatacgaccccggagattaaagggacagcagaggctggggccacgataacgatttatgacggcgataccaaactgggttctgtcgtcgcggatgaaaatggcaactggagcttcacgttaccggagctgagcgagggttcccatagcctgagcgcgacggtgacggacaaagccggcaacgtcagcgagcgttcgccggcgtttgaactgaccatcgataccactgcgccggcagccagcattccgcaggtaaccgacaatgttgcagagcacaccggccaactgcagagcggggatctgaccaacgatgcgacgcccaccctgaacggcacggcggaagcgggatccacggtgacgatctatgacggcgacaccgtgctgggcacagtggttgccggcgaggatggacgctggagcttcacgccagctagtctggaggaaggcgcccacagcctgagcactacggtaacggtacggtctccttcgccaatctgccggcgggcgactacaccatggttatctctgcgccggaaagtaacggccccctggtatcgttga

SEQ ID NO: 208896 - DNA, 876 bp, Klebsiella oxytoca
ttgttatcgcgctgggtgcatcataccggctatccgattggcgcgctgctgagcggcgtggtggcaagtctggtgctttccgcatttggcgaaggcagctggcgctactgcttcctgctggcgctgatcgtcgccatcccgctgatgattttctgggcgaaatattccaccgccgatcgcatcaacacgctttatctgcatatcgatagccaggggatgacgcgcccggcgacccaggaaagcagccatgttgccaaaggcgaagggatgaagacctttttacgcaccctgcgcaaccgcaatatttcgctaacggcgggcaataccttgctgacgcaaattgtctatatgggcattaacgttgtgctgccgccgtatctttatcacgtctccggcctgtcgctggcggcatccgccgggctaagtattatcttcacgcttaccggtaccctgggccagataatttggccctggctgtccgatagctttggccgtaaacgtactctgatcgtctgcggtctgtggatgagtatcggcattgcgctgttctatttcgccaccaatatgccgcgccttatcgccattcagctattttttggcctggtggccaacgccgtgtggcctatctactacgccatggcttcggactccgccgaagaacgcgccacctctaccgccaacggcattatcaccacggcgatgtttatcggcggcggcatttcgccattgcttatgggctggctcatccagttcggtggggggtgggaaaatccggcgggttatatctacgccttctttaccatggcgggatgcgcgctgctggggatgttattgcagctcatgaccaccgataaaacgccgcgcaaagcgcattaa

SEQ ID NO: 208897 - DNA, 459 bp, Klebsiella oxytoca
atggctgaaggtatttatggtcctaacggcgcttaccgtgttgcctgcgctattccgccactgggcattgctctctctacttttatttcaccacgtaaatgggctgaagatgaaagacgaatgggaacctctgctgcctttatggggttaattggcattaccgagggcgccattcctttcgccgttaaaaacctgaagaccgttctgccatcaataattatcggcagcgctgtcggtgccggcctggcaatggttcacggcgttgaatctatggttccccacggcgggttaattgctatcgcaggcgtcaataaagcacctgtatggtatgccatcgatatggttatcggcgttattgtcaccgcaatctgcctatatattctgcgccccaacataagcgagccggtaaaaaaagagtcggctaaaaaaacaatcacttctgatatgaataaagtctga

SEQ ID NO: 208898 - DNA, 468 bp, Klebsiella oxytoca; identical to SEQ ID NO: 128621

SEQ ID NO: 208899 - DNA, 414 bp, Klebsiella oxytoca; identical to SEQ ID NO: 128619

SEQ ID NO: 208900 - DNA, 354 bp, Klebsiella oxytoca
atggaacgaatcatcgaaatattgcaatacacattacgcaaaggcaccggagtcacttttcacaatatcatgcgggaaatcagcattcccctacaccagcgccacgggatcgaggttatttcgttcggacactccatgcataacccggattgctactatttgatacgcgcttttgatagccatgagaacatggttgttgtccttgatgctttttatgcaagcactgactggcgcagcggcccacgcgaagacatcatcagctgtatagaaagcagccaaaaaacagtggtaagcatgccgtctggaagtatggaagagttagataggtatgtggcgatggtaaatgcccagtaa

SEQ ID NO: 208901 - DNA, 1461 bp, Klebsiella oxytoca
atgaccgaaaagaaaccagtagtaaacttcgttaatgcgatttgcggctcaggaaagagccaccgtttgaaagaacacatttacgacttcaatcgagaagctgtcccagaaaagttcttaatcgtagtaccaacccacgctttagccgagcagttcaagcaagaactaaatcgtttgagaatcccaaatcatcacatttgcgttgaaggtgcgactctcaacctgaaaagtactctggcgaacagcttccaaacgaatgtggtgataaccacccacgaatgtttcaccaactactgccacctcgctacgttcaatcctgagatgcgctctctactggcagaacacaacgtgatgattgacgagatccctgatggttggtttggggctgaagcgaagatccgacatgcggacagaacggcagaaaacttcccattcctggcatggctggaagagcgaaacgggttgctctatttgcgtgatgagcactacgacaagctgtaccagtattaccatgagaagcacgctaacagcgacagcctgaagaaagtgctttacgtggcgctcgacggtggtggtgtgatgcataccgagtgtgattcttcatacagcttctttgcatacacttataacccgatactgaaggccgcaacgtgggcgaagagcttcactgtgcttggcgctggtgtagatcgcagtgggtttgtatggatggctgagaacgttgctcaaatcgcagtacaggaagccggggaacaccttcagccagaacccgagagacgcaagcataagaacgtgcctatcaagattgtggttgtcctctcagaagatgtcaaaagagcggggcagtcagagctggctaatgtttttaacagtcatctgaaagagataaatcagattgttgggaaggattttatcttcgcaactaacaacgataaacccatctgtgacttccaaactattggactcgctgagctcggtgatcgcatgggaggtgaagctgtttcgatgtccagctacggaatgaacagctaccaggatgttcacagtgctgtgttcctcggatgtgcaaatctgggcgataaagatcgtaagagatgggctgactattgcaaacgtatcggttgggattttgaaacggtgatgaagaagaagcgccaggcaatgtatcttgaacggtgctaccagtttcttagccgaacatccattcgcaacactgataccgatcaccctctcgtctttgtcgttcccgacatggcggcagcggaatacctcaaaacccattacttccctggctcaaccatcgaatgccttgggatcaagaaagctggcaagcaggaagaaacacgcttgaaggtgctggaatacaaggcgcaagggctaactcagaaaaaggctgctgaagtgatggcggtgtctgtgaggacagtcgcaacctactggaaccagggcgcttacgtatga

SEQ ID NO: 208902 - DNA, 159 bp, Klebsiella oxytoca
atgaatatccgattcactgatgacatccacaaggcgctgattgaacgtgccaaccgtgaagacaaatcagccgccgcgctggtgagtgagttaataacagcagtcctaaaccgagaggaaccgaatgaccgaaaagaaaccagtagtaaacttcgttaa

SEQ ID NO: 208903 - DNA, 135 bp, Klebsiella oxytoca
atgataggttacatctatcaaatgtggttgtttatcggttatttacatcctgttagtcatgaggagttttccggctttctggagtgttgtttcatgcggagcactgcgaccatgaaaggtatgctgcatgagtag

SEQ ID NO: 208904 - DNA, 207 bp, Klebsiella oxytoca
atgaagaaatcaatattggtgatatcgggactactgatttcacagttggtgatggcaggacaaatcacaatgacagatccgcagcaggaaaaaacggagaatggtaagacgctttgcacctatgagaacagccagtatgttttcacctacgtcactaaagggcagtgcccgtatgcaaagactttcaataccagtagttcagagtaa

SEQ ID NO: 208905 - DNA, 543 bp, Klebsiella oxytoca; identical to SEQ ID NO: 128733

SEQ ID NO: 208906 - DNA, 147 bp, Klebsiella oxytoca; identical to SEQ ID NO: 128734

SEQ ID NO: 208907 - DNA, 552 bp, Klebsiella oxytoca; identical to SEQ ID NO: 128735

SEQ ID NO: 208908 - DNA, 204 bp, Klebsiella oxytoca; identical to SEQ ID NO: 128736

SEQ ID NO: 208909 - DNA, 726 bp, Klebsiella oxytoca; identical to SEQ ID NO: 128738

SEQ ID NO: 208910 - DNA, 474 bp, Klebsiella oxytoca
atggtggtgggggaaggattattcgtcgcttcgctcctcacccttcgggccgttgcctgcggcaacgttgtctcgctttcgctcgactcgaaccttggtcgaagattctcacccttcccgataagtgcaaacatcgtttacgttcatcggtattaccacaacaacgtggtaaagaatggtggtgggggaaggattattcgtcgcttcgctcctcacccttcgggccgttgcctgcggcaacgttgtctcgctttcgctcgactcgaaccttggtcgaagattctcacccttcccgataagtgcaaacatcgtttacgttcatcggtattaccacaacaacgtggtaaagaatggtggtgggggaaggattattcgtcgcttcgctcctcacccttcgggccgttgcctgcggcaacgttgtctcgctttcgctcgactcgaaccttggtcgaagattctcacccttcccgataa

SEQ ID NO: 208911 - DNA, 213 bp, Klebsiella oxytoca
atgttgtattcaattgccgaactcattgcgtatatcagcaccttcagcgcgctctcgccgggggatgtcattctgaccggcacgcccggaggcatcggaaaaaaacgtaccccgccgctctttatgcagcccggggacagggtggaagtcgagattgagcagatcggatgcctgatgaataccgtacgcagcgatgccgcggtagcgcgataa

SEQ ID NO: 208912 - DNA, 456 bp, Klebsiella oxytoca
atgaacaaactcatccacagcggcacgatgctgctggctttactacaccctttacagacgctggccaacgagacgcttttttctcccaccgcaaaaaacatgaccggagaatggggaggcgtgcgtacggatctgcgccgtcatggttatgattttacgctggaatatagcgcaatgacggccacgaatatctccggcggttacgatcgcgataaaaccctgcgctacagcgaccagtatattctcggcgtaaatatggatctggaaaagattttaggtattcacgacggtgaatttaaagcgtcggtgaataatcgtaacgggcgagatctgactcaggatcgccttcaggatccgcgcgcgccggtaataggctccggtgttcagagcaactacggtcgggggcaaacatggcacgcgacgcagttttggttcaaaaaaaaccgggtgggataa

SEQ ID NO: 208913 - DNA, 498 bp, Klebsiella oxytoca
atgtttcacccgtttgatattctcaccctggacaatggcgccaggctgatatttaccccctgtccgggaaccagaggggtgccacttgctaattcattgaaatcattaaaggaagccggggcacaggctgttatcaccatgatgacgctggctgaactcagtgaaaatgaggctgatgccctcccgtcactgtgcgctgacttttatatggactggtttcacctccccgtagaagacagctgtgcacctgaagccccatttgaacaggcatttgcccgggaaaaaacgaatctgctggcgatcgtcaggtctggcggaacgatggttatccattgtcatggaggttctggccggacagggatgatggccgctatcctgatgctcgagtcagggtatctgcctgctcaggtgaaaaaacaggtccagctaatcaggccaaaatcactgacttctccggtgcaggtcagttatcttaacaggcgatacggctaccagtaa

SEQ ID NO: 208914 - DNA, 924 bp, Klebsiella oxytoca
atgattattgacaacaggcaggacagtgaagccgatgatggtacggtttcgtataccatcagaaatatttcagcttcgctggatgcgaatattaccagtcaggcggccagcgccggtaagcccaaggcaacctggctgcgcgaaatgttggcagatattttcagcgatcacattcagaattttgtccgtaaaaacggtctggtggcttccctggatgcagagcttttggagtacctgcgagccagtgcagaccctaacgggtactcaggactgctgcctggcatcaacgagggttacatcagttttctgaacctgaagaacgatgatgatctcaagcgcatcctttttaataatgcgccttatctgcgggatatggcaagagtaggaatggccggggtcggttacttcaggcgtgggttgtcgcttgaactggctctgtttgcagagctggccgctcaggatgaggcggttatcaggatggcctgggaaaaggctttttactcacctcagcctgatgctgaaaatcagttctataaacacatcgactccgtcagattgctcaaaaaactgcctccactcgtacccggttttgtgactgaaggttcgttcgtgactttatacagttaccgtccggtgagttacggcgaatcaggatggcgggtgcaggccatcctgaaagacggccataacgggaaacagcccgttccggtccccaggtttcccggatgggtcatcgttgcagatccggggtacaccacgtcgctcagttcgccagacggtactggcccggcctatttcttccgcaataaccggtgtgaatttcatgtctatgcctggcatgcaggggagtttgtcacagacggagctgttgagaacaacctgacacaacagctgctggcctgcattgaaaatcagatggtgtga

SEQ ID NO: 208915 - DNA, 702 bp, Klebsiella oxytoca
ttgaggcgtcgttctgatgcgatagcgttgttgaaggagcgttcccggctggcgctacgcttagccgggctacgactgaggaggcctgcgggatcccccccaggcccgcgcaagcgcagcgccgccgggcagctggcccatcccccctcagttcaccgtcaggcgcagggccagatcctgcggataggggtcaaaatagttctgcgcctgcaggtagcgatccggatactcggccagatagtgcttaagcagcgtcagcggggcgaggatcggcagcagcccggcgcgatagttgaggataacctcccgcagctcgccgcgctggcggctgttcagctggtcgcggaaataaccctgaatatgcatcagcacgttggtgtggtttttccgcgagacgggccgcttgaggatcgccatcagcttctcacggtagacctcgaagaaagcctccagatcctcccattcatgcagcgaggcgacgaacgggccgatctcgcggtagcccgcctggtggtgagccagcagctgcagcttgtagcggctgtgaaaggccagcaggccgtggcgggtcaggccgcgggcgcgcagggcgttgagttcatgcagggcgaaaatgcgctcgacaaaattctcccgcagcagcggatcgtgcagccggccatcctggggtcgtctcagaattcggaaaataaagcacgctaa

SEQ ID NO: 208916 - DNA, 285 bp, Klebsiella oxytoca
atggctttaaaactgaaccgcccgaacgtcgaagaatctcagcagccagcaaccagcgcggaaaccgcgcgctttatatccggcgcaaccagaacgccattagtggggaaaccaaagctgatgaacttcagactaccagggcactttgaggagattctggagtcagagtcgcagagaacagggcagagcaagacaaccgttctaaaggcagcgctggccgcttttgataatttggatgagaaccagaaaaaccactggttacttgagtcagcaaaattaggttaa

SEQ ID NO: 208917 - DNA, 663 bp, Klebsiella oxytoca
atgggtaaaattttgcttgttgtatcagataagggcggggtagggaaaagcacctatgtagcgaatactggcgcaatgctagttaacaaaggaaagtcggtcattatcttgaagaccgataagaatcccgacctgttgagctggaatgagaagcggatcgataacggattgctcacgattccggttcacgagtcatatggcaacgtcagcaacgaaattaagcgccttagcaagctttgtgaggttctcattgtcgattgtccaggccatgacagccaagagtttcgtagcgctctaacagtgtccgacattgtggtaacgcttgttaagccgtcctctgatttcgaaagtgaaaccctgaccagtgttacggagaaagttcgtactgctcagaaaactaactcagccctagaaccgtgggtgttattcaccaggatcaactcagcgaaaccacgtcacagaaaagcggctattgagctagataaattactgcgttcggaaaacatctggattcaaccactgaaaacccgcatatccgaactggacgtttatgaaagcgcctgtaatgaaggggcaggggtgcatgatgtaagtcgggcatcgagcctttcaacagctaaagcacagattgaacttgtcgcacaggaaatagggattttgtaa

SEQ ID NO: 208918 - DNA, 732 bp, Klebsiella oxytoca
atgttttcaaaatcaaatcgaacatacaagtatggcgaccaaccgataagaatcactactgtgcgagtggttgaggaacagttcagaggggcggcaactgctaagcaagtggatgattaccttagaggaatattcccacactataaagatgatacccgccttaacctaatagttaacacggttaattgcaatcggagctattggagtttcaacaaaacagccagacgcacagatgatgtgactcatcgccatcatcaatatgatcgattattcaagcgcggaaacatttttgaaatctatcaaccctctattcatggcatatgggagttatatcaggatcagcaaggaaaatggtgttaccgtcaagtgaagtcggagtttgaagaagcagtagaggctgctgctaaattaccctcatctacacggaaacagattttagcaacggaaagtaaaactccagtgctaaccgaagtaacaacacgagtttataagcgaagcccgtatgtagttgccgaagttcttttaagggctaagggtaagtgccaaagctgtaagcgtgatgcgcctttcttgaaagaagatggtacaccatttctcgaagttcaccacattgagtggctttctaaaggcggggaagattccgtggaaaatgctatagcattgtgtcctaattgccataggcaagctcattatggtgctttagaattagtggcggttaacaagcaaggttga

SEQ ID NO: 208919 - DNA, 801 bp, Klebsiella oxytoca
atgcattcatacgaggaccggattcgggccgtcgaactctattaccggtacggaaagaaagcctccgttgtcgtcatggagctgggatatccttccacaaaacagctgggccgttgggttcggatttatgaagagaagggcgatttacccagggaattaaagacaagagaacgctattcacgtacacagaaaattgctgctgttgagcattatcttactcacggtggttgcctgtcgtacactcgccgagccatcggctaccccagtaacgaaattctaaagcgctggattgaagagttttacccaaatgcgcgtcccctggtcattcgctcaggcacaagcaaatgcttcagcccggaagagaggtctcaggccgtccgggagctctgtaaccgacgtggaaccgcgcgtaaagttgcacaaagcataggcgtcagcgtcccggtcctgtacaaatggaagaaagaccttatcagtgacgaggcttatcaatccatgcgcaaacgaaagtcagcccctcaggataaaaatcaggatgctttactcggtgaaatccagcgtctcaggaagcaggttcatcagctgcagctcgaacgtgacatactgacaaaggcgaatgaactgataaaaaaagatctgggcgtcagctttctgaaactgaaaaacagggagaaaaccctgatagttgatgcccttaagaaaaagtaccccgttgctgagttgctaagcgttctgcaacttgcccgcagctgttatttttaccaaaacgtctgtacgataagtatgcggaaatacgcgtga

SEQ ID NO: 208920 - DNA, 2610 bp, Klebsiella oxytoca
atgtcaatacttcaggaaattcaaagctggtccaccaaactaccactctggcaacaacatgctataaatcgaatctacgactcaaggcaacttgaagataaggatttggatgacatatatcttcttcttaaacttcatcatggaattcctgaacaacaggaaatacaagcattaacatttactgaagatcaaatagctgcaatagagaatatatcttcactaattcagataaaatcgataaaaaacctagaaaatataaatgcattagctgagaaagaagaattgcctatatctcctaccggactcaccataatctatggtgagaatggtgcgggtaaatctggttactcaagattactaaaaaaagtttgtagagctcgagatcagagagaaccaatccttcctaatgctaaccgccccccagaacaaactggtccggctagggcagaattcgaaattattaaagacggagaagaaataacactcaactggcaagatggcacccctcctcctgaagagctttccaatatatctactttcgactcattttgcgcaagagcctatatagataaccaaggcgactttgcttatataccttatggtctagacattttaactgaattagttaacgtgtgtaataaattaaagttaaagattgagcatgacacgaaaacgaataaaccaaatctagatatttttagtgagctatcaaacacaaagacccaaactggtgttcttcttgctaatttatctcatcagacatcaatacaaaaagttgaacaacttgcctcacttaaagaggatgaaattacccgtttagatacactaacaagaacattagcagaatctgaccctaagcaaaaagccctgatattaaggcaaaaagcactacgttttagagggctctacaaaagaataactgaggcttcaacttcaatatcatcaaataaggaagataatttaaaggaattaataggtaagtataaatctgcaagaaatgcggctgaaattgcggctaaagctttcaaagaaacccctgggcaacttttaggaacaggcagtgaaccatggaaaatactctttgaagcagcacgtgtattttcaaaagaaaactaccccggaaaacacttcccaaagttagaagaaaatgacaaatgtcctctttgtcaaaatgagttaggcgaacaaggagtgacacgattaatttctttcgatgaattcatacagaaagaagcggagaagttggccgtaacgacaagaactaatgctggaaatgcttataaggagatagagaagttaaacttgagtctaaatattgatgaagcattaaataatgagttatcagactactcacctcaattattagatttatgcttgacgtttgaacaacatttaaaaaagcgtcaaggtgatattatcttagccgcaagtgaaaaacttccttgggaagacgtaagtaagttacttgacacacctaatttaatcattaatgaagcagttataaaacttgaatctgatgcgaaggctttagaggcaacttttaatgcagaagctaaacaggctatggttaatgagcataacgagttgatgtcacgttctaagctaaaagagtttaaagatattgttatcgactgtatcttaaaattagacctttgcaataaactaaatcaatgttctgccagttgtgggacaacggctatatcacgaaagtccactgaattggcgagatcaatagcgacacctgaagttattgaaatgcttaacaaagagtttgaagctctaaatgttcatgagctaagagtcacaatgcaaaactcttctcctggaggcaaaactcaatttaaattagtaatggaaaaatctaatggtgcaaggccatcggagattcttagcgaaggtgaacaaagagcaatagcaattgcttcattcctgactgaagttaacttatctaaaacaatgtccggattaatctttgatgatccagtatcatctctagatcatcgccgtcgctggcatgtagcaagacggctagtagaagagtctaagaaaaggcagttaatagttttcacacatgacatttattttttatgcattcttcagcaagaatctcaagagaatgatgttgtaaaccttacacaatgcatcagaaaaacatctcaaggttttggtgttcacacagatagattaccatttgatgcactaagcacctcaaagagagttaaagcattgaggggtatgcatagtgaagtagtaagacatcataaaggtggagacgaggatttaaccaaaaaactcacacaagatacctattaccatttaagaatggcttgggaaagaagtgtcgaagaaattctttttcaaggtgtagtgaacagattttccgaaggaatttccacacaaaaactaagatatgtgattgtcgaagatgaagattaccgattggtagaatctaatatgaccagatgttcgaaatttgcacacgatggtgctgcaatcgcaatggttcccactcctcatcctgacgaattaatcaaagacatcgaaatattagaatcgtggagagtattgatagagggcagaaaaaaaggagtcgaggccagaagggcatag

SEQ ID NO: 208921 - DNA, 498 bp, Klebsiella oxytoca
atggcgggatcagattttatattacctatggtagcgggagccatgctcagctgggccagttacagcatggtcgcgcacgttacatcaaaacggcagatcagcactctacgagcaatctcatggggtgttctgggaatgctttcactagtgttgggagtaagtgcattcgcagctgttagcactcaactcccgggagaaaaacaaaatgccttgtgctcgattaacgagccagaatgctatgcaaaagcacatcataaccccgtcaaaaagtgcaaacaggtaatggatgaaaaagcgacgtttcgccatgtgtggctggatcgcgaagcaccgcaggttttcagcacctacctctggcacgacgagcaaaagaaaacgattcaagcatttggacaacaggctaaggccattaacagcatgaatatgctgataccactgcaatattattgtgtttttaacgccaacaccggggaagtcatcgcggcttcatttgagtaa

SEQ ID NO: 208922 - DNA, 915 bp, Klebsiella oxytoca
atgtcatcagaaactagtttacgtagccagcttgagcttacaaatgatcagcaaattgatgtccttgctgcgattctcgacaatgagaacgaacaggcgacatcagcccgtagtatttctatcgaacctcaagaagttcttgagaaacaccccggtattactccttttaaggatctcgtttcaaaagcatcagagatcgttttggcaaggaatggtaatgagatagcgcaatatctacgctctatccttgaaaacaaaaatgattacctaaaccatcgagatgaagcagtgtcattgtcaattgcgctgaatatttcacaatacatagctccgagatttcgtgcgcttcctccatcacctaaaagaacgtctgatgatgaaccaaaccaattaagcattgaccgccaagtcatcgatatgcactgggcatggatacaaggacagaaaaaagtggtaggtgcagaagagtttgagcacctatttcagcgagaagaatttgactggatcttggcagaaaaatttgcgcgtctaaattggacaactgacgtaaaaatcagggcattacagatcaatgcaaaccttcaatgggagttagcacagtatcaatctaaaaaacaccgtgattcatggcggaaacttcaacaaggagatgtccgaggtggcaagttgcattcattggggattgcacaagttactgagagacttgaatgttcagtaacaaaacggaaaaatcttgcaaaacatattcctcattgggttaatgtttggcttgcttcccgcatatccgataaatcatatatgagtttagcgcagataatgagatttatgacaggggaaagccacgatgagaagaggcttaaatcatcattaaaagctgttttacaacgtttatatttatatgagaaaaagatgtga

SEQ ID NO: 208923 - DNA, 165 bp, Klebsiella oxytoca
atgttagacttaagggttgtagtcccttttactaatttaaacggatatcactataataaatcaattagtgacatccttgagttatacgctattgaaagggaattagttgttccagatattgcgattccggtacttaagaaacgccttaaggaacaagaaggttaa

SEQ ID NO: 208924 - DNA, 1119 bp, Klebsiella oxytoca; identical to SEQ ID NO: 164530

SEQ ID NO: 208925 - DNA, 606 bp, Klebsiella oxytoca; identical to SEQ ID NO: 164531

SEQ ID NO: 208926 - DNA, 564 bp, Klebsiella oxytoca
atgatcgttaagtttcacccccgggggcgcggcggtggcgccgggcctgtggattacctgctgggcaaagaccgccagcgcgaaggtgccagcgttctgcaggggaagccggaggaagtccgggagcttatcgacgcctcgccctacgccaaaaaatacacatccggcgtcctgtcttttgccgaacaggacttaccgcccggccagcgtgaaaagctgatggcgagcttcgagcgggttctgatgcccggactcgataaagaccagtacagcgtgctgtgggttgagcaccgggacaaagggaggctggagctgaacttcctgatcccgaacacggagctgctgaccggcaggcgtctccagccgtattacgaccgcgccgaccgaccgcgcatcgatgcctggcagaccattgtgaacggcaggctggggctgcacgatccaaacgcgccggaaaaccggcgggcgctggtcacgccgtccgcgctgccggaaacgaagcaggaagccgcccaggcgattacgcggggtttactgggggtcgtctcagaaaacggaaaataa

SEQ ID NO: 208927 - DNA, 558 bp, Klebsiella oxytoca; identical to SEQ ID NO: 145585

SEQ ID NO: 208928 - DNA, 276 bp, Klebsiella oxytoca
gtggcttccatctctatcagttgtccctcctgctcagctactgacggggtggtgcgtaacggcaaaagcactgccggacatcagcgctatctctgctctcactgccgtaaaacatggcagctacagttcacttacaccgcctctcagcccggtacacaccagaaaattattgatatggccatgaatggcgtcggatgtcgcgccagtgcacgcattatgggcgttggcctcaacacgattttacgacacttaaaaaactcaggccgcagtcggtaa

SEQ ID NO: 208929 - DNA, 624 bp, Klebsiella oxytoca
atgacttcacgtgtctacgcttatctcagagcttccaccactcagcaagacgcaacacgcgccaaaggtcagttggatgagttcgctaaagccaacggtatgactatttcaagctactccaccgagaatgaatctggtgcatctctaaagcgtcctgagttgttcagattgctggatattgcgcagaagggggatgttcttttagtggagcaggtagaccgcctgtcacgtttgagcggtgaagactggcaagcattacgccagaccatcagcagtaaagggattcgtgttgtagcgttagacttgccaacctcgcacatgttgttaaacactggcgacgagttcacagggcgtatgtttgaggcgcttaattcaatgatgctcgatatgctggctgcaatcgcccgtaaagactatacagaccgtaagcgtcgtcaggcacaggggattgtaaaggccaaggctgaaggcaagtttaagggtcgtccagaagacacacaacgcaatgagagaatatccaagctgttacaggctggtatgtcctacagtgacgtaatggaaacggtgaattgctcaagggcaacggtggcaaaggttagtaagagtctcaaagcaatggcttaa

SEQ ID NO: 208930 - DNA, 651 bp, Klebsiella oxytoca
atgagcacccttccttttgatttaccaggcaaggcaattcagccgtctttttctgagccaccctttaacatcccctctgatgaggaataccagaaagcaaactccagactaccatttgatttaccaataaaacctgctccaataagcaaagaatttctgtttttaacagggcgagaggatttatcaataagccggaaaagggctgctgaagctgcgcgtgtttatagtgaaacgttcattcataaatgccccgttcatgacctcgcaacgcatttctcaagtaacgggaagtgcatacagtgcagtaacgattatcaggcacgatggcgctacgagaataaaggctaccttgcagcaaaagacacttgcaagcgcatgggcttatcttacaggggggtaagagatattatcggatatactgagcaggaattcacacggcatattgaatcattatggactgatgggatgaattgggataattacggcacaaaaagtgatgagtggtcgattgaccataaaatccctgtatcacacttcatcaagacaggtgaaacaaacattgctgttattaatgccctgagcaatcttcagccactttggcacatggacaacatgaaaaagagtgattcactcgaatatgtgacagagtga

SEQ ID NO: 208931 - DNA, 183 bp, Klebsiella oxytoca
atgaaaaagcaattttataaagtagtgggaaagacctgtcataagattcatttagaaatgagatgtatcagcgatttggtggatttgaagcctaataagagttattccattcctcggcttattacacgggcaagacgttatattatgattaaacagattgcagaaaaaattaatggaaagtaa

SEQ ID NO: 208932 - DNA, 516 bp, Klebsiella oxytoca
atgaacagccctacacagaaacgtattgaagttgaaaactattacattccgaaaattaaatcagctctcgataaagttgatgatacaaaaggtatctatgaatccgataagcttaaccgtgatttattggtggctatcaagacaaaacaactgattgcacaaccggttgaaacgtatggatttagaatccgtcagattaccagtccggcaatgattactcctgtcgtgcaaagcatgatggagcagggattcactgtttatgagatgaaagagggttttgttaaattcattcagacgccccaatctacaaaacataatcctttaaatgagattgagaaagctgctaaatcagacgctgtgaagtttgtggatgcagacatcaaagtaaaggaagctaaagtcacaaaagcaattcatgagcacaatgtattagtcaaacaggctgaaacagcacttgcagaaattagaacctttgaaagctatcttgatgtcattgtgagtgaggagccagagtaa

SEQ ID NO: 208933 - DNA, 363 bp, Klebsiella oxytoca
atgaatagcactattcagaaacttcgaaatatgacgatgaccgaacaggaatataaagcacaaatccagtctttgcagttacagcttaatcaaaatcatacagctaaagcaattgaggttatagagcctctctgtaaggtaatcggcttagatgcttcacagtatgtactgtccactagcaaaatgacagtaagtcaaaaattgttctgtgactcaattatcaaggccgcttcatgcagaattaaaaagttagaaagagaaactactcttcagattctggatgctcagaataagcgtgataaagctgttttggctgcaaaagaggctatggaagaaatggttaaaatggagaggctaagttaa

SEQ ID NO: 208934 - DNA, 219 bp, Klebsiella oxytoca
atgggtaggtcagatgaattcaagaatgatgcaccagcaattaatgaggtagttaaatattacgactctgataaacgtttaattgttggcgctaaccttatcggaaagattcactctcagctattcgataaattggttagaagggctggtgatggctcaaagcgtagccagcaagcccgaatcacagactacttagagaggttacttatcaatgtgtaa

SEQ ID NO: 208935 - DNA, 1524 bp, Klebsiella oxytoca
gtggctgaatccgataagggaaccattcgctataaagaccgggaaggccagagtacgactgatgaacgttatgcttatgaccgacaatggtacagaaaatactcctggtcaggtgaatggtccgaacatcaactgaagaatggtcaggcagggatagcggaaattgctgctgcacccgtcgcacaacagttcgaaaagttaagctcactctctcccttgtttgtcggtcgcgggtttaatccaaaaaacagggccgaaattgcataccgtgctgcaagtctggcgcttgacccggatatcagtcctgacacggtgctcactctgtcaggtacggtaactcaccatcaaaagacggtgttggttgactatgagttgccggagtctgccgttggctttgtgatggggcacaacatgcttgatgagtactgggatacggacaaacattcgtcaatgttccgccccggtaacaggatggactcccggtcaggcgcaaatggaagactgccgcgacaggatatttccagccgggtcaccggcccgattctggcgcatctgcatcataattttgccacggcgtggtgtagagaaaccggccaggacctgctgactctccgcaatgctgccgttgtggctaaaaacctgaaaccaagacctgtccacggtaccccgctgctggcacagttattacgtactcaggcgcaggcagggaaacatgatattgaaacgctctatctgaaagcggtgaataatgcgacgcagtttatctatattgaaaatcagtattttcgctggccgccgctggcagaattaattaatcaggttgcggaaagacagagtaaagtggggcgcgaactgcatctgtttgttgtgactaacgtaaccgatgaaggcattggtgcgggaacggtgaatacccagcgtatgcttgagacgctgggccaggcaaacaccatccctgaagtgactaaactgcgtaaggtcggacaactcagcaacgaaacgtttggtggttctgttggctatatcgaccctggagaaatcaataaacgtaaccgcgagatgagtgagaaaattgctgactttaaaaagaaggcagatgaaattcagagcagtgaaatactgccggaggagcgcccgggattgaaggttcatatctgctcgctggtggcaccggactcaccgccggatgagtggatgccggtgtatattcactccaagctgatgattgtgaatgatgtgtttaccacgcacggttcagccaatatcaactcgcggagtatgcaggtggacagtgaaatgaatattgcccatgaatgggccagcgtgacgcgggatttacggcggcggttgtggaatctgcatacaaacgggaagggggggcaggataatgcgaaagatgcgtttaaggcatggggggatcttttggataaaaatgagacccatcaggattcaaaaaaagaacaaccggaggcttctctgattaaattcctttataacaaaccaacgctgagcgatctggactga

SEQ ID NO: 208936 - DNA, 1272 bp, Klebsiella oxytoca
atgaaaagactcttgcttttatcctgtctgctgctggtcgcctgtgatcagagcaatacccacaaggatgcgccgatgaacccgctgactgatattaacgcccggctggcgtttacctgtaaacaccagattattcctgaaacgtctgctgataccgatgtgctgtttaactatgcccgctggttacagaaaaacaacctgattaaccgggataaaacggtggatgcggagattgcgcgactgtaccgtatcgcggcggaaaacgggcattacaaagccagtattaacctgcagaacggggcgctgcgcgggcgtttttcactgagcagccatgagcgtctgcgtctgagtcagcggttgatagatgcgaagatagcggccggttattactttattgccatctatctggagcacggtgcggcaggactggcgcaggatccggagatggcgctgcgctactatcgtaaggcagcggatgaggggagtcctcaggctcaggcgtatataggtaaaaaactggcaccagccgatattgccccggatatatcccttcagatgcgtcgttgtgcggctgaacaaggagaggggcgtgcggccaatgcgctggcgaatgctctcgctgttgacaaaaaatattcggaggcagttgaagcattccagttgggcgttgaagcaggagattcaggttctgccagtttccttgaacatggatttgccgggcctgaaccaacggacagactctattaccttgctcagcagaaggatccagagcgcgcccggcgctacgagcaaataggcgctgtgctggcaaaatactcctgggcccatcccaccgtccccgaaatcaacgatatcgtcccgctaccacccgcgccgctccctgcgtgggacggcaaactgaagtggctggaagagcgcgaggccaatatcccgccgccaaaacctggcgcagcactgatagcgaaactggcgaaagcgaaacagctgaacccggcgacaggcagaccgttgccgacatcaccggattttgacaaggacagcgtggcgctgttgctgtgccgcagcggcgaaccgtgcccgaaaagcggctactggcaaccggcgtggataccgcacgaaggggttggcgataacaccatccgttatttcagggaggggaaaatcatgccgacgcagacggtagatatcattcgtccacgcccctggccgctgcgcgataaatggcagcgggaagagcagcaggtgcactggcgactggtgggcgaggcgtaa

SEQ ID NO: 208937 - DNA, 846 bp, Klebsiella oxytoca
atgaagtattttcagaatataaaatttgcctgtcataacgcgtctggattcacacctgaagaaagtcagattgctgcaaagtcgttcagtgaactggttcagtatacttctgagggggatcaaataaaggatttctggtacaaccctgaacataaacaaaaacgtgaaggactgcttgctacagcaataaaagccgggagctggaaggccgcatatgtgaatagtgtctgggcaataaaatatccggatgcggagactccggcagatgttgcttccaccaaactccgcgaactcgtatctcagggcatccccattgctgcatacaaatatgcgacgtatttgtttggtcgagacgatgaatcgatgtactacttgtatgctgaagccatcaagcgtggcagtccacaggccatgtcagcagtaggaggaactattgttgtcagggttcaggaactgcacccattaggtaggcagttacttgaatgtgctgcagggcaaggttatgcggaggcttacgatcatcttggtttgcttgccgacatggaaggcaggagattagatgcctatcgtttgtgggaaaaaggtattaatgaaggatgtgaagggtgcatccgcagaatgagtaatctggctaaagttcggcgtggctattctgcggatgtgccgatgatggagttgatgcccgaacttacgaagattaaaaaattcaatgaaaataattttttctatcaattgactgaattaccagatttctatcgtagtctgccggatgaattggtttttcatctaaaagattccgaacttttaagtctgcttaagctggagaaagtttctcgtatgttataa

SEQ ID NO: 208938 - DNA, 234 bp, Klebsiella oxytoca
gtgaccatggaatgcgacgggtacgccatgatccttaaaagtgggatgtccttcagcgataacggttggaccatgacctttgatcgggcagctgacgggatctcccagtcgcgccacgccgataccaccaaatttcatgttagtggaaccactgagcactttcccgcccccggtatgcgtatcgcctgtacgaataattcctttcatgaatttatttcaaccttgttgagttaa

SEQ ID NO: 208939 - DNA, 1236 bp, Klebsiella oxytoca
atgcctgtaaacctgaaacaaattccgccgcctgccgcccgacctgcctttcctaaatggtgggtgtggctgttactgcttttgggtgggttactggctggtactgcctgggcaatcctggtcaacaaagagacgtctgagataaatgcagcagaattttgggaaatagcgctggtgtttccggcattgttctggttgatcctgctgatgttgcgtattgcctggtataaaggtctacaggcaacggctgatggcagtaataaagaacgtgaacagattattcaacgtgaaatccgaaggggtcggcgttccctggccgtgctgggcgtcagtttgcgtagtgcgttacgtgagcctgacgacctggatggtcagatgcagtggaatgcgctacaggaaaagacccaggctttaaaaacccaggcttcctggcaaagtaatgaaggtatacggcatagtcggctgattcgcattggcaacgagacggcagaacaattgttgagcagagagttaagcggcatgctgaaagaactgagtcatgtgctgacttctgtacccgctgatgtgccgctggcgctgcttgtggagaataacagtagtttgtctgacagccagatacagtcgatctggcaacaaagttggactgcaagccatatacagcaatctgtgatgcgtatcgaaggccgagggctggaggtggtggaccagtggcttgatcaccatatgaatgagccgtcaatgttactggtcgcggcattgcagcttgctcctgaacaggttgaagggactgcggaagctgtagttggtctattgcttggtagtggtacgcagattgctgctgatctgacgccgctggctacgctacaccggccagagcaggctcagggaataagcaaccaggatttcaactatgcccttgagcgagcttttgactgggttccgatcccagccaaagcagtacccggcggctggttggtgggtgttgacatgatgtggaatcagaccattgccacagggttgatagccttgtcgagtccgataaatacaggtcagaatctgcacaatctggacagcagcctgggttatccggggcctgccgcgccctggttagccattgcctgtgcgacagggaaaagttctggcggtgaaccacagcttattgttagtggcgatggccttgctgatacgccgttgtgggtcacaatggtgacgcctgcttctgaattgcagggttaa

SEQ ID NO: 208940 - DNA, 822 bp, Klebsiella oxytoca
atgaacgcatcgggtggcatattgcgctggagtggtcgtttcggggaggcattggtattaggggggatttgctggggaatttatcgcttcggtagcagaattggtctggatactccccaggccaaaatgtatttctttttagggttatgtgtcattaccttgctgtttcgttatggtgggcgcgtagttcagttgttattcgggcatcgtcacgaaatacatgaaaagagcgctccgtcagcaaacggggggcttttgacacagatctcgcggagtcatatttctgttgatgaattaaaacaggctctgagcaatcagtatggtcgtttcgggtcaaataatgtcaccatactgatgctgacggggacagttgcagatgtagagcgtctggctccgggtctcagtagtcagtactggcaggaggacggtagtattctgttgctgtggggcggcgatccgtccataccggtagatactgactggcttaccgcgttgcataaactgcgccgccgccccgttgacgggatggtgtgggtgacctccgcttttgaccgattgccagtcctgaatcaacatgaatccgctgctttattctccgccgataacatggacaatgtcgcacatgctctgagcgaacgcggtaagctgcttggctggcagttgccattgtacgtctggtcattgcatacgcgggcaggcaatcagaccgggcgtattgcgcaatcagtcggaagcatactgccgttcggctgccagccgctacagatacgccagttattgttggaactggttccgaaactgattgacgctgaaacagcttaa

SEQ ID NO: 208941 - DNA, 855 bp, Klebsiella oxytoca
gtgacctacaaaatacgagatctgaccgtagagttcaccctgtctgagggtgagtttgagagcggcagggggaatatactcacgatttccaacgccaaagttgatgcttcgatttctgcttttgggggaacggccgccactcagctagagctaagcgtatggggtttgtctttggaatacatggccaaactgagcgggaaatcacaaactcagtttcaggccaaaaagaactttgtgcgtgttgtggcagatggtgaaaccgtattctacggcacaattctgcaatgcagaataaacctcaatcagtcaccagatgctgcgctggatctatctgccgattcggctggattctacagaaccattccaataccaccaacctacgtcaagggatcaacgactgttcaggcgataatacagtctatatgtaatcaggctgggttaaagtttatcaatgctggcataaacattccggtgaaaaatccaacctttaagggtgatgcgataaagcaaatcagcgacatcgccagaggctacaacttcagttatgaactgaacttcggcacggtttacttgttctctggtgacgtagccagagataagattatcccatttgttggtcctgataatggccttatcgggtatcccgtgttcactcaaacgtctatcagcttcagatgcatgttttcgtcgtcaattgctgtgggtcggtacatcgatcttgaaacttctctcccgaacgcctcaggacggtacatggttgctgatgggacaacacattacctttcgtcaaatatggatggcggactgtgggaaacgtttgtcgtagcctttcaaccatcaatagcgagtcagtaa

SEQ ID NO: 208942 - DNA, 306 bp, Klebsiella oxytoca
atgcaggaaattacactcaacgcgataaagtcacagcgagttacggtatctctcaataacacctcctacacgataagaatccatcagcgctcaaccggattgtttctggatatctatcttggtgagtcggctatcgcccaaggcattctatgcctgaattgtaattgggtagttaggtattcttatcttggattccccggtgaccttgtttttgtcgatacaaaaggcaactcagacccttactgggatgaacttggtagcagattcaggctctactttcttaccacttcagagatttcatcgtga

SEQ ID NO: 208943 - DNA, 837 bp, Klebsiella oxytoca
atgttctcactgaacgaaacaaccctgctgtcagcgattaactctggcagcatattctccgtcatcaactccacgctttatccatcatggggtatcacttacaacaaggttgatgagaccctcacaggaattatatccggaacaacggtatttgagcctacgggatgggtttcagctgaaccagttggtgacgcggcaatagtaaacgctccgatagagaaaggttcatacacttcatacaacaaggtcaggcgaccagcagagttaagggttgtctttgttcttgaaggctggagtgcctatagtggcgcgcttcccaacataacaaacttttccacactcagcagaactggtcttttatctatcctggatacgatgaaaaatacggcctgtacgtatgatattgagacgccagatcgcgtttatgagggatatgaccttgctcattatgattactctgtaagcgcgaaagccggtttaacgctgctgaaagtcagcgctacatttcagcaagtgatggatatcgctgaagtatctttgtcgagcaataccacagccaactcaccaaccagcaatgatgcatcaagtgtcaattcagcaattctgaccacaaacggccagtcatctgtgaaagacgtcacgctgacagatgttaagaacgcgtggactagtgggaatgtgtcgctatcaagtgctttacaaacaacctcaagcgccatcgtatctggcgttaattccgctgcgacaacggtcggcaatgcatggacttctgcaactgaccaggtttctacgcaaatcaaggacggcataggtaaattcgtgtcggtggtgatgtga

SEQ ID NO: 208944 - DNA, 2046 bp, Klebsiella oxytoca
atggctcaagttattgacgcgttgcttatcacctttggcatcgacaccagagagtttgataaggcccggcagaaaatcgatgacgggacaaaaaacctcagcgaaaaatcaaagaaaaatgccgactatatggaatcccagggcaagcgagctgcgggattcttttccagtatcaaaaatgaaatgcttgcgttggctggcgtaagcctgacattcggtgggactcttggtttcattaagggaatgactggagatctgcaggcgctggccaatcaatcccaggtgttagggttatcagcaaaacaacttgatggatgggccagggcagctgaagcagcaggttcgagcgctgagaaaataacaggcactttaggtgacctaaacacaaaattgatgctgttccgccaagggaaggcagatcccgcgctaatgggtgcgcttcaaatgctatctcaggataccggcgcggtattcaacccattgcagtctgatgcgcagggaatccttaagcaagcgatacaggcagccaagaaggaccgaagcccagagcgggcaaggatagctcttaggcagatggggcttgatgatgcaaccatcaattccgcactgaatggtcagttattacccaacgttgagcgcttcacctctggttctggagttggtaacgccaacattaaggcggcaaaagagtttaatgaacaatggacggttctttcgcaaaattttgatgcctttaaaaaccaactttattctagcctcattccttatgttaagcagttcagcggatatttgaatgagctttcagagtggatgagggaacatccaaaagaaattaaagaaggaattgattcagtattttcatccttaaaaaaggttggcgaaatatccaatgatgccgcaaatgcagtgggtggttggggaaacgcgataaaaatcctgataggagcagcagttggtgggaaattacttgggtttctcacgacgcttactggatcattgcttggattaagcagaattgcacttccagcgtggcttgtggctgcggctgggttaagtgcttcaggtaaaattgatgaggccagagaaggcgctgaaaagcaaggtgttgatgtagggacctacttagtagggaagatgaaagaaaaacaagcgcaaaatgctaagcgcttcgatgattatcttgcggcatcctctccaacagctttgagccctcaacagcaggctatgaaggatattttatcttcggcaagatttcccttgatgaattcttctgaagaatcaaagcctgagcaaagaaggcatcaacaagatgaaaaatcattctgggattactcaaagcaagtattgggtaaaattgctgattatcttgtttcaccagctggcgcttcagaactacctcctaactttcagggatacaatccaaatgttccgctgaatgctacggccgcaaaacttggcccgaagggtaaagcgcttctcaatgcaatgtcaggcgagttcgggatgcttgaaggtaaatatggattgccttcagggttacttcgcggagtcgctgcaaccgagtctggtggcgatccaaacgcagtttccaaagcaggcgcaaaaggtttgttccagtttatgcctggcactgcaaaagacatgggtttgaaaggcaatgacgtttatgacccaaacaaatcggcagaagctgcagctaaatatctccattacctgattatggcgaccggggatacgcaatcagcacttcaggcctacaactggggcctgggcaacctgcagaaaaaaggcatgcaaaacgcgcccaaagaaacgcaggaatattacgccaaagttctcgctaatatgaaggctggttcaggaatggctgcggatagtgttgcaccatatcgggcaccttcacagggcggtcaaagcttccacattcaacagatgcaggttgttactccggcgtcaaatgttgggaagctgtcgcaagacatgagccggtcagcacagaacagagcgacgcttatcggatatgacagcggccagtcaggaggctaa

SEQ ID NO: 208945 - DNA, 465 bp, Klebsiella oxytoca
atgagccgcaagcatattgatttcaccattgacgctaacaagcgcgacaaagggaagaccttccgcattactgaaatgtcggcaacagacgctgagatgtgggctactgacctcgcatttgcgctgattggaagcggtgttgatgtacccaataacgtaacgagcttcctcgccaaagcagcaggaaacggcgatgaagaaagcgaagaaatccgcgactcgatcctggcatccggcatgataggtctggcgaaatacggcattactgccctgtctaaggttgatcgcaatgagcgcgtccgcctgtcaagcgagctgatgcgctgcgttcaatttgttgcgtctgctaatgctgttattccgttatctcctgagattcatatcgaagaggccagcactcttttccgtctcaaagtagaagcactgaaacttcacctgtctttcttgaacgccatcgcagactag

SEQ ID NO: 208946 - DNA, 441 bp, Klebsiella oxytoca
atggctaattcattaacttctgctgactgcacaatcattctgacggtcaccaacctgtataccagtggctttaacctggagcagttcgaagcgcagaacatcttcgagcaaggcgatactgagctggcagaaactatccgtacagcggacgggaaactgactggcggtttcatttttggcgacctgccatggacattccatattctcccggactcgccaagccgtagctatatcgacacctggtttcagacacagcgcacatcaaaagcgattttccgctgcaacggtacggtctatttaccgtcactgagccggaaatacacgatgacaaacggcattttcaaaagctggaaagccgtcccttcagcaggtcgcattcttcagccaatggctggcctgattgaatgggaaaacatcgtcggctctgattacaccgcataa

SEQ ID NO: 208947 - DNA, 1491 bp, Klebsiella oxytoca
atggcaattagcttaaataacatcatcaagattaaccctggagtgctgtcagctactggctcggcgcttgaccttaacgggttgatcctgactgacagcgaatacgctccgaaaggtgcgctcctgtcattcactaattctgacgatgtctccacgtatttcggtagtgcttctactgagttctcgatggcggacatttacttccagggattcaataacgcaagccagactccgggccagttatttttctgccggtataattctgccgcaatcggtgctttcctgcggtcggcaactcttggcgcaatgacactggcagaattaaaactgcttagtggcacgctgacgctgacaatcaacggcacatcgattaccaccgcgagcatcagcttttcatctgcggcgagcttttctgcggcggccacgcagattgaagatgcgattaatgctgttaactccagcattcaggtcacggttacgtgggataccacgactaaagcattcatcatcaccacagtaactactggtgagaacgcaacactgacttttgcctccgggacgctggcagccgacctgctgttaacttcagcaaccggcgcgactttgtctcagggtgctgacgctgatgtcgtgagcgagttgatgacggcagtcactgctcttacgcaggactgggcgcaattcacaactacgtttgtgcctgatgccactgaggttagcgctttcgcttcatgggtaagcggtgagtcatatcgctatgtattcgtgctgctcgatgattcgaattactgcctgacggcgggaagcactcagactctgttttacccggttaaaactgcaagttatgctggcgtattcccggtttatggcgatgtcagtaaaaccgcctctgcgttgggttacggggcaagcctgaacttcaaccagcaaaatggtcgcttgccgatcgctttccgcgtgctgaatgggttactggcagacgtcaccactaactatgattattcagccctgattaccaacggatacagcttctacggcacgtatggcgcgaataactacacgcagaacatgtggtacaacggcgctatctccggcgactacaaatggctggatgcgcaattaggtcaaatctggctcaatgcaaacctccagaaagccattctgacgctgtttacttccaatacgtacattccgtacaacgcacagggcaaagcgctgattgaaggctgcatgacggccacaatcgagcaattcaagacctggggcggatgctctgttggaacagacctggattcctcgcagattctggcaatcaaaaatatcgtcggctctgacatcagttcttctctgacgtctgctggctactatatctacgtcgctccatttaatgcagcgatgcgcgcaaatcgaaccacgccaaccgtattcctctggtattgcgatggcggcgttattcagaaactgactgtgaattcagttgaggtgcaataa

SEQ ID NO: 208948 - DNA, 567 bp, Klebsiella oxytoca
atggcggcatccatcacgccgctgatggatggtttgtttctgtctcttcgcgcattccttaagactcacctggttctttctgcgtgcagacaatcacaacagaacaacgctgagatgccagatggtaactacgtcatcatgacgccactcggcattgacgggctatctacaaactccatcagctaccagtacacaaccggcgcagattcaggaacagaaacgcataaacgaacggccatctggcgctgtcagctggatttctacggggatgccgctcaggactatgcaaacatcatctttacgctttctcgttccgattatgcctgccagtggtttcgtgatttctcggagagcacatctagcgctccgccgttaatcacccctctttactgcaaagacccgatacagacaaccatggtgaatggtgaggaccagtgggaaaaccgctggacctgcgatttctatgcgcaaatccccgtcgatgtgtcggttactcagtatttcatgaccagcgcaaacgtccgcgctgattctgtagacgccaaatttcctcctgagagtgcgtaa

SEQ ID NO: 208949 - DNA, 366 bp, Klebsiella oxytoca
atgaacctgcataacctcgtttccggactgattggcactgttaacccgtttattgacgtgcagatgaaagtcttcgtcagcgaatcggaagacgatagcgggaagatggtcaaggtttatgccgagtctaccgttaacggtcagcttcaggctctgtcaaacgatgacctgcgacacgtcgataacctcaacatcactggcgtcgtcaaaaagttctacgtcaacggctccttcaatggcattaaccgcccacggaaaacaggtggcgacttcctgataattggtggtgaaacatggatgatccgccaggttctggaagagtggccagactggtgctcattcgtaatacaactgcaggtaacctaa

SEQ ID NO: 208950 - DNA, 486 bp, Klebsiella oxytoca
atggcttcgatatcaggtggcgataaaatcaaccaggtgctggccgacatgctgaaaggtgcagaagttcgcatgaatgttggcattcttgcgggttcaaccaatgaagataccggcgaacccatcgcaccttacgccgcagctaacgaattcggcaccaaaaccatcccggctcgcccattcatgcgcaatacggcagcggataagacctccgaatgggctgatgttgcagcaaaagccatgaaaggacagtcacaggatgccgatggttttcgtaatgccttcactattctcggcatgacagccgctcaggatatcaaagacaccattgaacactcggttccgccgcctaacgcgcaatccacgattgacgccaaacgcagaaaaggcagggcgagacctgagatgacactggtagattccggcagtatgcagcgcgcggtcgatttcgagattatagagggcaaagataatgaacctgcataa

SEQ ID NO: 208951 - DNA, 414 bp, Klebsiella oxytoca
atggcgatcgtcactttcgacagtgacgagttcctttccatttacccgcgattttctggtgttctcaccccggcgcagttgcagaacgcatttgatgtggcctgtcttgtgctggataacactgaatcgtctgtagttccctatgaccctactaatggcatcaatgaccgcaagacattgctctatgcgctcacgtgccatatcgcctatatggcgctctgggggaatggtcaggctggccctgcatccggagcgacagagggtagtgtaagcgtctcgtttgctgtccctgatgtaacaaacgcctcatggttcaagatgacggcgtgcggccagttgttctggcaggcaaccagaaagtacgttgttggtggtcgatattacgcccggcgctacgttcacccatggggatga

SEQ ID NO: 208952 - DNA, 366 bp, Klebsiella oxytoca
atgtccggcactattcatgttcgcctgaagcatccccacggcattatttttgacctgactaacgatcggaaggttttcctgaaaggttcagacttccacctgcgtggtctggaaaaaggtgtgctgacttgtggctttggcgcaacttctgtcgatgctgctgactgggaagaggtgctggcaacgtatccggcgatggttgcagacatggtccgcaaaggaacgctcattcacgaaaaagacgccgcaagcgctgaagataacgccgctgagaaaaaaggcgttaaacacggtcgcgagccagttgatgttcgtaatgacaaaaccatcaaaactaaagaagtaccggccagcgaggcagcataa

SEQ ID NO: 208953 - DNA, 1020 bp, Klebsiella oxytoca
atgaatattacgtttgaacaagcgaagcgttatggctttgatttcggtcgtaacgcccgccagtggattactgcggacaatatgccgcaaatcctgcaggatgccgcgctgatcacccaggctaacacaaccgtaccggctgaattgctggcgtacatcgacccgaccgttattgagattcttaccgctcctcgtaacgcccgcgaactgtacgcagaagaaaaacgcggcgactggactacgggctattataaatggcgtgcagatgaaatcaccggcaataccgccgcttattctgactttggtcagtttggcgtatctggtgtaaacagcgaatggcatacccgcgagcagtaccgcttccagaccatcatcgaatacggtgacctggagcaggacatggcggcgcaggccaaaatcaacctggcggcagccaagcagcgcgcagcagcaaccaccattgacatcgattccaacaaattctacctgctcggcgtaggagggaaagaaatctatggcgtgctgaacgaccctaatctgccagctgcggtttctccgatctccgttggcggccagactgcatgggcgtctaaagatgctatcgctcgctacaatgacgtcatcaagctgtttaccactctggttaaccagttaaacggcctggtagatgagaagtcgaagctgaaaatcgccatgtctccgggcactcgctctctgctggctgcgcctaccagcctcggcctgaccaccatgaagatgctggaagattacttccctaatgctgagttcgtatctctgccgcagttaggcgcagcatacgcaccggcatcatctgagacgctgatgatcatcgcgccggaagtgctgggtaacgaaaccggcctgctgggcttcggtgagaaaatccgcatgggtcgcgtagtgccttctctgtcctcttttgcacagaaagttaccggcacaacctatggcggcgtcatccgggttcccgcctctgtcgctcaaatgactggtatctaa

SEQ ID NO: 208954 - DNA, 489 bp, Klebsiella oxytoca
atgggacttcaatctcaagttggcttgtactattccggtgcggttgagggcgataaagcctctcataacccggttgtatatctgccgaaaaatccgctggctgaaggtgctgttaccgttggtcgtttcgtgttccgaggcaccgacccagaatctcaggttaaagcatctggcacggtcgttgtcggtttcgttcagcgtctgatcaactactacaactacactatcacctccagcggcacgctgaccattccgaccgaaacgccggtaacggtagcggtcaaaggtgagttttacgcggctattaatcagtcagcgactccgacattcggtcagaaagcatttgcttccaccactgacggcagcatcgcttacgccaacgccggggcgactgttgctggtcacgtagagacaggctttgtcgtgaaagagattcgcgctgaagacggtctggtgatgatttctaactattcccctgcgctcgcataa

SEQ ID NO: 208955 - DNA, 1467 bp, Klebsiella oxytoca
atgccagtacaaaaagttaaaggcggctggcgctggggtaatcacggtaaagtctaccccacaaaagaagaagccgaagagcaggaaagagcggcatacgccaacggatataccggcgatagcgctctcgcttttgatgaaggctccagacgcaggattgacgaaaacggataccttcacgtcactcagacccatcttaccaaagagcaggtagctccatactacgggcgcgagattccgggctgggaagcgttagagcttgaccccgatcgcgtttactacggctaccgctccggcgaagagcttgagaaagccaaagacacattcaacggaatgcccctgctgattatccataagcaggattccgcgcattcaccactcaaagaggagcgggttggctcgattggcactacgcctgtctggtcaccaccttacctcgacaacgcactatcagtaactgaccagtccgctatcaacgccataaacgatgagagcctcaaggaaatcagttgcgggtacttcttcgagcctgacttcacgcccggggaattcaacggtattccgtatgactttgttatgcgaaatctccgtggcaaccacgttgctttagtgaaagaggggcgtgctggccccgaagtttctgtccatgacggtatgccgtcacaactacaaaaggtgcaatcaatgcaacttaccaaaaaacaggcgcttgcaatgggcaatctggccgcatacctcaagccccgccttgcacaggatgccgcacctgcggacctggcaaaactggttacgtcttacaagaagccagggaatctcgttaaagctgttgtgcgccagtatggcaaccaactagcacaggatatggaaatcgagccagaagaactggctgagctgatggaagccgctgaggccgtgccggaaagcgtcgttgataacgaagccgatccgatgggccaggaagatgacaccatcttcgacgaagagaatccactggaaagcatcaaggccattctcggcggcaaagttccggatgacattctggaaaaagtagccgctgtattcgctcgtccgactggtgatgaagacccggaagagaagaaagaagagaaggcagaagaaaaagaagagaaaaaagaggccgcgatggacgccaacacaattatgcagaaggcgcgcgtagaggctcagtctcacttccgcagcctgaatgaagctgggcgcgctgtgcgtgaactggtcggtgagctggatgtcatggcatttgacagcgccgaggacatctacggtcacgcactgaaacagaaaggcgtgaacatcaaaaactatgacaaggccgcatacaaaggcatggtggacatcatggcggctaacaagccagccgcgaatccggctcccgcttttgatagcgcgtctgctacttctttcgacggtcagtttgctggcctcaaaaacatcaaaatccgataa

SEQ ID NO: 208956 - DNA, 249 bp, Klebsiella oxytoca
atgtttgccgccaagaccatcgaacaagcctcaactaatgacgaatcagcgctatatctggctgccatgctaaacatcagcatcgatttcgatgaggatgaaggcgtaattagtgtggtgcggtcatctcctgatggcatgctacagacggcatcggttgatcatgatttcgagaaagaggacatggcagcgaaaatgtcacttgtcagggcgctgattaccacggcagcgagctacatcatccagtaa

SEQ ID NO: 208957 - DNA, 219 bp, Klebsiella oxytoca
atgatggaatccgtcagtgggatgaatgctcgcattttggaaatgcatggttttgttaaggtctatctgattgatggagccgcttttttcggaatcgatgacctcctggcgtatcttggcgaaacaaaagttattacctccatttgcgggagtggttatgaaagaggaaccatttccagagtagccattcaagaagtagtcagcattcctgcgaggtaa

SEQ ID NO: 208958 - DNA, 741 bp, Klebsiella oxytoca
gtggagtacaggaagaagctgcttagccttatcgacgaaatgtcgcggtctgtagactggtggttaagcgccgagtatcgccgcaatgaaagcgaaattgttggcgatgcctctccagcgaaagaggttggatcgaagctgataagcatcatggctacctggcgagagacattcgataaaaaggcacaggatatcgccttgtggtttgtccgccgctctaatgcctgggcttccaactcagttaagaacaagctcaaggcgcaggacataaccgttaacttccgggttactccggaggtgcagaacgtcctagacagcctttacgagactcaagttaacctcattaagtccattcctgagcaatacctcacgcaagtgcagacgatggttcaggaaagcattgtacgcgggcgtgatgttggttatctgaaggatgagcttaaaaagcgatacggaatcactgagcgcagggcaaaggttatcgcccgcgaccagaacgcaaaagcgacaaactcaatcgctctagagcgctgcaggcaggccggaatcactcgcgggatatgggtccaccgtgctggcggtagtaaaacctttcgccacgctcacgtgaaaatgaacggcacagagtttgagctcgcaaaaggttgctgggatgaccacgaaaagcaattcgtgcaacccgggcaattaataaactgccggtgtgagtacaggccagtgattcctacgccaggtgagtaa

SEQ ID NO: 208959 - DNA, 1497 bp, Klebsiella oxytoca
gtgcgcaagccactaaccatgtctgcggccatccgggagaaaatcgagagcggcgaaatcatcccgacctttgagcaggtcaaggcgatgtttggaccagccaagactcttggggcctcacaagaagttcggctggcaatggaccatcaattggaagcgtctggtagttatacactacttcagcacgccttcgagatggggcagtatgcaaacctcggccctagcttcatgggatatgccgcactttcctctctgacgcagaacgggttaattcgcgcctgtgtcgagacggtcgcagacgacatgacccgcgaatgggtagagattacagccacggattcaaatggcgacggcgacgattcagacgagaagacaatccttgaagaggcgatgattgattatcgcctgcaggcgctctgccacaaggcggctgagtttgacggttacttcggtggctgccttatctttattgataccggggcatcagatagccagcttacaacaccgctcgacatcagcgataagtcagctgagctaaagaacttcaagcgcttcacgattatcgagccgattaatatcttcccgggcacctatgaatcactaaacccgctgagccctcgttactatgtgcctgacacatggtgggtactgggtaagcaggttcacaagagccggttgattcgcgtctgtggtaatgaagtcccggtcatccttaagccaacctacaactttctcggcatcccccgcgcacagattctttatgactacgtgctgcactttcaggatgcgcgaatggctgaggcaaggctgcttgagaagttctccctgaaggtcttcaaaaccaacatgcaggacattctgaccaaccccaacgctaccaacggtatcgacgcgcgaattaactacctcaccgcttacatgagcaatgatggtgtgtttgcgctcgacaaagagatggaagacttcatcaacgtctccgtcccgctcaatggagttaccgatatcgtcaggcagcaactggagttcatcgttgcgattaaccgcactcccgccgtgaagcttatgggcatttcaccccaggggttcaacaccggcgacgcggacatcaaaaactacaacgaccacatcaactcgcagcaggagaaggttctccgtgagccgctgcagaagatgctggacatcatccagattgtgaaacttggcacctatgatgaatcggtggcattcaagtttacctccctgaatgaagacgacgagaagtcgattgccgagacgcagttaatcaaggcgcagacccgccagatttacaaagaaagcggcgacgtggattcgtttgaggtgcgcaaagctctctccgatgacccgcacagcggcttttacggcatagatgcagaacaggttccggaaggcgacgatggcgaagaagaaacagaaaacggcatcttcaacccgaccgaacgcgggactggaagtggagtacaggaagaagctgcttag

SEQ ID NO: 208960 - DNA, 1497 bp, Klebsiella oxytoca
atgacgattgctgattccctgatccgcgcaaaaatgtgtgaggccgatcggctgtattttgccagatacttcttcaagcagcgaatgggcgcaaagatgattgtcgcgcctcatcaccaggtcattgaccgcacattgcagcgcgtcgttgatggtgagataaagcgactgattattaacgtcccgccgggttataccaaaacagagctggcgacgattaatttcattgctcatggactggcgcttaacaaccgctgccgcttcatgcacctgtcttactcacacaacctcgcacttctcaactcatcgacagcacgcggcatcgttaagtctggtgcattccaggctatgtggcctatgacgctacgcgatgatgcagacagcaaggcaatgtggtggacggaatacggtggtggcgtatatgcctcttccgcagccgggcaggttactggctttcgtgccggccatatggaagacggattccaaggtgcattgctgatagacgaccctgttaagcctgacgatgccttctctgaagttgtgcgagatggcatcaacaaccgatttaacgaaaccatcaaatcacgactggctgtggaaacaacgccgatcatcgtgattatgcagcgcatccattatcacgacctgagcggatacctgttgcgaggtggtagcggtgaaaaatggcaccacctgaatcttcctgtgattattgataactctgtcacctatccggaagagaacactcatgggatcccaattgaacacggacttcctgatgggtggttatggcctcgcaagcacaacgaatcacaccgcatagcattaacatcgcatcgcagaacctttgaggctcagtacatgcaagcgcctcgcaggtttaatgccgagggggcattgtgggatgagtcgatgattaacgccgcccacaacattaaaattcatcttccgaaaacacggacggtcatcgccatagacccgcaagcaacaaacagcgaagaaagcgatgagacgggtatcgtggccgcctcctgctatggcggaggacaggagcgcatgtattcccttgatggtgattacagcggcaaatacagtccaaatgggtgggcaaaaaaagcaatggatgcttatgaagcgcacgaggctgacgcaatcgtaatcgaaaccaaccagggcggagacatggcggaagaaacgcttcgcaatgccgggtttaaaggccgaatcattcgcgttcatgcgagcaagggtaagtttgcccgcgctgagccaatatcggctctgtattcacagggtaaggtcgtgcatacgggcaatctttatcaggttgaaaaccagttccttgagtatgtgccagccacttcgaagaaatcaccagacaggcttgatgccgctgtatgggggctgacagagcttagtcttggtagtggtggaataaacatgaaccccaacctggttcgccaggcatcctcccgcaatcactttccacgtcgataa

SEQ ID NO: 208961 - DNA, 432 bp, Klebsiella oxytoca
atggcaggtctgacaataaagcaagaggctttctgtcaggcatacatcgaaacgggtaatgcttctgaggcttatcgcacggcgtatgctgctgacaagatgaagccggaagcaatacacgtaaaagcatctgagctgctttcaaacggtaaggtatcggtaagggtaagtgaattgcagggtgaaattaaacagcgccataacgtcactgtagattccctgatagcggaactcgaagaggcaagacaaaaggcattgagcgctgaaacgccgcaatcatccgctgctgttgccgctacaatgggcaaagcgaagctaaccggactggataagcagattgttgaacttacaggtcagggcggcggcccggttcgcgtggtcacaatgtcacctgacgatattaagcgggtgatggaaaatgacgattgctga

SEQ ID NO: 208962 - DNA, 195 bp, Klebsiella oxytoca
atggcgaatataaccgaagatacatttgagcctggtgaaattcaaacgctcatttctgcactaatgtgcttcaaggaccgaatgaccaaaaagaacgcatcaggagaagatgacatcggtgaatgtctccgccacggctaccttcatcagtgcgatagattgcttcttgcgattgtaaaattgcaaaacaaataa

SEQ ID NO: 208963 - DNA, 186 bp, Klebsiella oxytoca
atgccatacaggctctcgttaaccatccactgcaaggctaagtggtggctatctgcatacctctggctctggataaagaaagagcagattaaagcctgcatcactcagcaagagattaccgctgaagagataaacgcaatggctgactggatggcaaagaaaggctttgttctgaaggttggctga

SEQ ID NO: 208964 - DNA, 348 bp, Klebsiella oxytoca
atgtctgataaaaatgaatttgcacgatgtgttccagccatgtttcaggaatccgcgttttattggctgctggaaaagctttctggcgacctcgaagaatacaagtgcatttgtgtagaaagtcctaactgtgatgaagagggggattattttccaccttttctgctgcattcagtaacacagagagcaaacgccgtcagacaaaccttgctatgcctttattcagaaaatgccgaccagagcgttcttaacgtaaatgtcgaaggcgacccagagaccctacaacagcgcgttaacaaagttcttaatgcctcaggggggagcaaatgccatacaggctctcgttaa

SEQ ID NO: 208965 - DNA, 252 bp, Klebsiella oxytoca
atgaactttggtgaagcacttgaagcagcaaaaggcggggcaaagatttaccgcgaaggatggaatggcaaaggtctttgggtggagttggtgccgagcactaaggagtctgttattttgccattcctgcagcttatctacccagtccctggcaatggaagtctgccgtatccaaatggagctcgtgtgccatggtcgccatcgcaaactgacgtcttagcagaagactggctcgcaaaggaagtccagtag

SEQ ID NO: 208966 - DNA, 669 bp, Klebsiella oxytoca
atgaaacaatgccttctggccgccgtactggcggccttttctttttgtgtcgtagccaaatctgattgccctggtaaattcctgaatgataatcctcctgctatccagtactaccaggagatttgcttcactcagttctctgtcctttacagtgacaaacttaaagaccctgttatcagcgcccaacacctcacagcagatgacgttaaaggctcgctccagcttaagcgcaaggatgcgttccactctgagccaaaagtgccgaagcaattcgagtccactcagaaggactacgcaaagtcaggctacgatatgggccatatgaccgcagcaggtgacgctggaaacgctcaggagcagttcgaaacattcagcctggcaaatatgacccctcaactaccagacctcaacagaaaggcctggagactgatggaagagtcagtgagaaaacaggttctcgctgaaggtgacgcctgggtaatcactggcatggttcccggtacaaagacaatcggcaacggcgtaaacgtaccgagcgttatctggaaggctgtaaaagccaaatcaggcgagtccgtttatgtcggcgacaacacgaccggcacagtaacaaagctcaccaccgcacaattcacaacgagatacgggatctacccgtttagcgagtaa

SEQ ID NO: 208967 - DNA, 189 bp, Klebsiella oxytoca
atgaccaaggatgagaaacagcaattagaaaccatctgtagatacttgaaggatggctatcgtgatttagattgtgggcgcattgaaagaggcattcacaatgtcaataacgcagaggttttgcttgatacctttctggcaatgaaagaggcacggcttaaaaagaaaagccaacagcaactttcatga

SEQ ID NO: 208968 - DNA, 537 bp, Klebsiella oxytoca
atgaatgaattaaaagctcttcatgattatgacttccgcaagttggtcatggccgctgatggcgagccggttactgacacattccagatcgccaaagcgtttggcaagcgccatcagcatgtaatcagggcaattaaaaacctgaaatgctcgcaggaatttacgatagcccatttttgggcctccgagaaaatcaacgacttaggtatttttgataaatcgcaaacctattatcgaatggattttagcgggtttgtcatgctggttatgggattcacgggcgagaaggcagatctcgttaaagaagcgtatatcaatgcatttaactggatgacagctgagcttcgtaagcatagtgaaagctacgaagcggaacgaaacgctttgatgcttgagtatatgaaagagaaggacgttgccagtatgtctggacgcctactcaatcgctggggaaaagtcaaaaaacctcagttgctggctcgaattgagcgaattaaccaacacgggcaaatcaccatccctgggctgccaaaatga

SEQ ID NO: 208969 - DNA, 231 bp, Klebsiella oxytoca
atgaaaccgtatcggcaatcctttctatattgcaatggcgaactggtgcacgtattcaagaaaaactacaccccaaatattgaagatgtgcaaaacgtactgattgacagtatgggcctatatggtccagcagtacgacagtcctgcgatgcaataggcgacgatctaaaaatatccaatggtctgaacggtatttatgctcacattgaagtgatgagcaggccaatttaa

SEQ ID NO: 208970 - DNA, 543 bp, Klebsiella oxytoca
atgaacaccccatcgctgtttcagcctggctggaaatggtgcggaattgcattgctgtgtggtgcgttgcttggcgcgcttgccggttggtgggtgactgacaacaaattcaccgccgacatcgcgaagataaaacagcagcacgccgaagacctcaaagctatcagcgacgaagcaagcgcacagcgtgataaaaacgctgctcttgagcacagtctggcaaatgcaatcgccaaaagtgaccagcaacacacgcaggaattaaccgatgcgctcgcaaaaaaccaagctcttcgtgatgctgttacctctggttctcgccagttgctcctcgcaaaagcaaaccttgcaacctgtaacctgtccaaaaatacaacttccagctccagcagcctggacaatgcaggaaccatcgccttctctgacgattttggacggaacatttacgacatccgcgccggaatcatcagcgaccagcaaaaactgaaggcgctgcaggattacatccgagctgctcaggatgctggcgtgatagcgaaataa

SEQ ID NO: 208971 - DNA, 216 bp, Klebsiella oxytoca
atgaaacttatcgataatctcccgcagctctggaaaatgtggtcagtccgcatcatggctgtactggcgctggtcgcttccgtctggtcacaaatccctgacgacgtcaaagctcttatccctccgcagtatctcggctacgcagtcggctttgtatcggtatgcggcatcattgcccgcgccattaagcaattcaacaccgatgagcaaaaatga

SEQ ID NO: 208972 - DNA, 633 bp, Klebsiella oxytoca
atgaaccagatgcagtttaagcaggccgcaaacattacagatgcactggccgcaaaatggtttcctcacattcagaaagcgatggttgagttcggtatcgacactccgattcgacaggcggcctttatcgcacagatgggtactgagtccagcgggtttaaatccgttgttgagtcgctcaattactcagtcgaaggcctgaagcttttcagctcgcgactgacggcagagcagcggcaaaagttagggcgaaagcctggtgagccagcactgtctccagcaagacaggcggatatcgctaacatcgtttatggcggacgctacggaaacgttaaccctggtgatggatggaagttcagaggccgcgggttaaagcaggtgacattccacgataactatctggactgtggcaaggctcttggccttaacctcattgctaaccctgatttgctccttctggatgaaaacgcagcccgcagcgctggatggttctggaaggtcaaaggctgcaaccagtttgcagacaaagaagacattgtcggactgacaaagcgtatcaacggcgggacaaacggcctggacgaccggaaagctcgttacatcatcgcaaaaagcgttctggtgaaaaaatga

SEQ ID NO: 208973 - DNA, 300 bp, Klebsiella oxytoca
atgttatacggaatagaaattattccggctctattgctcgcattactgatgatagtcactggctcattagccaaattcgtttactcgaaagagagcaaggtaacgctccgtgaccatgtggttgtgagtctgtttgccgggatggtgatgttttttttcgggctggcaaatggttggtcacagccgtttattatcttaggctcaggaattggcggctggagcggtgcttctatcatacgtcgaatccagctacccggtgtcggctctgatgaaagtggtgacaacgatgaaaccaattaa

SEQ ID NO: 208974 - DNA, 549 bp, Klebsiella oxytoca
atgagcactattaccagagaactggcaaagctgttcagaaaaattacgaattctgaaattgatgcggagggtaacgctcatgttgttttatctcctgctgatagcctcctgattaataatgcgcgtatcgcgctggcatcgctcgaagcggagcctgtggcgtggctactgtcaggaggcggcgcaaaaaacaacgtcagcttcgatagtggcaatgcttatgctgacccgctgcgagaagtaacgccgctctacaccgccccgccagcgccgatatctgtgcccgctgcgatggaaatggatgatgactttgacagctcgtttgaacacggaaaagttgtcggctggaacgcctatcgcgccgccatgctccaggctggtaactctccggtaattccggatggttacgtgatagtgccgaagctggtaacgccggaaattggtaatgcgataaacgaagttgggcaccgctgcacatgcggcaattgctctcagaggttgtgggacttattgctcgcatctgcccagcaggaggtgaaaggtgattag

SEQ ID NO: 208975 - DNA, 207 bp, Klebsiella oxytoca
atgctgaagcctaatcacgtctatatcgaggtatctcataaccagagcggcggcctgtctctgtgcgtcagcaatgacgactatggctatcgtatttcgggtgacaaagttggcgggtgcaaaacactggtgcgatttgaggtcgacgccggcgagcttatcgaacaaatccgcgagcatgcgaacacagatggggccgacaaatga

SEQ ID NO: 208976 - DNA, 426 bp, Klebsiella oxytoca
atgaaaatcgaaacagtaaacgagctcattaagtcgctggagagtgcgggcgagctgtcgatcaaagagcgtaagtacctggacgttatgcgctgggcgattcgtgttgctggcgagcgtgatgcgacgctgaatgcagagcgcgtatgggaaagggccatgatggaagtttgcggcgaggatggcccggcgtcggtagccagcgaaattcgagcgctgcaggttctccgggatacggcaatgcaggcgctcaagtctcaggttgagcagctggctgcggagaatgtggcgctaaagcaggctgaatccaatctggtacggaatatcattaacgaccttggcgatacagaattccagtacgcaagagtgcagacacccgccaccgacctgtttattacatccctttctatggagagcaacaaatga

SEQ ID NO: 208977 - DNA, 447 bp, Klebsiella oxytoca
ttgtttaatcaacaggttggtattagattaaaaaaaccggaatttaatcaggttgttgatggcgatgcgctacaattagcggggcgcggaagctggttcgttgcggcctctgaagaactgacggaactccaggcgcgggtagataaccgcgagctgatgattaccgctgcgcttgtgggcagcggcgactggggaagccaacggggcgcgctggccgctgaacaggcggcagtggccgaagagacgcagctacaggcgctgctggtgcgtgagaaagtagaggccgcccgccgggcgatgctgctctatccccagcagatgagctggaactggtgggatgacgttaccgttgaactgcgtttctggctgcccgcaggcagcttcgccaccagcgtagtaagggagcttatcaatacaacgggtgactatgcgaatattgctgagtaa

SEQ ID NO: 208978 - DNA, 759 bp, Klebsiella oxytoca
atgaagaaaattgccattatcggcgccggtccaaccgggatttataccctgttttcactccttaaatgcggtgagccgctggacgtatccatttacgaacaggctgaggaagcgggcgtgggcatgccctatagcgatgaagaaaactcgcgcatgatgctggccaatatcgccagtattgaaatcccgcctctccagaacacctatctcgactggctgaaggcccagagccggacgcaccttgcgcgctatggcgtcgattatgaggggttgcacgatcgtcaatttttgccgcgcatcctgctgggcgaatactttcgcgaccagttccttggcctggtcgccgaggccagagaacagggctttcacatccgggtcaatgagtcctgccgggtcagcgacctgcaggcgaccgcagaaggggtgaggatgtgggtcgaagatgagccggtcgacgaagcctttgatctcgcggttatcgccaccggccacgtctggcccgacgaagaagagtcgacgcgcacgtggtttcccagcccgtggtccggcctcatggaggccagcattcccccctgccgggtggggattatgggcacctcgctcagcgggattgatgccgcgatggccgtcgccgtccagcacggccgctttattgggtccaacgatgacgccctctctttcaggctggacgaggcaagcgaagcgctaaaaatcgtgttgatgtcgcgctctggcattcttcccgaagcggatttttaa

SEQ ID NO: 208979 - DNA, 873 bp, Klebsiella oxytoca
gtgctaaataaaacaaaggcagctttgcagagctgccaatgtcactacgaaatattcaagcagagccaggatatcacattgatcgtggcggtcaattacagagcgaaattttgcgctcagtgggctatcgctagtggtcaaagcctgagcggagtgcatatttgcattctggtaggtaactcattgatttcatggcaaagcgtaaaattgcgctctgcacctaatccattgattattcctgacctcctcactttgagggctgatgccggtgaaatatcatcggctaaatatttagccgatgttgtacctcaaagcgtgagcacaatgcatttttgcattctgggattttcgccaatggtacatccctcactttacaggtatgtaagccgatgcgaagaaaatcgcatctcattactgatgaaattttccaaagcactagaaagtgcttcggaacaaaatcaacaagttaactttacccaactcaatattgaggacgctgattctattcaggattttgggtcttcttttgctttcttgcgctggcgacgtttgatctcgccttctaaagctgcgacgacaaactgcccggtgctttctccgggttctttcaattgttccatcgcacctgcgatctcatgcggaacccttgcggctatagtctgcgattttcggttgactgctttggttgccatgctgcttcactccctaaaaggtgttctacagtatgtacgaaataaaaaaagtgttcaacacttgacgtgttcaacaccattgcataaattggtgttgaacaccttgtgttgtctaaacacaaaaatagtgaagcccggcagtgcgcgaacactaaccgggcctctaaccacaaaccgttag

SEQ ID NO: 208980 - DNA, 174 bp, Klebsiella oxytoca
atgaacacgcttgatgccgttgtgacgcgagttctggacgttcgtccatatcgtcatttctgggtcgtcgaggtggaggcgctgtgctacggcgattacagcaacacgatcatcatccgcgatagcgaaaaagaagcccgccaggttaagcccggcgacacggtgacgatctga

SEQ ID NO: 208981 - DNA, 1098 bp, Klebsiella oxytoca
atggaagtagactcttcatgcatagatataattaaaaccccagataatattgctaatagacttatatcaaatttttacaaagatgcttatcttataaaagaacaaaaactaagttacggttttttgcaaaatgataatccaaacgcttttgcatgctcctttaaaaatattgaactggatttcgttggtataaacacaggtctttacactacacttcatcttattttcaccacacttttatctcgcagtgatttcctacctcatgtaggacgcccacataaagaaaattcctcacgagctagtgatatagaaataccaaaaaacgtaacatatgtaaacaaagggatattaattccgagatgtgaaataagatcagcttatgcaactgttctaaccggcttagcattcgaatttgttttattacatgaatgctctcatcttctgaatgggcattttgattttgttaagaacatgagcgttaattatctcacagaagaaagatattcatcgaatgataaaaaaataatacttcaaactattgagatggacgctgattcctgtgcgatatctttcatggttaacaaattattagttctaatcgaactctacagatctccaaactttaaggaaaatgatactcttcacccagctctaaaagaagcctgcaagcttgcctacacagatgagttatcatctatgatttcattaaatctagcaattgacaccataaataaattaatggatgagagttccggtgcagaatggactcttgaaaatcaatttttttggtcccatcctatgcctgccgtacgtcgttattttaaccacgaacaaacatggacagcgctcagtggccgggctcttccagatgaattaaaaaaaacaataaaactggagtccttcaaaaatatgatgtacctaaacctcgcatgggataacgtgaagggagaaattccgacagagcattcaatagatatatacaacaagatattcaacaatcccgacgttcataaatactacgctatgctaagagaaacgtggcaagaaatccgaccagcgcttttgccattaaaaagaggcagacaccttgctgaataa

SEQ ID NO: 208982 - DNA, 396 bp, Klebsiella oxytoca
atgaaagcgaccgccattctcgccatcgtgatgtttgccctgctgatcgccgctgtcagcgcccttgcatggcaaagccataagcgcgaacaggccgaaaaatcactgacaggcacccgggaagaactgaaacagaccggcgacgtgctggccgaggtcagggcgctacgccgcgacgtcaaccaggtggacgccggactgaaagcactaaaccagcagcgcaccgcaacaggagagcaccgacgtgaaaacatcaaaaccgcactggccggtgacccctgcgctgttggtcctgtgcgcactgctgtcgctgacagcctgtaccagcgagccgaagaggtcgccgccgcagattattcaggagcccttacccgaaagcctgacggcaaaaactga

SEQ ID NO: 208983 - DNA, 249 bp, Klebsiella oxytoca
atgtttaagtgtcctgtttgtggtgccgttgcaaaaacgcgcactagtcgctcgttaagcaataccaccgttcggcattatcaccagtgccagaattttgaatgtagtatcactttcaccacgctaaacagcgttgaaaaactggtaacgaagcgcacaccgcgtgaaaagttaccgccgggcttcatcccttcagatgcgtttcctgcatcgcactacggcaacgatcagcttaccctcgcagtttaa

SEQ ID NO: 208984 - DNA, 897 bp, Klebsiella oxytoca
atgaagaaaagttttgttttcattgtgacatttttagccgcttccgtgtctttggctgctcatgctcaaaaggagccaaaggactttaaaggggttcttcagtgtcgagcgattgaagatagctctcagcgtctttcttgttacgataattcaattccaccgacgcgaacgaagagtgctaaaaaatttgaaagtagagaccaatgccctgatgaaaaaacggacgagggccgcctgacctgctacgacagatttttctcaccaacgtttaaaccaacaaatttgaccaaaaccatatcttcaggccaagaggtcgctaaaaacgaggcgatcagtaaagaaaagctccttgaatgccgttcagaaataaatggcaccaaacgattagcgtgttatgacaagctttttccgcaggatgcggcagaagaggatgagcctgccgtagcagaagcgactccgaaccccggaaaatggctgacccatataacaacatctccggttgatgattcaaaaaacgtggttttaatgttacctagcaatgattccatcagaaccccatttggcgagacagtcacaccaacgatttttgtggcctgtcgtgaaaagaaaactgaagtttttattaattgggatgtgtacttaggactagaggaaacaagtatgctttaccggcttgataagcagaaagccgttgaaagaagctggtcgatttctaccgacaccaaagcggtcttttatagtggcagagatatagattttgttaaggctttagctaaatctgaaaagatgtttgcaaggataaccccctacaacgaaagccctgtatcggtcacatttgagttaactgggttgaacaatgcattaaagcccctgcagcaggcgtgtggctggaaatag

SEQ ID NO: 208985 - DNA, 219 bp, Klebsiella oxytoca
atggcaaagagacaatacggaataatgccacctttccccaaactagtggcgatgcttagaggttcggaaggccgacacttcgtctatggtatccagtggttatccagagagataattatcttccgtaacgggaagtatgaaatcgtatcgatagacatagtgaagtttgtggagccaactgagagggagcttgagttgcttagcatgtcagataaatag

SEQ ID NO: 208986 - DNA, 762 bp, Klebsiella oxytoca
atgactagccaaatcatcatttctaacatatctattcatcaagattccgatgggcgatacagccttaatgacctgcacaaagcggctggaagcgaacaaagacatcagcctcgttactggttggcgcttcaacaaacaaatgaattaattactgtaatcataaatagcggaatctcgctatttgcaccattggtaattaaacgaggctgcaagggcggcacctatgtctgcaaggaacttgtgtatgcatacgcgacttgggtcaatcctgagttctttttaaaggtcatccgcgcctacgatgcccttgtgacaggcgacaccaaaaaggcagaagcgatagccaaaaccactgttgatgacagaacgccattgcgcgatgccgtaaacctcttggtcagcaagcgacacatcatgtacccggaagcgtatgcaatgattcatcagcgcttcaacgttgagagcattgaagacttaagtgccgagctgatacctcaggccattgagtatgctcaccgcatggctatcgaaggagaactcatgcctgaaggcagtggcatacaagaggtctgtgatttgagccgtaggtatatagcaagggttacaatcaaagataacgtgttcggcggcgaaatagagttttacggtaaatctaacactataaacgcccttgtcactggcatatgcaaaacacttggtcttagcccttcagggtttaccaccattgcgatggattcagaggttattaaaagaattcactga

SEQ ID NO: 208987 - DNA, 963 bp, Klebsiella oxytoca
atgacagagaaaaagaaccccaatggaaaggctaaaggcggcatcgctcgcgccaactctttgacaaaggaacagcgttcagaaatagccagaaagggggcggctgctagatggaagggcaagccacttaaagccactcacaagggtaatttcatggatgagtttggcatagacactgagtgttacgttttagataacgatacaaagactgccgttgtaactaaaactggtctcgccaaattaataggacttggtgaaagggttaaggatatagacagggtccttagcgcccaatacatgcgcgattacgttgacgcacttttagtcgaaaaaatggaaaatccctatatttttcaatgggagaacgatggcgcagtcttgggttcttttactggtgctcatggatatgacatttctgttgttattgatatctgtaaggcgctaacggcagcaaaagacaatggtgatcttccagagtcaaggcttaaggctgcaatgcaggcccaggaccttgtaaactctgctgcaaaagttggcattaccaatgtggcgtatgcggttgctggatttaagccagaagtacagcaggttattgatctcttcaaggcgtttgttagggaagaggctcgtcagtatgagaaggagtttccaaaagaactctacgaggcgtggtacaggatataccaactaaacaagcctgggcgcggtaggcctttcttgtttaagaaattgacgattgaacaaatctataagccattagctaagagcgagggcaagattttagatcttgctaaaagcagcaaagatgagtttggtcgcccaggtgacaagatacaccaattcttatcagaggttggagtaaaagcacttaaacaacagataggtaaagttttggccgtatcagagctttttgaagaaaaagaaacctatgaatccgcattagccaaagtaaataaagtttaa

SEQ ID NO: 208988 - DNA, 360 bp, Klebsiella oxytoca
gtgatcacctcttctctgtatctgaatccagacacctgggacatcacccttgatgatactggcaatctttcagtagtagaaaacccctacgcatgtgctcaggacgttgctacagcgtgctcagcgtttcgcggggaatgcatatacgacatcaacatcggcgtcccttactacccgacaattctcggcaaaaacccaggcaccggcgttgtgcaaagcgcgctggaaactgaggcgttaaggctaccgtatatcgccacggcagacgcaacagtcgttgtgaagcgctcagaccgagaatgctctggcgtgattgtcgttacagacacaaatggtatttccagcaccgttaacctttga

SEQ ID NO: 208989 - DNA, 1233 bp, Klebsiella oxytoca
atgtccacaacaataactacctcggtgccatccgttaccttttccacgaccggcttagatgttcctgatgaggcagatatcctcgcggggcgtctgacggacctttccactgcgcttggcacatcgatgagcaaagagctcacaaccccgcaaggtcagattgccgttgccgataccgctattattgccgataagaatgatcaatgcctcgccatcatgaatatggttaacccggattactcaaccggcagatggcaggatgcgataggccggatttactttatcgaccgcaaaggcgcagcaggaacgattgtgacagccacatgcaccggtcttgtgggtacggtcattccagctggctcaatcgctcaggatgtgaatggttatctctatttctcattatctgatgccaccattggagcagatggaacggcgtctattgagtttcagaatcagaccactggaccaattgcctgtccaatcggtgagctaaacacgatttacaaggcggtttcaggctggtcaacaattactaacattgctgcaggagttctcgggtcagacgaggaggggcgtgcagcatttgagtatcgtcgcaggcagtcagttgctaaaaatgccagcaacaccctagcagcaatttacgcggccattcttgaggttgacggcgtcactgatgcctatgtaaccgataacaagaccagcaccgcagtagagaaaggcgtaacaaattacagcatagcgccacactcattttatgcggctgtatatggtggttcggacgcggacattgccaaggcgatctggagcgccgcccctcctggagtcgatatgaatggtgatacttcttacaccgttcaggacacggaaaactacgtttacccctatccgtcatatgacatcaggtgggagacgccaacgccaaagagcatgtatgtcgaggtgcagattgtgcaaagcaacctgctaccaagcgacgtaacaacacaaattaaagcatccgtacaaaaggcgtttaatggagaggatggcggaacgcgtgcgaggattggctcaaaggtttttgccggtcgctactattcaggcattcaggcaatagacccgaacaacatggaaatcctcggcattacgctttctctcgatggcttgtcctatggcccgtcagttgagtttggtattgatgaaatcccgactctggatgacgctaacattctggtaatcatttcgagctaa

SEQ ID NO: 208990 - DNA, 444 bp, Klebsiella oxytoca
atgattcccggttgtcagtatgtctatgctggcgatcacacctggtggtctgtgaattttaacatcgtacccactgacaaatgcaggtataccagcgtacatgctacggccacacaatactccatcaactatttcgaatctccggctaaaggttctttcaactcagggcagcgggcaatccttctggctaaaagccttggggcgaaaagaataatccttcttggctatgactgctccctgcagaacggtattcactggcatggaaagcataacaatggcctgagaaatccggacagagacagtctcaagcgctggaaaaacgaattccggcaggtcatccctatcgttggcgctcacaacatcatcaactgctcacggcataccgagctggatatgttcccggttggtaatttagaagaagaaatatgcaaaagttttttatag

SEQ ID NO: 208991 - DNA, 348 bp, Klebsiella oxytoca
atgccagacattgagccattcgcccacatcaagctgcatgccggacaattgaaactaactgagctgatggctctagttgagcgctcggatatcgtggtgaccggtagtggccttatctctcagatggcatttggatatcgcaagcacacggtatttcttggcggaggctgcggtggttgcaatcaccatttcaaaatcacagatggccgactgatggacctgtctaaatgtcttttcctttatccagacaattactgtatgtgccagcagatgaaacacaactgcgataagcatatttctgacctccctgataagttgtcccggtggatgcatgagaaaaatatctga

SEQ ID NO: 208992 - DNA, 612 bp, Klebsiella oxytoca
atgagaaaaatatctgaacttattaaatctgagcttagttttttccctgagcttggatttggatacttcccggtgccgcaagaccgaccttacgatgataagtattttgataaatataagcagatggctggcactgaaatggggaaggcattgaccgatttcagagttaacttcgttcggaaacatcatcgcggggatgtttgtgatgttgggattgggtgcggtcagtttgttgaggcatgcgactgccatggatttgatgtaaatctcgcaggtataaactggctaaaggataataatcgttatcttaacttttaccaggaagaatgcgacgcgctgaccttttgggatgttcttgagcatatcgacgacccatttaaggcaatttctaaggccaaacagtgggtgtttgtatcaattccagtatttgaaaatgcagagcatattctaagaagcaggcatttcaggaaagacgaacatattttttattttacccacgatgggcttattcgctggtttaaagaaagcggcttcgtgctggttgagtcagtgaaaacagaatcagaattaggccgcgatggcattaccacttatgcattcagacgggagtaa

SEQ ID NO: 208993 - DNA, 588 bp, Klebsiella oxytoca
atggaaagttatgctgctgcaataatgaggcagtacgtcaattcagaaaagctactttcgatcatcgaaacattcaaccagacagtcgggccagacaagttcattgcagatttttatgacctcgtctggaatatagaaacagcgaccacttacggcttgaatgtgtggggaaagattgttgttgtcgacaggtatctgacagttactgataacgaaatatatttaggatttaaagaggcactaagttctccacctgtcatagatgacccacaaccatttaaccagggaccattttatacaggcgcgcaggaaacaaacacagtcattcttacagacgatgcctatcgtaaattaatcatgtgtaaagcaatggccaacattacaaattgctcaatccctgcaatgaacagaatgcttatgtttatgtttggtgaaagtgggcattgttatgtcaggaatgacggcgcaatgacaatgagctatgtattcgaatttgccttatctccttcagaactggctattgtacaaagctccggcgctcttccttcccctcctggtgtaactgtaaatattgtccagatagtataa

SEQ ID NO: 208994 - DNA, 1041 bp, Klebsiella oxytoca
atgcaatcaagctcatccccaaagaaaatatccattccttttgcaaattcaggcgctaaacaaactattcccgatacttcacaaataggtgttgaggatgggagggcatcttatccggatggatttccaccattaacaaggacacctttatctgctggaggaattcctccttttggcactgacatgaacggggttcttttcgatctcagtgcagcagcaagatggaatgcagctggagctccatttaaatatgactctgcattttctgcgtctatcggtgggtatcccaaaggggcaattctaagtaattcagcaggcgatggtttctggcagagcatagccgagaacaacacaacaaaccctgacagtggtggtgcgggctggattaatgctcttggcggccgccttatcaacatccagacattttattcatccggaacatacacgccaaccagcggcacaaaatcagtaattgttgaaatggttggcggtggtggtggcagcgatgccgccccagcaacgggctcagggcaagtatctatcgttactggcggcggcgcaggcgcatatgcaaaagggcgcttccttactggattctcaggagcaagcgtggttgttggtgccgggggcgctgggggaacaagtggctctccagttggagcggtaggtggaaccagttcattcggcactcttatttacgctcctggaggcaccaggggaccatctgctgggccagcaaacccgccattccttccccagggaaacgtctcatcagatgcacctagcggtgcaaacatcgttgggtctcatggcgctccatcaacaccagcttatgcgaacgctacccaatcgttcctgggctcacctggcgcaagtagcgtatttggtggcggtggctgggtgccgtcatttggaaaccctgcgattgctggacaagcatatggctctggtgcttctggctcttctcagggtccgtcttcgcccgccgtgaatggggctcagggtaagcaaggaatcgtgattatttatgaatactcatga

SEQ ID NO: 208995 - DNA, 2607 bp, Klebsiella oxytoca
atgcagaacaatcccgccattatggaataccggactgggactgctaacaattttatacttgcggtttccggtccagtagccgctaaactggcgaaaaaaatcgatgttcttgaattaaatagtgtggcggtgttatctggtgtcgctaacaccgctgatgcctacacggcatcagtaccagagatgtcaggtcttgtttcctctgaccgcattttccttttcaccccaagtgcgacgaacacgacaaggacaccgaccttatccgtgaacggccgtactgcgcgtcagatcaaacaggcaaagggtaataacgtcgcagcgggagaccttgtggcgggctatccgtatctggttatgtataatgcggccgctgctgattttcggttgctgacatacccggccgaccgcactcgtttgcttggcgcgtattcaaaagctgtcgtaacgagtgacacgagcagtcctaatgatatttccctgactatccccggcctgctgggtgacggtacccaactgacatttgaacccgtggtggccaataccggagcggtgaagctgctaatcaccgacatgtatggcaataccgcaacgcataatctgctgaagggggcgaacacagcgcttacgggcggagagttagaagcaaataagcctgcgactatccagtggcgtggctacgtctcaaatttcaaattaatcaccgcaggtgatccgcgtacagacatcattacgctcaaaacggatgtcgccgcagtggaaaattcacttaccgcatacaagaccactaatgattccctgaccagcaccctgaaagatcaggtgcctatcccggtgacagttgccagtgttgccgacgacatttacacggcaacggcaaccattaccagtagtgagcgacagagtgggcgactgttcctgtttacgccgccgtccgcaaatacaacacgcgcccccaagctgaaactcaatgcgttgggtgcctacagcattacccgaattgacggtgggcagcttgctgtcggagatctggtagcaaaccgggcgcatctgatgcactggcatgcagtttctggtcagtttcgggtaatgacgtatgccgatgagcgaacaaaaatttacggaacggttcttcgcgcaaccatgaccagcgacgccagtacgccgaacgatttgtctgtcacggttaatggtatcatctacgatggcacgttgatgatattggaaccaccagcaacgaacactggcgcggtaaccatcaccaccgttaaccgttacggcgacgcgattgtgaacagtatatttaagggcgcaaactcgctgctgacaggtggggagataaagtccgcagaaccagttttgctgatgtaccggagcggatctccgagcaacttcaaaatcatttcgtccggcgatttgtccactcccgtggcagaactacagtcggaggtagaggccctaaaagcctccattaccgacccgtactctgcgctggctgcaaaactggtgggatcgactgcaggaaacaatattttcggggatattacctggaataatggggttaaaacggttgttaaaaaacagataatttgtacgtcagttggttcatctgtgggtactggtgctgggtctggtaatggcgcagtatacgcaccgaatgccctttttgttgcggcgttaaaggccgagttggatatgtacggcggcttcgacattattgacgataaccagtgcattccaggccaggcgattcagcagttctccgcgcaactggataactccccgtataccacgtcagattttgtcctgattgtcggcgggatgaacgacggtccggtaggcaacttcaatacagggctaacatttcctgggcagaagacacgattggaatcgttgattgataaatgcctcgctcgcggggcaatcccaatcgtgtgcacaacacctcaccacgatgtcacgtcggaatcgacatacgcaaccgtgccgtctggagttcaaatctcgtacccgttcaaaacgtatcaggtgtcgtacaattataggtttgatgccgatgcccggacaatagcttccggcgcgtttgccaacccaggatacggtgggaatatcctgaaggctggctcgacaataaacgtcggcggcggagtaaatgccggaaactacacgattgagtcaatttctgatgaccgggtaacaatcaccgttgttgaagcaatcccgaaaacagcgacctataccactactatcaagcactcaaacctgaatgcaatagctgaggagattttggttccacctccgtcactgtcacgtgtgactcaggactggacggggggcgggatactgacgactggcgacgtgcgtttcagtatcgtcaataagatgtttcgctcggtagcccgccagaagggggcattcctggccgaagccgaatattcatggttcaaatacggcgttgaggttggcggatatgcttccgtgtatgaccaaggtaactacaaccatccgaatgcacacggatacactgtctcctacgggtatgcgctccaggatgcagcgcggaaaatcgcgaatcttatttttggtgaaaaatactacgcgaaagcgtaa

SEQ ID NO: 208996 - DNA, 288 bp, Klebsiella oxytoca
atgtcttttaaaatttcagcagtaaaaactgtccagatttattatctcggaggatatctctgtgaaaaagaaatcaacattgacctggtctatgctgtcgaaagcgttaggcaagatgatgcaggtcaagttaaagcctcagtatctgttcgatataatgatgcggcgaaagttaacgcaggagagtatcctgtcactctggatacgtcatcttcaaaatcatgggctgagcaggcagaatatcagcttatgcaagctgatgaatttgctggagctgttgctgtgtaa

SEQ ID NO: 208997 - DNA, 627 bp, Klebsiella oxytoca
atggataactggttagcgctttttgacggacagacccgttactttctggatatcaatgacagttcggtgaagccggatgttctgcgcttttacggcagggaagcactgagcgaacccttccggtgggacatcgagttcacaacgcttcaggcgaacatccccccggaacaggtgctgatgaaatatgccaccttccggatgcggagcggcaaaagtgttcacggcatggtgacccgcctggaatggctgtccacatcaaaagaccagtctcactaccggctcacgctcagttcccgcctgacgctcctgggatacacccggcagtgcgccgtgtttcagaaccagtccgttccggaagtggtggagcaggtgctgcgcaagcacgggctggagggagctgattttgacttccgcctggagcgcacctacccgccgcgtgaaattatcacccagtggcgggaaacggacctggagtttatgcggcgcattctgtccgaggtggggatttactggcgtacggagatggacgacacccgtgagctggatacgtacatttttgccgacagccagcttaactaccggtttgatgtgcgcgctgccgtacagcgagccctcgggcctgtttga

SEQ ID NO: 208998 - DNA, 702 bp, Klebsiella oxytoca
atgtgtgcgaaggatcgtagtcaaaactcagtatgcagtcaaacggaattggtgaattctttattccatctggctgatgtttcgtcttgtccatgtctcattcgggattcatcgggtatcatcgtccatagcaatctattgttaacttcaaaaattttagaagatattaatataagtaaggttttttctctattctcacactctgatttaagatctcttaacgaggaagatgtccgtgtaattacatatggaggggggaaaatcgttgatggtgttacgatcggtaaatataattgtagcattttaattgaaggtttttttgtatgtgacagggtttatacgaagtggacttttgttaacattaaaactctggattttgatttttccgataagttggtttcctttaaaaattcttttctcgatcttatatcttctttggctaaggagaacgttaataaatggtatgtgctacatttacactccttcggctttactcatggtcagatctcaaatcttattggtattagtgagaaaacatcgagaaattattccttggaaatacgaagggtattaaaggttagtaaccaggatgaattaattttacttcaaatctcatcatcactttaccatatactcatttctaatatatcaaagcctcttgcccgaaaagggttttctataatcaaaggacatttccggtaa

SEQ ID NO: 208999 - DNA, 786 bp, Klebsiella oxytoca
atgggtaaagcgataaaaagtgtctggaaatataggggccaatccacagcgactcggactccgacagtgattcggactctgacagtgattcggactctgacagcgactccgactctgacagcgattcggactccgacagtgactccgattccgacagcgactccgattctgacagcgattcagactccgacagcgactctgatgctgacagcgactcggatagcgacagcgattccgactccgacagtgattctgactctgacagcgattctgattccgacagtgattcggattcagacagtgactcggactccgacagtgattccgattctgacagcgattcagactccgacagcgactccgattctgacagtgattcggactccgacagcgattccgactccgacagtgattcggattcagacagtgactcggattccgatagtgactcggattccgatagtgactcggactctgacagcgactcggattcggacagcgacagtgattctgactccgacagtgactctgattccgacagtgactccgattctgacagcgactccgattctgacagtgactcggattctgacagtgactcggattccgacagtgattccgactctgacagcgattccgattccgacagtgattctgactctgacagcgattcggactctgacagtgactcggactccgacagcgactcggattccgatagcgactcggactctgacagcgactcggatattccgcaggccaacgcggataccaataccgcactga

SEQ ID NO: 209000 - DNA, 498 bp, Klebsiella oxytoca
gtggaaaggaatacaacttcctgcaatataaccttgcctggggggcatcgagcaacgtcacgctatatggcggttttcagcagcttgaagacaaatacagtaatgttttgctgggcgccggacttaacctcggcactatcggcgcgctctctctggatgcatctcagtcctgggcggatatcaaagacaattccacagcggatcgaacgtcatccagcgaagggcaatcttatcgcgtgcgctttagtaaagatattccgcagacgggtaccaacttctccgttgccggatatcgttattcgacccatggctattattctctgcagaatttcattgatagggcgaatgctcatagcgggtgctgttcatcaacggggcggactaaagatcgttttgatgcttcggcttcccagattttctccgggttcggttctctctccctctcgctggtcagtgaatcttattgggataattcacgtatggagtcgctgggggtga

SEQ ID NO: 209001 - DNA, 1938 bp, Klebsiella oxytoca
atgagtaataacatcatggataccgtcgcgcaggccgtgaattcactggtctctgcgctgaagctgcccgacgaatccgccaaagccaacgacatgctgggtagcatgaattttccacagttcagccgtatactgccctataaggattatgactccgccaccgggctgtttattaataacaaaacggttggttttatgtttgaggcgcgacctcttccaggtgcggataaagatatcgtcgccacgcttgagcatttactgcgcagcaagcttccccgtggtgtaccggtcagttttcatctcgtctccagtaagctggtcgggaatgatatcgactacggtctgcgtgagttccgctggagcggcaagcaggctaagaagtttaactccatcacccgcgcatactacctccgtgcggcggagacgcagtttcccctgcccgacagtctggatttgcctcttacgttgcgcaactatcgcgtctacatctcctgttgcgtgccccggaagaaaaactccgccacgcaaattgtggagctggagaaccagataaaaatcctgcgggcatcgctcggcggggcctatatcccgacgcgtatcctcgatgctgccgggctggtcgaactgatgcgggagctgataaaccctgacccgcatgagatgtaccgcgtaccgtacaagctggacccgtatcaggacctcaattaccagtgcgtggatgacagctttgatatgcaggtcaccgccggtcatctgaaaatcggccgcctggggcgcgacgggaaagagtgcgtgacccgggtgactaactaccatctggaatgcgatccggaaatcgccttcctctggaccaccgccgataactacgccaacctgcttaacccggaactctccatctcctgcccctttgttatcacgctgacgttgatggtcgaggatcaggtgaagactcagaacgaagccaacctgaagttcatggacgtggagaagaaaagcaaaacgtcctacgcgaagtattttccaaacgtgataaaggaagtgcaggagtggggcgatatccgccagcggcttgcgaccaaccagacctctctggtgtcctacttctttaacatcaccacgtataccgcagacaacgcagaagcttcactcaccactgaacagcaggtactcaacagctaccgtaagggaggcttccagcttatcccggctcgctatcatcatctgcgtaactttttggctatgctgccgtttaagtgcggggaagggctgttcaaagagctacaggccgcaggtgtggttaaacgggctgagacgtttcaggtggccaaccttctgccggttgttgctgacagcccactggcacctgcgggactgctggcgccaacctaccgtaaccagctggcgtttatcgatctgttctacgaggggatgaacaacaccaacttcaatatggctgtttgtgggacgtccggcgcagggaagacgggattaatacagccccttattcgtagcgtactggactcaggcgggtttgcctgggtgttcgacatgggcgacggctataagtccctgtgtgaaaacatgggcggcgtgtatctcgacggcgactccctgaagtttaatccgttcgccaatattcttgatgacgcgaactttgacctgtccgccgagcgtatccgcgaccagatgtcggtgatggccagccccaacggtaacctggatgaagtacacgaaggtcttctcctgcaggcggtccgggctccgatcattcctaaagagcgctggcgttatcagatggtgaacatgtatccggacagcagccagtgtcaccctctggggcgcagcgtgatgcgctgggaaaccggaagaaacccgcccaatacgcgtaaaaactacggctatctgatgtggcgtaaacgtaactgcgtcttcctctga

SEQ ID NO: 209002 - DNA, 1407 bp, Klebsiella oxytoca
atgccccctaaaggctggatagtttcagatgcccaaagctattgtacaaaaatagctgatggcacacatgactcacctaaacaatcagcaataggaaatttgttagttacgtccaaaaatatcattgatggtgagttggatttatcaaagtcatactttatttccgaggaagattactcgaaaataaaccggcgtagcaaagtcgataaaaatgatgtcctcctgtctatgattggcactgttgggcaggcttgtgttgttgaacaagagcctaattttgcaattaagaatgttgggttgctgaagaatgatgatcctatcaaggcaaaatggctatatttctatctttcttcgcctaaggctcagcaattaattaaagagagattaaaaggtacaactcaacaatacctttctctgggagagatcagaaaacttcctgttttttatcctgaatctcatgatgtgatgaagagggttgtatattttctagactctcttcgtaaaaaaattattattaacaacagtgttagcagaaccctcgaacaaatggcacaagccctgttcaaaagttggtttgtcgattttgaaccagtaaaagccaaaatggcggtgttggaagcgggtggctcgcaggaagatgcaacgcttgccaccatgacggcgatttccgggaaagatgtgaatgcactggcgatttttgagcgtgaacatcctgcgcaatatgccgaattaaaagccacggcagaactgtttccgtcagcgatgcaggatagtgagttgggggcgattcctaaaggatggaggggggcgtcaattagtgagatggggaaggttacttgtggaaaaactccgtcaaaaaaagaaccagagtattatggtagtgatgttccattcataaagataccagatatgcatgggcaactttttgtgcttaaaactaatgaatatttaagcgaagtcggttcaaagtcgcaactaaaaaaacttgtgcccgcaaattctatctgtgttagttgtatagctactattggtgtcgtttctatcaccaatgaaccatctcataccaatcaacaaataaattctgttacacctcataagagctcattactctattatctttatttttgtatgttgggattgaaagatcatcttcacgctttaggtagcgcgggtagtgcaactttaaatgtcaatacatctactttctcaggaattaaaatcgctcagcctgatgctaaagtattggagttatttcatgccaaatgtacacatttatttaatgagattaaatcgctcagtgtacaaactgaatcactaacccaactccgcgacacccttctccccaaacttctctcgggtgaaattaccctgccggaagcagaacaaataatcagcgaggaagcctga

SEQ ID NO: 209003 - DNA, 3711 bp, Klebsiella oxytoca
atgaaagaactggcgcaaaacagcagtaaaacgccggtactgattgccggtaacgtcaaagataagaaccagtactcagaacaccattcagtgatggccataactgtaaaagaactggccacaaccgaattacctgaaaatacgatgcttatcattcctgaagccgaaaagctaaacgtcccggccatgtatgaagtcctcaaaacggcaaacgccgttaatgctccgacggttgtcattgatacgcatacccgcagggcgacgggctttgccagtgaagttttgagaggtgcaggcgcaccggtactctcatcttcgccaggaatggaaaagagctccttaacgttagttcagaaagatacagtggacgatcgcctccaggttgcagccaggtatgtcagccagcaaaaagcggccggcatccatgtcgttgctcaggcgggcaatgatcgcacccggggacagttaacgcgcgagatccgaaatgctcttcaggagaacgggatacttggtgagacggttgccactatttcaacgctttcacctgtgtggcttgatggtacaaaccggaaccttagaagcacatatcagaccggaatggtgcttgaacggtatgagggaaaggaactccaggagacaatgacgatcaccggtatcagcgataaccacaatactctgcgagtagtaaatgaacatggcgaatcgcaggggctgagattaaatgcgatcgacagtcagtatcgcctgtacaaacaacgtgaactggagattagagaaggagaacagctaaaggcaacaggtgcatcctctcaaatgaatgccggcgataacttcagagtgagtggcgtgcgtaacggtaactggctgtttcgcgagaaacttgtccttgaaactgctaatggtaaaaccatcaaggttcggatggatcagccactcaagctcgattacggctatacagaagggcttggtgccagccgtaactccgacgggcatgtagtggccgtgctcagcagtaaagaagtcacggacacaacggttaaccagctgcgccgcagcggcgaaaatatcattgcttttactccgctagatgaggccagtataacagcacgcctggagtatgaacggacgtctgtcagcgtaactcagggaattaaaaatctctccggtaatgacgatatcacccttgcgctgcgtgaactccagaacaaccgtcttgcccccagagaaagagccgtaagacaggctattgaacttgtacagggcacaaacgtcacgttttcaagtctgaacgtagtcagtaccgcgcttaaaatggaccagtcactatccccccttgtcgcccaggccgaacttctgcgtctggagaaccggggtgaaattatcgcgctggatggcaaccaggggcgtttcggggattatgtgcagcgtgagaactggcaaaacgaaaagactatcctgaaaaatattctggaaggaaaaaacgctgtcgatccgctgattgcagatgcccggcatgaaactgaaggtaagggactgacggatggccagcagaatgccgcgggtcttatcctcgaatcgcgcgatcgttttgttactgtacaggggtatgccggcgtggggaaaactacacagtatcgggtagtggcagcggcagttaatcaggtggagggattagaaatacgtgggctggctcccacacaccgcgccgtgggcgaactgcaggcggccggtattccggcgcagaccattgccagttttctttcagaacagggggagcgtcaggcaaacggccagacgacagattacagtcggacgctgtttgtgattgatgaaagctccatgatcggaaaccgcgacctggccacattgaccgatattatcgtggccggtaatggaagagcggtaatgagtggggatgaggcccagctgaagcctcttgaatccggcgttccgttttcactgacgttaaatcgtagcgcagcggatgtggccattatgaaagaaattgtccgtcagacccctgaactgagacctgcagtggaacacatcattgcagggcaggtgcaggaagcgctgaatgtggccgatatggttagcccttccattgtcccgcgtgacaaggatgcgacggttccggagaggagcatcattgatctgaaagacagcgataaaatagcagtcgatgagatcgctacggatttcgctggccgaaccagtgaagcacgggataagaccctgatagttgcggaactgaaccgggaccgcatggcgatcaacgaaagtgtgcatgacctgctgcaggcgaaaggtgagctgggtgacagtgtcacggtaaatcatcttgtccgtgtcagtaattcgatggctgatttaaaccgcccgggattctggagtgaaaattataagaataccgttcgtatcggggagcaatatctcacgattggcctggttgatccgaaaagcaaccttgtagagcttaatcatcaggagacggggagcagccgctggatatctccgcttgaactgcgtgcgtcaaacgtagcagtgttcgagacaaaagaaatggaggtttctgtcggtgaacgtattcgatttacggccacagaccatgacagaaaggtgaagtcgaatgacttagctgttgttaccgaaattgataaagttggaaagatcacgctcgatgccggcggtcggaaagtcgtcctcgatccccgggagcagaaagaccaacatttcgattatggctatgctgtgaccacctatagctcccagggtgcatctgtaccctatattattgggctggttggcgttgacggtgccagagagcggatggcctccctggacagcacgtatgtacagttgtcccgttccgtcgaacatatacagctatatgcagatgacctcagtaagtgggttgagaaggtgaaggagcgttctggagagcgtgaaacggtccatgatgtgatgttgcgtggagaagatcttaaggccactaacgaacttaatatatggaaacgtagccaacctgtttctgcgacccggctggctgcaaaaatcgaagacggaatcgcagatgccgcacatttccggagtggaaagacgccggagctgctgtacgcggtactgaatgaacatgggcgccagaggggcaactggcatgtgccagtttcgccaacgactggcagactcgatgttgagaatgcgtactatgctggggcgagtgacggtgtaatggttgtcatgcagcagggagagagtgaagggaaaccgatttatacagataacctgccgcaggcgctgtccgagatggcggagcatcctgataaggctgtcattattctcagggatagcgacagaaatgaaacgaccgacgtcagcgcagctgaaacgattgatataaaactggaagacgaaattgaaaaagaaaaaattaaagaactgctaaaaatcgacacagaagaaccgctaaaaggtgatgagctaaaagataagatagagtctgagagagacactaaagagctgaatgatgagaagcttatagaacaaatcaacagagaaattaatgaagaggaaaacaaagagcggcaggagaactatcatgttgagttaatgaatgacgagcttaatattgtccgccatgataaagagaaagattaccaacctgattaccaacccgaaatcatcagagaagtacaaaagacgattgaataa

SEQ ID NO: 209004 - DNA, 306 bp, Klebsiella oxytoca; identical to SEQ ID NO: 110016

SEQ ID NO: 209005 - DNA, 249 bp, Klebsiella oxytoca
atgttttcaagtacctacagcgaacatacatacaagtggttgaaaatgagagacaaagaaccggaatccgaacatgattttcaaaaggcccacattaatgtgcagcttccggcagaagagaaccgcctgcttacccttgctgccaagcgctctggccgaactaaacggcaagagctgcttatcaggttgtccgatcaccttaaaaatttcgaggacattgctgctgaaggcaaacgttttaacaattag

SEQ ID NO: 209006 - DNA, 483 bp, Klebsiella oxytoca
atggtctcaaaaattgcgggggcagcccttcttctggcgatcatgtccaattatgcactggctgattgttttgatagagccggatcttactacagtattgatcccgattacttacgtgcaatctcctggcaagaatctcgcttcaataacgctgctatcaatgggaaaagtgcaggaggtacgaccgactactgtatgatgcaaatcaatagtagaacccttgcggatttacgaagagaatatccttccctcaacaaggacaagctctactcaagtccgtgcctgtgtattcatgttggtgctatgcttttgcggcgtaattttaacaaatatggtttaagctggcttgcggtaggtatgtataacgcagggatgagcaacaagcagacctctgtacagaaccgatataattatgcaatgcttataaatgatcactataaaaaaattaaagcaggtatcattcagcggccacatattgaatga

SEQ ID NO: 209007 - DNA, 231 bp, Klebsiella oxytoca
atgccagagaatgaaacaggttttgcaggttacaggaaactgattctcattaaaaattacgaagtcagcaataatttcattattatcgtcacgttttatattatggccactggtgcaaagtgttacataaccatgtgcatcaactgctatatgggtagctgttctctctcgaactatcccattaaaattaacttgttcgcgggtggttacagttcgtttaatgtgaattaa

SEQ ID NO: 209008 - DNA, 174 bp, Klebsiella oxytoca
atgtttgagtttatgggggtgtgcgtcagtactgcacatatgacggaaaaagatgaatcaatactacaggcgctaactactaatggctctaaaaaaagcaggtttatcgaatcttttcagaaaaaatgtactcataatgtacctagaaaaaggttatcaatgttatcattttga

SEQ ID NO: 209009 - DNA, 297 bp, Klebsiella oxytoca; identical to SEQ ID NO: 110052

SEQ ID NO: 209010 - DNA, 375 bp, Klebsiella oxytoca
atgaagtttatggtggtatttatttgtgtgattttagtgctttatggattttacgggattaccgtgcgtgaatcgatagtgtttacatttttggggttcagcatttcagctatttttgctgcttttgctggaatgtggattatagctatggccgcaacagtgtctttattaggtggttctatgatgaacgcaaggataattgcatgccagttatttgccatagctatgtggatgttaattattgatgttgccggagtgaatgaatcaacgaaattattaggtgtgagcatatataacattggtaatgcttgtctttttgcgatgacggtgctgactgctatctatgtgatttgtctggtgcgtgccgaaaaatag

SEQ ID NO: 209011 - DNA, 606 bp, Klebsiella oxytoca
atggtcagatacgcagatgacatagtcatcgggttcgacaagcgaatcgacgctcaatgctttcgtatagccatgcagcgcagactgaaggagttcggactcacggtacatccgaagaaaacccgactgacggagttcggccgcttcgcagccgaaaaccgcgccagcaggggaaaaggtaaaccagaaacgttcaacttcctcgggttcacgcatatcagtgggaaagatcgtagtggcaggttcatgctgatacgaaagacacgccgggacaggatgacggcgacactgaaagcgatcaagggcggactacgaaagcgctggcattactcaatccccgaacagggaaaatggctcaggagagtggttcagggatacctgaactaccactcagtcccgggcaactatcccatgatgcggaagttcaggatatacgtaacagacctctggcgacgggcgctgaggcgcaggagccagcaggatgatacgacatggacgaaagcaaacagactggcagccgtatggctgccgaaggttcgggttctgcatccatggcctgtggagcggttcaccgccagacacccaaggcaggagcccggtgcgtga

SEQ ID NO: 209012 - DNA, 828 bp, Klebsiella oxytoca
atgacggttgtcacgattattgagaagaacaaagactccagcatcgccagtttcacaaaaaatattcaaaaaataggcgagcaactacaggaaagtaacaagataaaacaagaggcaaatgacttcaataatcgggggtttttcgggcgtttaagtggcagtatcacctcgagaaatgacactgacttagcgacgatgattgcaaaactggggggcagtctgaatatcacacaggaagtgatccagtgtttattacaaatccagtcagaaaaaaatgtcgtgctgaaagagtttcatctggcgttaatgaatacgattcgagacttgaaatacaacgacacgatactggatctcagtagccgtgaaaacacacaggttattcttgaacatctgaaatcccaggtggaagacaaactggaacaggcacagcgtgtcgaggaacacgaagaggcgattaaccggttacagtcattgagctggcagcaggaggagatgcttcaacgcttgcaggcaagtcaggatgagcacgcaacacaggttgtcccaaaactcgagcgacagcagcaggagcaatggcaacagtcagggaagctggctctggccctcgaagagcaggctgatcagtaccagcaacagttggccttactgatggacaagctggccttgcaggaaaacgtcgcaacaggcatggcagcgcggatcagcgaattagagaagacatctcgattaaaacgtgcaggactgcgcgattacttgctatttgcaactagcgctcttgccgccggactggtagttatcgaagtgatgcgttttaacggcgttatttag

SEQ ID NO: 209013 - DNA, 1482 bp, Klebsiella oxytoca
atgtcatcacctaccatggctcaggaatacacggaactcaatgctcttaaccccctgctgaacagcattgttgataaaaccgttgataatgttgcacgaaaactgatcgggggttttcgtaataaacgaaattctcaaccgaatgccaaggctcctaacctcagtacgacggtggatgatacgcttaacgccacgtcgtcagcgagtgtgcttgctgtagcgaatcggggtgttcagtggaaggaaattataagcaaaagtttcacccatggtatttcctctatttccaccatgaagtttgatgggcagttcaccatcaaaaatggtgtgccagaaggcctgaaagatgtgccgaattctccgggtgtctatgtggtttatgacggcgccggtgaggtgcggtatatcggagatgcgaaggatttacagaaacggtggtatgccgggcatctgaatgaaaataaaaacgccggaaagaatggcacagaatacaaaatggcggcggagtttgaagagggttgcaccgtcaaatttatggtcatggattcagcagaaacggcggcagcggtcgaggccaacattttaaaaaatgagaaacccccggttaataagaaagaagagctgagcacagaacagggtacacgctcgaatatcgaagcaaaaaaaatgaaaaatgcgttaaacgaggcaggaggactggcctttggcgcagggaaagaggcattaaaaaatgtcgggtgggatgtcttcgaaacgctcagtaccacgatgattaaagcactgaaagatgaagttgttgacctgtttatcacccagaaagcgcaggtgaaaattcgtctgaaacgcttttttgataaaatatggcaggttatagttagcctgctcaaagccccgttaaacctgcttagaggcttattcgagttcgtgttaaatgcactgtctcaggctattgggaaaatttatcagttagcaaaaaacatctacgatctgggcatggcggcactctcgttgatgaaggggagtaaaatcatgaccaaggaagaaaccatctataaaatctctgaggtcattatcaccagtgggacgctggtgttctgggatgctgtagaacccgtgattgaatccggtatggtggctctttttgctccactgactccctttgctccttatatttctgcctcactgtgtgcgatggggtttgggctgagcagttaccttttggccgatatcgtccccaaagccgtcagccttatactctcaacggaacctgcctataccgcgaaaggacgcgaggcttttcagcaactggttgctaaccacgaaaaaagtgtggatatggtggctgaactgcaaaaatatgcaggtagcacagtgaatctgatgagtgaaacccgggagcatacggcagaactgaacagcgatgtcatcagactgactcgtttctcggtggccgatgaaattaaaaaactggaggggaagtaa

SEQ ID NO: 209014 - DNA, 243 bp, Klebsiella oxytoca
gtgcgcgggctgaccggcttcccggaggcgataaacagcatttatccgcagacagaggttcagttgtgcgtcattcaccaaatcagtaactcgattaaatacgtggcctcaaatgaccataaagcttttatggctgatctgaaaccggtatatcgcgcggggtcgaaagaagccgcagaaacggtgctggatgaactggaagcgaaatgggatcagcagtatccagtgttgctccagtcgtga

SEQ ID NO: 209015 - DNA, 516 bp, Klebsiella oxytoca
atgccgtcgacaatcagagggtatagcgatttattcatcaacaatattgataagtttgttgttttttgtcgcgaaaatatcaccttcgattatattaaatctctcaactacgaaccaaacaagaacgtattcattactgatgatatggcattttatctcgatcttaataaatacctgtcacttaaacccgtctataaaaaacaggccaactgcttcagaacggactccgaatctctaactggagactacaaagaaaacaatcatgatatttcgctcacctggaatggcgattattgggataatgaatttctggcgcgtaattctacccgttgcatgataaactttcttgaagagtataaagttgtcaataccgacaggctgcatgtggcaattttagcatctctgcttggcaaagaagtcaacttctatcctaactcatattacaaaaatgaagctgtttacaattattcactttttaatcgttatccaaaaacatgctttattacggcaagttga

SEQ ID NO: 209016 - DNA, 2223 bp, Klebsiella oxytoca
atgaagaaaattcttataatgacgccggacattgaggggcctgtccgtaacggcggtattggtactgctttcactgctcttgccactactttggcaaaaaaggggtatgatgttgatgtattgtatacatgtggcgactattctgaatcatctgtatcgaaatttagcgactggtcacgtatttatagtacctttggtatcaatctgctaagaaccggactgataaaagagattaatattgatgcaccgtattttagaaggaaaagttattcaatttatctctggttgaaagaaaataacatctatgacactgttatttcttgtgagtggcaggcagatctttattacactttattaagcaaaaagaatggaacggattttgaaaatacaaagttcattgtaaatactcacagttcaacgttatgggctgatgaaggtaattaccagcttccatatgatcagaaccatcttgaactctattatatggagaaaatggtggttgaaatggcggatgaagttgttagtccgtctcagtatttaattgattggatgttgagtaagcactggaatgttcctgaagaacgtcatgtaattttaaattgcgagccatttcaagggtttgtgacgagagatgatgttacagttaaaataaatgaaaagccagcttctggcgttgagcttgtatttttcggccgccttgaaacccgtaaaggacttgacatattcctgcgtgcattaagaaaactatctgatgaagataaagagagcatttctggagtaaccttcctcggaaaaaatgtcaccatggggaaaactgattcatttacttatattatgaatcagactaaaaatttgggactcgcagttaatgtcatcagcgactatgatcgtaccaacgctaatgaatatataaaaagaaaaaatgtattagtcatcattccatcacttgtagaaaactcaccctatactgtttatgaatgcttgattaataacgttaatttcctcgcttcaaacgttggtggaattccagagcttattcagcaggagcatcatgcggaagttctatttattcctacacctgtcgatttatactggaaaatccactatcgcttaaaaaatataaatataaaaccagggcttgctgaatcacaagacaatattaaagaagcttggtttgtcgcagttgaacgaaaaaacaaccgcgcattcaagaaaatcgatgaagctaacagcccgttagttagcgtgtgtataactcacttcgaacgtcaccatttgcttcagcaagcactcgcatcaataaaatctcagacgtaccaaaatattgaggtcatcttggttgatgatggaagtacgacagaagattctcatcgttatttaaatctcatcgagaatgattttaactctcgaggctggaaaattgtccgtagttctaataactatctgggtgctgcaaggaatttggctgcgcgacacgcctctggcgaatatctgatgtttatggacgatgataatgttgctaagccttttgaggtagaaacgtttgttactgcagcattaaactctggggccgatgtgttaaccacaccaagcgatcttatttttggtgaggagttcccttctccgttccgtaaaatgacgcactgctggcttccgttagggcctgatttaaatatcgccagctttagtaactgctttggcgatgctaatgcgctgatcagaaaagaggtttttgaaaaagtaggcggatttactgaagattacggtttaggtcatgaagactgggagttttttgccaaaatatcattacagggatataaattgcaaatcgtcccggaacctctattttggtatagagttgcaaactccggcatgttgttaagtggaaataagagtaaaaataactaccgcagtttccgtccttttatggatgagaatgttaaatataactatgcaatggggttgataccttcctacctcgagaagattcaagaacttgagagtgaagtgaatcgcttgcggagcatcaatggtggtcattctgtcagtaacgagttacaacttttaaataataaggttgatggtcttatttctcagcaaagagatggctgggcccatgaccgttttaatgctctgtatgaagcaattcatgtccaaggcgcaaaacgaggcaccagcctggttcgccgggttgcccggaaagtgaaatcaatgttaaaataa

SEQ ID NO: 209017 - DNA, 345 bp, Klebsiella oxytoca
atgaaaaatgaaaatagaaatatgaaagaaaacgtattacaagagataatgtattacaagttaatatgttatgggattatagttttttttgccaaaggaacattgataatgtcagatagaattcctacgttaaatgctctacttaataaaataagcagcactgatgctatctattatacactatcggttatgttgttattggaagtgattacattcctaacttatggcgcatttaaatcaatgaagaaaaagaaggaagaaaaagaacgaggtttaataaaagaaggtttttctgaaggattttctaagggttttaagaaaggacaaatggataacaatgattga

SEQ ID NO: 209018 - DNA, 168 bp, Klebsiella oxytoca
atgattgaaaaaatagaaggttttatcgtttatatattcaatttccgaaaaataaacaaaatgactgagactttagttaggttatcgaacagggaagaaatgacagaggacaaattaaaacgctttctgttagaagaaagaattgaagatatgttaaaccatgaataa

SEQ ID NO: 209019 - DNA, 312 bp, Klebsiella oxytoca
atgatgagtaaaataaatagtttctttagaagtctttatgacactgagagcaaaaacggaaaaaagcttagagaaatttctatgatgataatgagattaggaatatggatgattacatacggttcatttagtgtgttctttaatggtttttttggtttcgatttcaattcagaagtgattgctaagatgactgtgattacaggtgttggaggtggtgtttttcttataggtttgttcattacgtttatatttaaaaaagatggcggtatttatgatggtaaagccataaatcaaaacaacaaaggagaatga

SEQ ID NO: 209020 - DNA, 243 bp, Klebsiella oxytoca
atgattattcaaaaaagtatcagacaaatgaaaaaagaagcatggacattaatagcaatattatatttatcaagtatctcattattaatattaacagtgaatgtattaccaaaaacaggattagatagcttttatattataggcggtggtctaatggctttgacttcattattatcatggaaagaagcatataagttagtaaacaggataaatgaagcaaaaggaactaaaaagcctgattaa

SEQ ID NO: 209021 - DNA, 378 bp, Klebsiella oxytoca
atgaatatagatattatcggaagtttcaataaagaaaccgcaattgattacagagtgttttatacaaccgactattttgaatggttaaaagacctatataaaacaagaggcgaaaaaatcactcttaaagagctacacaacaacttaataaaagaatatggttcattggttaatgttattgagttaatactcagaacagatagcaatattggaagtatcaaagaatcaacattcgaaataatcgatgctgacaacattctttttgaaggcagtgaagatttaatggctgttcgattagtgatgaacatagaatatttagatatgtggattaagaaatttgatttcaataactacataacagaggcatttaaaaactaa

SEQ ID NO: 209022 - DNA, 303 bp, Klebsiella oxytoca
atgaaaaaacttctggcggtatgcgtgatcgggctggcctccttccttgctggttgtggtgatgatggtatctacggtatctacgggaactacgtgaacaagcagtacggggttaggctcgacgttcaaaaagatgttatcaagtttaaagatggcgtttttaacgtgaaagaatgggatgaaagcaaaaagcctgtatacattgcgaaaactcaaaacaaagaaataggttcatggacatttaaattagagaaggttaagcagggcgtcatttatcagggcgctaccttcgagaaggattaa

SEQ ID NO: 209023 - DNA, 504 bp, Klebsiella oxytoca
atgaatagtattacaatagaagaaaaagatttaaattctggagtgtttgttattaatcaagctaagtttaaaaacaaaacagcatacacttgtattagaatgacagacgatattaagagcttactgaaacagaaatgttctggcgctttagatattgcaattattggattattaaatcatggtttaagcaaactaaaagagcaaaacaaagcaatagaaataaaaaacattaatggaaatatacattttattgaacatgataaaacaaatggtaattcttttataaatgtcaaagcaaagatacaaagggaaagtagcaaatcatttagtattaggatggataaagatttaaaagaaagattaaaagaagcttcaggcaatatctcttatagtgttggtatattgggtgttattaaatattcattatttatgcttgagaaaaacaacaaagcgttaataattaaaaacactgatgctaatattgacaattcttattttatataa

SEQ ID NO: 209024 - DNA, 243 bp, Klebsiella oxytoca
atgattaaacgcgtattccgcctcaccctgagggctgatcagggctttattgattccattttttctctgatgacactaccactgcgctgtccggattacacctccgtcagccggcgggcaacgtccgttaacgtgagttttaacaatcccaaccgtggtgaaatcgcacacctggtgattgattcgaccggattgaaggtcttctgggggtcggttccggctgagggcgaaatgacaccctaa

SEQ ID NO: 209025 - DNA, 327 bp, Klebsiella oxytoca
atgacagcgaagcgaaccaaagagattaaaatcaggctgaccgagcacgaacacgccgcgctattggctcgttgcccctcgccaaaattagcggaatggatgcgtgaaacttgcctcgatgctcgcaaacctaaagcgcgaaaaattcccctcatcgacccgcagctcttgcgcgcactttctggcattgggaataacgttaatcagattgcccgccttttgcataacgaccccgttttcactcgcacgaagctgtatgaactgctcattcagattgagcgcgacatgaaatctatccgcgaggaatacaccggcgatgatcgttaa

SEQ ID NO: 209026 - DNA, 459 bp, Klebsiella oxytoca
atggacaagacttctcagtgggcgcaagccctgaacaagaataccgaagcgttaaagaaaactatcagcgacaacgaggcgcagagtacgaaagaaatcgccgaaatcttgaggaccgcatcgcaagaaaggaagagtaccatcaagcgcgttatagccgaggaacggaaagcatacgaccagagcgtcagggagttattcaaagtcaaaacgtggcaggggtgcgtgatgcttatccctttcgtaatttgcatcggactcttaacgtggagcacgtatctccatcagcagatagacagtcagaaagcgcaatcggagtattgggcgaagcacatgggcaacgcagaagtgacaacgtgcagatgggagaacgaacctcacaaccatccttgcgtccgagtagtaccggggagaacttacggggagaatggcgatctcatggtgataaaggggtattaa

SEQ ID NO: 209027 - DNA, 216 bp, Klebsiella oxytoca
atgaccgagatagagaagctgttactgaacgcattagagacattacaggacgatcatcagaaaaccgtcagcgccttgagttcggagctaggcagcttaacgaagcttgtgcgggagttaaatcagcagctcataaccgagtcgaaaaaaaccgaggatttaatgaggcagttcagcgagttcaacagtgcattcactcggttaaccaagcaatag

SEQ ID NO: 209028 - DNA, 282 bp, Klebsiella oxytoca
atgaaggatttaagcgataagcaaactggcgacatgctcaaagatggcagagataaggccagaaatcagcgaggccaggcagcttacagacagcgtatgcgtgacgcaggttatcagcaggttgctgtatgggttaagaccgatgctcgcgaaactggacggcttgcgggacttcattcgagtaagccaatgccagaagccgcgcaggatgatccgttaggctggtcattaggctttgcagagggttttaaacagcgtgaaaaacagacagttagcgagtag

SEQ ID NO: 209029 - DNA, 999 bp, Klebsiella oxytoca
atggctgacccagttcaacaactagaattttttgcctcacgcctacccaagaagccttatcacacggattgtctcgccagtggcttgcgtattgtcgccagagagacggcgcgtaaatcgcgctatatccagcctaacggggcaacacacaagtattatctggtttttgacgtagaccgcgctggcgcagcgattgactggactgacaggaaagcccccgcaccaaatattaccgcgatgaaccgtgataacggacacgcccacctgatttattgcttggaaacatccatcagaaccgcaccagacgcaaacatcaaaccgctgaagtatgccgcagccgttgaacgcgctttgtgccatgcgcttgatgccgatgtacgttattcagggcttatctgtaaaaaccccctaaatgtacactggcaagttaccgtatgggaggaaaatgcctacacgctcgactggttagccgattgcctcgatatgagcgctgcaaatacacctaaaatcgattttgattacggactagggagaaactgcgctttatttgaaaaaacacgccagtggtcttacagggcgattaggcagggttatcccgaataccctcaatgggtagaagccgcgatacagcgagtagaagcctacaatctgcaattagtcaccccgctatcagccgcagagtgcgcgactatcggaaagagcgtcgctaaatggacgtatcagcatttcaccgaaaaaagttggttagagtgggtagccaagacacacacaccagagatacaggctgccagagggcgtaagggcggaaaagttggagggaaaattggtggtaagattggcgggaaagtttcaaagcgaaaaccagtaactgactcagctcgtacattacagccgtggattgagttaggcattagccgtagaacgtattaccggaggatgtctaaaaaaagctcaaaaaagataaatgtaattgatgaatctgatcattttttggtttag

SEQ ID NO: 209030 - DNA, 870 bp, Klebsiella oxytoca
atgaaaatcatcgtatcactattaaaaaacttaagcagagtagaaaggaaattaacaaaaacaaacttctcgttgtgccttgttgaaaggataatattttctataataaagaaagtgcaaccactaccccccgtaaaaaaaataaaagaaataagtgggaacgtaatatggacagcttggtttcagggggtttctgctgcaccagatttagttctatgttgcatatcatcatttgggaatatcaataactctaatgtaatagtcataactaaagaaaatttaagtgactatatagaaataccaatcaatattctcaataaatacagggctgggatgatatcaaacacggcattttcagagatagttagaatagagctattgtccacatatggtggcttgtggcttgattctacagtgtttatcacaagtaaaatcgaatacccagttctaggtggtttcttcactttaaaaggagttagtaagttaaagtgtggtgagttctcaggtttgacaccagtttacatgattggttgcgaagaaggatacaagcccatccttgagataagggagaacttgttgagttattggatggtgaacgataatcagatagattattatctgattgattatatatttaaattggaaatgttggggaatttaagttttaaaagagacgtggatgcattgccaattattggaatgaaaaggtttaagctgtctggagtgattaatgaaatatataatgaagataattggcaagaattgatgggtgaatcaatggcgtacaagctaacaaataagagtgatgtttgttgctttgtggatgggaaaaagactttctttaaaaaaataaaagaagagtataaatga

SEQ ID NO: 209031 - DNA, 1284 bp, Klebsiella oxytoca
atgaaaaacataaagtcccttcttagtgtgtttgctatgcaggcgggtaattacttatttcctattgttacaatccctattgtttcaagggtttttggtcctagtcttataggtgatcttaattactatgtatacatagtgacatttttctgcttagtaatagagtatgggtttggttattccgctgtaagggagttaacgagaaaccctgattgtaagtctgatatttttacgcgaacattaatatcgaagtcatttttgttggttttctctacgctcgttgcaatttttattgcatcacgaagtgatgttgactcctctctttttattggttgttatgtgttggtgttgaactcatactttaatatcacatggtttttgcagtctacagggaaagtttttttaatatctattctttctattatttccaaagtggtgagtttatttttggtggtttttacagttaaagataaaagtgatttggtttactactcttacgttgttaatgtgcctattgttttaatttctatattttcatttttgtactttttatttgtttttcgcataaggattgatataagctctaagtcaataaaggaaggttttttaaatttggttcattcattttggctcttcgcctctaaaatagcagcgaccttgtacaccactgtaggggttgttatattgggttatttatcaacatcatatgatgttggtttgtacacgtccgctcaaaaaataataggtgtgttcatatctttgatgtcgatgccattaagtttgattttatttcctgttttatcaaagagaatatctagtgacttaaatgaagggatcggtttgtttaaaagaatattcccattacttataatgttgtgccttgcatccttcctttttataatgttcttcagtgataaaatagtttcacttctgttgggtgaacaattcaaagagtgtattcccttgcttaatatactatcagttgggtttgttttcttgtttttgggtattgttattggtggtcaggtgattcttaatttaggatatgatcggcaatttgtgataatgcaagtttttgtgggtgttgttagcttgatttttagctttttatttcttaagcaatatggcgctaaagggttggctgttatttggagttcgtcggagggggtggttctgattatgcaatttatttttatatacaaaaaaggtgtttttttgttagatataaataactttaaacctggcagtattctaaaaacaaccatggaaataataaaaaaatga

SEQ ID NO: 209032 - DNA, 282 bp, Klebsiella oxytoca
atgtcatatacatataaagtcataaataatagcctcttctttattgaagaggaaagtaataagcagtatgaagtaaacgttataccaaaaggaattggaaataatctgtttcaggtttctattcctgatttaagcccgcgcactttagaagcaaacaatgctaaagagctttttaatcaggttgttgatatagataatgtaagacgtagttttagacgacaaacaccagaagagtttaaatctaagttccaaaaaatgaaaaagaaagcttgtccagaataa

SEQ ID NO: 209033 - DNA, 2067 bp, Klebsiella oxytoca
atgaatgaaaaagataatgttttacagttaacgccgaaagattttaagcgagctttacaagctcaggataatccgtggcgtgaaacagaagaatactcaataggtgcggaaggtatttttattcgcactgtaaagacttataaaaatggcgttgaagatgttaaatgggttcagattcatcctttccctttaatgccaattgaaagtgttgatatgctggattctgatattcaggaatcagtatttgatgaagaaaatcaggtttcatctaaagacacaaaaacttatactaaagttcgtttcttagatctaaatggtcaggaaagatttgtcaaaatccctcagtctgaactatctcaaatcagtaaacagtctttgttagctaaacgctggcctttacccccggctaacaaaatgtcaaaggttgctgacataatgttaaaggtgctggctgatgggcgtagaacggttgtttcacctgctggcgttgaatatgaaccatgtataaaaatcacttctggatctgataactgcggctgggttaatggtgaacacattaaacccggtcaccctcgctatgtcggtgatgaagaatgtatgacattcaaggcaggtaaagcagagattcagattgatattttaggccagtggtacgcacaagatgaacagttagctttaatcgctgctcatcaactggtaggttatacattcggtaatatcttttctccttcggtaaaccttatcattgagttaacaggtgatccgggagatgggaagtcagtaagattaattgcccaatcgtcctatgaaggtataccgatcaaaggtcataatatcctttattttgacgctacagcgtctattgcaggtatggagcgtttattcccgcttttaaacagcggtagtgtacttttggatgagtttgataaaatcgtaaataataaaggggcaaatgttgccactgaaatgatttttatgatttgtaatggtactcagcgtgttttagcagaagctaacgacaataaaaaagccagaaaaattaaaaagtggtcgttttcccccgttgttgcgtctaataaaccaatcgttgaacgccttgatggtcatgaaagcattatggctataaaagatcgtatctggactattcacacttgcgatgaagagattttaggctttaaaggcgatctatctatcgttaacgtctggagaagattacttgaagaaaactatggtcatatttacggcatagctattgattatataaaaaacaaccgaattgctcttattaaaaagttcgaagatttaaggaatgagctttataaaaaagagtatggcgatcattatagtaaagatatgcgtgatgctgaaatgattgcttcacttcaattaggtgctgatttagtttcagaaattttcggtgaagaagctggtttatcagctcatagagcggtagatgtattcaaaagaagagtagcaaataccacttttaacgctgataacaactacaaaattgttattgaaagatttaaagaatggattgctgataacatcggttctattcgtattgatggttttgcttacacaggctcttatggtagaaacagtgaagaacaacagttagatcaggctgaacgcctcactaacaacgctatcatgtctaacagaggtgctatagctggacttgagcaatcaagacctatgcagcatagaactgattttgaaggttgcatctggttaaaaccagaagcagaagcaagcttaaagaaatctggtatagcaattgatgaacttatgcgagcagcaaaagaacttgatttgttgccaaaaacaaaacgcggtgagttgattgataaacaaaaacttagtggtcagaaaaaagactggttagaaaataaaacgtcttacgccattaagatattgctttatccattccctgaagaagaagatgaagttaataatgagtttgaggatgaagtgttttattcaaacgttgatcgtgaggatatagattcacttgttgaacaaaacattaatgctcatatgttcgatttacctaaaattgattaa

SEQ ID NO: 209034 - DNA, 2130 bp, Klebsiella oxytoca
atgccaaacgcaaaagtaatagttgaatattcaagaaatgatgtaaaggtttcaggtggcctttatggatttaaaccttctgctgaagaattgggtgaaggtaatgctgtttatgaagatgctttgacaggtaaaactattgaggcaagaactctaaaagagttaatgcaagaaatagccattccagaagtagaagctgaatatgacgaagaaggtgttttaataaaatcagaacctaaagatttaggtgatgttgtagataaggaaattcttttttctgctgaaaaagttaaaagaatgaagttatcagaaagagatggtaaagcaatcattgataaatatattaatgacgaattaaaatataaaaactatctcaagttgaaagaagcgtatgaaaatgacccttctaaaaaccctatgccaaaagctgtagttcagcctcctgttgagccaaaaccttttatcttcactaatgcgttaagagaaagaaaagccacagcaagaactaacgatactgaagcttatcaggttatctatgatttatccggtgttccagacgagatccgtgttgactactggagaaccatcgttaaagctcatgctaacccaaactatgttatagaatccactcagagcaacggagataacacagttcgcggtttccgtggtaaacgtccagtaatcgcaaacaacatccacgtagcacaggatgcttctgttcacggtcagctctatgagttcgtgtatgacgtttcagacgctaaatatgtgctttgtgatgatgctaaacgtgaagagcttaaaaagcttggtagagaagaccagataacttacttcccaaatgacgaaagggctttcgttcctgagcatggcggcgtgttcccgtttgctaaatggatgaacagcagaacagatctcaagtctgatacttaccgtgaaatagttttaaaacacgtaaaccgtgaattagaaaaagcgggttatggtgattatccggttcactcttttgttagtcgtgtccagaagtttaaggacgaagaacaggcagaagcggtaagaaaggttcatactgatttaccacaatctattaatgattataaagaagaatttgctgaactcgcaaaactcaatattgaccctgatcagaaaaatgcttctattattaataaatataatattaatatcagagaaaaaagtaaacgtgcaatcgagttaactactgaactcgaacgtatgcataaagatattgaaattatgaaattagcacaagctgcagaagtggaaaaccttactcttaaagtagagaaggataagttatcttctaaagtagtagagcttactgaacaaacttcattaaaagatgaagaaataaatgaactcaaggaagagcttgaaaaagaaaggactgaaaaagaagagtttgttgataaaaataatgaattgtattttaaaaacactgaacttgaaaaggaaaaagaagagttagcgaaagaggttaaaacgcttgaggacgaaaatatagcgttagaaaaagagaataccactcttactgaaaaagtttctgctcttgaagagaaaaacactaaacttgaagaagaattggaaactcttgatgctaatactacgcgagagattaataatttaaaaggtcaggttgaatctcttaatggtcaacttgagcaaaaagatattactcatgctgctgataaagaagctgctttagcagagttgagaaaagaacttagtgaagcgtttgaaactgaaaaacaggaagctttagctaaacttcgtgaagagttaacggctcagtttaaagtggataatgaaaaagcgcttgaagctcagaaaaccacgcttgaagctggatttacatctgaaaaaactcaagcattgaatgagcttagagaagaacttaacaaaatctttggtgtgaaagaaaacgagtataaagaagtaattaaaggtcttagaactgaatccgctgaaaacttcgagttagcaaacacctatagccaaaaaatgcgcacgttcttacaagaaaacactgatcttgttgaagagaatcgtaagcttaaaaagcaaatcgaggattttaataacgggaatgaaaatagaccaaaaaataaataa

SEQ ID NO: 209035 - DNA, 1761 bp, Klebsiella oxytoca
ttggctaacctaccaccgaagacgttgctcaccgaagataaagaccataaccaacgtgaagagaacaagaacagtcagaatctgttaatcaaaggggataatctcgaagtattaaagcatatgattaatgcttatacggaggaggttaaaatgatttatattgacccgccatataacacgggttctgatgggttcgtctataacgatgatcgcaagtttacacctgaacagctttctgagttagcaggtatcgatcttgatgaagctacacgtattctcgattttactgtaaaaggctcaagtagccatagtgcatggctgacattcatgtaccctcgtttatatgtagctcgtgagcttttaaaagatgatggaataatatgtatttctatagatgaaaatgaacactcaaacttaaaaatactgtgtgatgaagtatttggtgaatttaacttcgctggtgaaatagtatggaaaaatagcagcaaaaacgatcaggcctatatttcaattcagcatgaatacttattattttatgttaaaagtaaagagcataattctggacaatggagtgagaaaaaagaagggttagatgaaatctataaggcatttgatggctttagaaaaaagcatggtgacaactgggctgctatacataaagacgctttagaatggttcaatcaattccctgcttctaacccaataacaaatagcaaacattataattggatggatgaaagaggcatttatttccccgataatatttctaaaccagcgaatggttattactatgagattgaacatcctataaccaaaaaaccatgcaaaaagcctgctgggggctggcgttttattgaggaaacaatgaaacataaaatcagtgagaatagaatacattttggcaaagaccacactgtagttcctaacaataaaacctatcttaaggatactgagtatcaaagcctgaccagtataaaatttaaagacggacgcgtagcatcaaatatgttaaaaaacctatttggtcagaaagacatcttcacaaacccaaaggatgtagggttattgtctgaaatatttaaggctctaaatattgaacatcgagatattgtgctcgatttctttgctggatcggcatctactgctcatgcaatctataatatgaattgcaatgaagagaaggagctaaaatttatttgcatccaacttccagaagagaccaaagaaaagtcagaagcctataaagctgggtataaaaatatctttgaaattacaaaagcaagattgctcaaatcctctgagaaaattaaaaatgaaaaccctgattacaggggagacctaggttttaaaatatttgaaacagttaacgacttccgtgcaaaaaatgaatcagaactaacactttctaatctaactttctttgatgatgtcgtactgactcctgaacagtatgacactctactgactacatggtgtgtatatgatggcaccttgttaacaacaccaattgaagatgtagatcttaacggctacaaagcacacttatgcgatggtcgcctgtatctgattgcgccaaactttaccagtgaagcactgaaagctttacttcaaaagctggattcagacaaagactttgctcctaacaaagtcgtgttttatggcagcaacttcgaaagtgcgaaacagatggaacttaatgaagcactaaaaagttatgctaataaaaaatctattgatttagatttggtggtaaggaactaa

SEQ ID NO: 209036 - DNA, 2913 bp, Klebsiella oxytoca
atgtctaaagggttcacattcgaaaagaatttacctcatcaaaaggctggcgttgatgcggtgatgaatgtctttgtatccgccatacctcaccagacggatcatgttgctattcgcctgttagctaatccagaactgaatctatctgaacaacaatactacaacaacataaaaaatgttcaggagttcaatggcattgagcattcaaaagataattacgatgctagaagcaacgtaattgatgtttctatggagacaggtacgggtaaaacctatacctacacaaaaaccatttttgatctgaacaaatcttttggtattaacaagtttatcatcattgttcctaccctatctatcaaagctggaacagttaactttttaaaaagcgatgctttaaaagaacactttagagacgattacgagcgtgaactaaagacttacgttgttgaaagccagaaaagttcgggtaaaaatacaaaatcgtatatgcctcaagctatccatgattttgttgaagcaagtaatttcaataagaaatatatacacattcttgtgatcaactcagggatgattaactctaagtctttaactgaaacttatgatgttggcttgcttgataatcagtttgataccccattttctgcacttagtgcgataaaaccattcattatcattgatgagcctcataaatttcctacgggtaaaaagacatgggaaaatattgaaaaatttaatgctcaatatattattcgatatggcgcaacttttagtgaaggctataagaacttagtttatcgtcttacagccgtggatgcgttcaatgaagatcttgttaaaggtattgatgcatacattgaagatattgttggtgatggtagtgctaatcttaaatttgttaaatctgacggaaaagaggccacttttgaactaaacgaaaatggtaatagaaaaaaattcaagttagccaaaggtgaatcactatctaaaacgcatagtgcgatccatgatttaacactggatgccttaaacaagagcactgctgtattgagtaatggtattgaactaaaaattggtagttcaattaacccctactcttacgatcagacgcttgctgataacatgatgcttaaagctgtcaaagaacactttaagttagaaaaagagtatctgacacaaagaccacgtataaaaccgctgactcttttcttcattgatgatattgaaggctatcgtgatggtaatgatattgccggaagcctgaaaaccaagtttgaagaatatgttttggcagaagctaataaactgttaaaaacagaaaaagacgaattttatagaaactaccttgaaaaaactgttcaggatgtatcttctgttcatggtggctatttttcaaaagataacagcgataaagatgataaaattgagcaggaaatcaacgaaattcttcatgacaaagagcttctattgtcgttagagaatcctcgccgtttcattttctctaaatggacgttgcgtgagggatgggataaccctaacgtattccagatttgtaagctccgttcgagtggtagcacaacatctaaacttcaagaggtagggcgtggtttacgtcttccagtgaatgaatacatgtgccgtgttaaagatcgcaattttactttgaactattatgttgattttacggaaaaggattttgtcgattcgcttgtcaaagaggtcaacgatagctccttcaaagaaacggttccaagtaagtttactcaagaacttaaggataaaattctttctcagtatcctgatctttcatccagaacactcatgaatgaagtttttgatgataaaatcattgatgataatgacaactttaaagattctgatgcctatagtcgcttaaaagccaaatatccagcggcattccctactgggttgaaaccaagcaaaatcaaaaaagccactgatgggaaaaaacgcactaaaatgcgtattggcaagttcactgaactgaaagaactttgggacctgatcaatcagaaagcagttattgagtacaaaataaacagcgagcatgagtttttatccattttcaaatcattcatgcttgaagaagcagatagatttactaaatcaggcgttcatactcgcatagataggatttacatccataatgatacggcgatgtcgaaaagcattataagtgatgatgataactttgctaaactcaacacaatgagttatcgagaatttcttgataacttatcacaaaccatgtttgctaaacacgataccttgcataaggtattttgtgatataaaggatactataaatatcactgactacctgaacattcagacaatcagaaaaattaaatctgggtttagtaaatatctgcttaacaattcgtttaacaaattcagtcttggatataatgttatttcaggatcgattcatcctacaaaattcactaatgaagaaggaagtcctctaaacgaggttttgtcgagtgatcttggtgtattacatgataatacgaaaccaccgttagattcttatctttttgaagaagtcttttacgactcagagcttgaacgactcaacatcacagatggagaaatccagtctgtagctgtttttacgaagataccgaagaactctattaaaattccggtagcaggaggatacacgtattcccctgactttgcttatgttgttaaaactacaagtggtgattacttaaactttatcattgaaacaaaaaatgtagatggtaaagatagtttgcggcttgaagaacaacgcaaaattgcacatgctcaggcattgtttaatcaaataagcaaaacaatcaaggttgaattcatgactcaatttgctaatgatgagatttatgagttaataaagaacgcacaagcttag

SEQ ID NO: 209037 - DNA, 312 bp, Klebsiella oxytoca
atgataaacaaaatcaaaaaaagcttaaataaaataacagtaggtaaaatatttatagcaggtctattaatgctacctatgacactgatattccctgaaaacattctatgtggatacatgtcggcattaggtgcagcaattacattcgcaacaataacttttaaattagcattgttcttcatttggtttattcatctcacatttttaatgagcatgagaggaacaacagagagagcagaaaaatatatatctgacttgaaatctgaacacttaaaaagtggaaaggaaatttttttagggaggtcaaaatga

SEQ ID NO: 209038 - DNA, 159 bp, Klebsiella oxytoca
atgataaataaagtaaaaacacaaaataaaattctaacaagagcggatttaataccagagcctgtattgattaagccaataaaacaacttgcagataaagatgtgaaggaagctttaagcaaaaagatttcagaaatgaaaaacatatatgatttttaa

SEQ ID NO: 209039 - DNA, 144 bp, Klebsiella oxytoca
atgcaattgttcgtcgcgttcgctcagaagcaaaactttggtaccgggcgcgacattgtatcgaccaatcggctccgggtcatatgcgatgtcacgatcggctttatcggcgagctaggacatataatcttcacgggtcattga

SEQ ID NO: 209040 - DNA, 2025 bp, Klebsiella oxytoca
atgagatataataagcccctatcaattattttattattcatgattttgttggtggtggttatccaaaccagcatatttatagctcatgaacagaacatttactattgggatttcaatggatactggagaatgtgggaagagttttgtgccacattccctaatgagcctatcaactcaataaggacagtctttcactctattagacatgatgactataactctcttcctgtcgccatcacgtcatggttctatctttttaatttaccttcacggctgtcttatataacttcattggctgtgatgtatcttttccctacagtaatactcttccatttactgtgtaaacgtttttctgataatcactcttttggctggttgttactttcttgcattttacctttaacctttgtggctttttgggccccaacgcttaaaggatatcctgatatatcaggcttaatcccaataattgctgcattactatatgtttcgagcagtgatttcggtgataaggttaaaattaaaaaagcccttgtgactggattacttctgtggtctccattcttattgagaagatggtacgcatatacggttgtatcattgtatatatcattacctgtgcttaattatttcctctacaataatgccaagcatagctttggtcgcgtggccatcattatcaaaaattttttcgttgctggtattttctccgtattgcttaccttgatatttcagggtgcattaattaagagagtaattgcaactgactacgccacaatatattctgcttatcagtcctctctcagtcattccattgaaaatctttataatgatatcggtttatatctattcccctttgtaatcattggattgctttccatttttcggagtaaagaccgtaatgataaaatccttatcatattctcagcttttaacttagtatttagttttttcttatttacaagaacacaaagccccggcgtacaacactgccttccttttgctctttgggcgttaataatcgccaccttgggattaaaaacgttattgcatcttgctaccagcaaaacttatcaatattcaatgctcattgccgtcactggtttatgtttttttattaactacacttcgctatttagcgcaaaacaatatacaacgattgacaagttgttgcctatcaaatcgttgcctatacacgtagataatttcaacaattacgttactctcgttaaaaatattgaatcgcttacacagggaaatgaaaaagtcacgatacttagttcaagttcagtacttaatgacgatatgataaataccatttcctaccggaaattaacagggaaaatagcatatgcttctcaagttgatctcagagatggtattaatattgaatctttactctcgaaatattttgttgtagcggatccgatacaaacacacctgacaccggatgggcaaagggtaattaccataccagcaaatgaaattctttcaggtgacggaattggtgctgctttcaggagaataggccctgcctataaactgtcggatggagttactgcatacatttatgaacgaacgcgttcctataccgataaagagattaaaaactttttttcacttttctacaagcattaccctcaatgggaacaagtatatgggaaagggctttactatccgtttctttcagcaagtgtagttgttggtgatacctggggtaaatttaccatctccgataatggtgaaatcgatgcccatccaggagacaacacccctaccacagcgaaatggatactaactggagttaacacgcttgtttttgactcttacaacacgacgtgtagtaatgctgatggtgtggacataaaaattagcaacgatgaaggaaaatctagtaatgtttatattaaaaacggcagtagtggaatcatggatgttgaggaattttcaggtaaagaatcaaccattgaaattctcaaacacgaatactctgcttgtgactctattaaaataaccgcaaaataa

SEQ ID NO: 209041 - DNA, 972 bp, Klebsiella oxytoca; identical to SEQ ID NO: 145052

SEQ ID NO: 209042 - DNA, 438 bp, Klebsiella oxytoca
atgacaaccaaaaatgaagagttccaagaaagactaaaggcatcactaaaaaaagccaatgaaacactaattttaaaagacaaaatagagtcagatatttcatcaattttgtcaatgctaaaggatataacatccgactcaattgactttgatattttacagaataattcgaaaattatcaaatatataggttgtaaaaaaattgtcagaataaagaaaaactctattatggcataccctaaaggtttcattttatttggatttagcataaatgagtctaccggatatcctgtgcaggtagaaacggaagacgaagccgcagagtgtacggatgtggataacttaaaagaatcaattgtttacataatagaaaaaagatctatagagataatgaaattaatatccgagcaacaagaagacgatgacattcctttttaa

SEQ ID NO: 209043 - DNA, 894 bp, Klebsiella oxytoca
atggaattgaatttatgttggtggaatattggaatatcaccacctgtaaaaggcgtgaagaaagacaaggctgaggctattagattggccaagcactatataaaaaaaatgtctcaagaaaaaacattggattttttgggtatctgtgaaatatcagaagatgaggctatagattttaaacctttggctgataaactacatcttgaatacttgaatttatcagggactgttggtcggataattatggatatatccataatgtacgaagcatcaaaacttgagtacatagattataaatatataattaaaatacaaccagatgatagaactttgcgtattgctgtcagagttgtttttaaggatgcagtaacaggaaatctaataacattctttttatcacactggccatccataagaagcgcagatgaaaagattcgagaggacgctgccgagtcactgcgcaacaatgtaactaaaatactagatgaccacggcattgagtcccaaataatatgcatgggtgattacaacacaaacccttactctgttgcaataaacgaaaaactttacgccactagagattaccatcgaataaagaataaacgaaagcttctttttaaccctttttggtatttactttcagacaaaaagaccaataacttaggaacttatcattataaatcaggaacatcgaatagatggtttgtttttgatcaaatgttgttttcatcatcatttatatacggaggaaaagattgtcttaagctagacatgaacagccttgattttcatcgtatacttagtgatgataaccaatgtttagatcaaagattttttaacacttttgatcattacccaatattttgtaggatttaccatgacaaccaaaaatga

SEQ ID NO: 209044 - DNA, 957 bp, Klebsiella oxytoca
atgagtcagccaaatcaacactgcatcggtatcgatgttgctaaattgtcgctggatattgctggtacggcagaattctctcctttttcttccagtaacgatgaggacggattcatggcgattctgaaagcgctgaaagaatggaacatctcgctgatactcatggaagcaaccgggggcctggaagcttcggttgcctgttgcttacaggccgccggatatgaggttgttgttatcaatccccgtcaggccagagactttgcccgctcaatgggatatttggccaaaacagataagcttgatgccgccatgctggcacagctcgctcagatcatcgatcgtcatcctgaccgcagccggtatatccgagctctgccggacgaagcgcgcgcggtacttaccgccatggtcgtccgtcgtcgccagctgaataacatgctcgtcgccgagcgtaatcgacgctatccctctcatccgcaaagtcgtaagagcatcgataacattattaatgcgcttgaaagcgagctggaccacatcagtcaagagatgaagcagcacgtaaaagtttttttcatggaacaggccgagttgattgggagcgttaaaggtgttggtgaagtcactgtcgcatccctgattgctgagctgccggagttgggcaaactcaatcggcgggagataagcgcactgactggcgtagctcccctgaaccgggattcaggaaaaatgcgtggtaggcgaaccacttttggcggaagggccggtgtccgggcaacgctatacatggcggctcttgttgccacgcagtttaatcccgcaattaaaatgttctatcaacggctgcttaccgtaggtaagcccaaaaaactcgcactggtggcctgcatgcgcaaactcatcaccattttaaacaccatggtcaggaagggagaaaagtgggatgcttcgttcagataa
